United States Patent Application Publication US 2024/0301379 A1 - sequence listing, part 2

SEQ ID NO: 1419 - protein, 1045 aa, unidentified
  REGION 1..1045: note = Description of Unknown: Cas Enzyme sequence
MDYVLGIDLGVGSLGWALISTDSNDKKSILQLGVRCWDAKTSDDPQNIIRRQSRSRRRQNFRRAQRLRRTFRILQEMDLFPTGPWSSTARKAFLETLDQKAQEWLRTNVPDANDDGLLAHTFIYRLRAAALDHPLPPELLGRVFFHLAQRRGFLSNRKAQPKDDKEPGVVKQGISQLQDEIQKSGARTLGEFFSRLNPHEQRIRNRYTSRKMFQDEFEKIWNAQQLHHPNALTDSNKKRLYEAIFFQRPLKIPRSFVGRCSLEILTRKLANGQIEYIYPFRRAPMASLEAQRIRYMERINNLEIITPDGECRPLTPEKRKLLYDLAERNEALSFSDIKKALGIPTRKTKAGIWRLNLETGGEKRLLGNTTAAQIRKVLGDAAWEALESAKQIALVNDLIAFISADALKKHLRKKWGFTPEIAEQLAELPLESGYHSLSRRAIRRLLPLLERGERLPSAIHQIYGRNREKVGKYEKLPPVVKVFPTLRNPQVIRALTELRKVVNAVISKCGKPTCIRIELARELKLSEKERSEYTKRMRENEAQRKAAAEAVEQKLGRPAQPWEIEKYLLAEECNWLCPYTGKQITFEKLLGENPEFDVEHIWPLRRSLDDSFANKTLCYHEENRSVKAGLIPYEAYSADPVRWNQIIERVKKFKGPLAKKKLQRFLAKEIPDGFVNQQLSDTRWICKAATEYLECLYGGKADENGKQRIFTTTGGMTALLRKAWNLNSILGGAVEKNRADYRQHAIDAIVIALTEPSIIQKFSNQVAKLLRSNDARAKRGYGLLADMLDDEFREEIKQHIEKLIVQFRIKTGLSGQLHDETFYKFVAPKKAIVRKALSAMSQNDVENIVNAKVKKLVKEKLEALDIDDPKKAFALPQNLPYIRGKNNSVFPIKSALVFVNYHVVPIGREPHRRRYVRPNNNHHVEIFAAYDENGKVKGLGRVVTVLEACERRCRGEPVISKDFTCEEQQKGKFSSIEFKFALFKNSLLKCRINGEEKTVRIIAISDNLIDAKEHYDARSTKEVREQGERIRLRYAVVCGVPGNNG

SEQ ID NO: 1420 - protein, 1512 aa, unidentified
  REGION 1..1512: note = Description of Unknown: Cas Enzyme sequence
MKKILGLDIGTNSIGWAFIESNAYENPEALDGKIIQLGSRIIPMDADSLNKFEAGNPVSKAAGRRQARGARRLNQRYKLRRTRLIEAFKILGWVPKEFPVNFKKLNKHNINKYLPYSNSLKNEVAEFFGTAGKRTIKGEECEISEDWIIYFLKAKALNTQVSLPELARILYHYNQRRGFKSSRKDNKFEDDATEVKYPLYEKWVEIVTVTSITEKNKGEGKDSDYIFYEFTCKTTDLEFTAIKKRKNPLDWLNKNIEVEITKKTTKDQKITYTITEVDQNAWESRKKAWEKFLIAEGKHISETYLNELRKDRNFKIKQRIFDRKFYQDELKAIWKKQSKFYQNEFEDKNNISEIADSFYTHNTEKNKEIKGKDLFHIFFNDIIYYQRGLKSQKGLLASCQYETKAYKTKSGEIKIVGIQVTSKSSPTFQEFRIWQTIHNLKIIKKEEIENNKLKINIDVSVKYLTTENKERLFELFDSSIEVTHDSILRLFGFKKDIIENGEKTFEYKLNYPEDNFTGNETKGLFRKIFKKNGFVEEGEKYLNNKELFNHLWHIVYSLPEEKEIANALRNPKYFDLPEPLIKSISKMPEFKRQYSSLSTKAINKLLPLMRIGKYWNEFDINILFEKSEKYKDFDKAISDKNIPEILRHEIVKRDLKDIYDFAGLPTFLAAYIIYGRHSESANDTKYEKIDDFKINEIIPHNSLRNPIVEKVIRETLNLVKEIWKDENLGRPDYIHVELGREMKNSNKEREAIYKVNQKNRIERERITALLKELKYPNFNPDSPFDIEKFRLWKETGGNKGEDEFDLLFKNNNSEFIKDADIEKYRHWAEQNYRSPYTGRIIKLSELFSERYQIDHIIPRAKFYDNSFANKVVVEAEVNALKDNRLAIQFIEDSQGREIKLNSGEVTKVLTLEEYKDFADNVFTNKKKKRHLKLYEVPDDFVERQMNDTKYISKTVAQFLLPVANGSDTDAGLVYSSGNITSNLKNKWGLNKLWKEILLPRFVRLESILEEKLVILSESKKADFHFAKDYKRIDHRHHALDALVVACTSRSHIKYLNSLNSLSNNKKDIANYNEWAKWKYLLNKKKQLENLENGMTEFASPWERFYLDAKDAIESVIVSYKPTTKLISKAINKYYKWVEVEKVDGEKIWEKKIHYQVAPKDDEKYWVAVRQSLFGQPFGKIHIAEYRNNVDFKKALQVQIAFNKREKFEWNSEDWRIAKKDIRKKINNVLFKYDNNEQESIKYFAANPLFDDYGNKIDQLDLLHFKKYASKRVNIDETFTPDKIEKMPYSNLKNNWLTTLLREHLKEYNDNPKLAFKGEALEMLHKKSPYPINKVTRKESGTKIEKDNKLLEGDAGVNQYFIIEINKQINKKTGEEKVVRNYYTPNFLDTIERLAKGLPIHDVKPDSQYIILSPGDLVYVPTEEEKNNKIDWNNKKALAERIYVMKSTQTSAAYFLPASVSLLIQPYDPKLKKGEFESMNKSEKTIDRLQVIKENFIKLKVDRLGNISPHILM

SEQ ID NO: 1421 - protein, 1448 aa, unidentified
  REGION 1..1448: note = Description of Unknown: Cas Enzyme sequence
MKRVLGLDLGTNSIGWALIEQDCDAKQSNILGMGSRIIPMSQDILGEFGKGNSVSQTSERTAYRSTRRLRERFLLRRERLHRVLNILDFLPTHYASQIDFKKRLGKFKENKEPKIAYDNKSFLFLDSFNEMLKDFEQEQPNMLINEKGEKKLIPYDWTLYYLRKKALREKISKEELSWIILNFNQKRGYYQLRGEDEEENPSKLVEFHSLTVVDVVPDEPIKGKLETWYSIILDNGWVYRRSSKTELYDWKDKIKEFIVTTDLNYDGTVKTDKEGNVKRSFRAPSETDWTLIKKKTEYEIEQSSKTIGEYIYNTLLKYPEQKIRGKLIRTIERKYYKEELKQILLKQTEFHNELKDDSLYYDCLRELYRNNESHQLFLEKKNFAQLFIEDIIFYQRPLRSQKSLISNCPLEFYKFKDSVGNEKVQHLKAIPKSNPFYQEFRIWQWISNLSIYSKLDDSNFTSHFFDSTDDWESLFEMLNGRKEIEQKQLLKFLLEKKGFKGKSLSSEIEKYRWNYVEDKKYPCNETRSLIQSRLDKVANLPESFLTRHVEQELWHLIYSVTDKIEFEKALDTFSKKYKIDTPTFVDAFKKCPPFKSEYGSFSEKAIKKLLPLMRTGKYWDLDNIDKATKQRIEKIISGEYDKDIRDRVREKAINLLSETDFNRLQLWLAQYIVYDRHSEATSLDKWETIDDIVTYLHSFKQHSLRNPIVEQVITETIRVVKDIWSNYGNGSKDYFNEIHVELGREMKLPAEERKRIQEKNSQNEDTNLRIKALLSEMQNDPNVENVRPYSPVQQEILKIYEEGVLNSNIEIADDILKISKTAQPSSSDLKRYKLWLEQKYQSPYTGEIIPLNKLFTPEYEIEHIIPQSRYFDDSYNNKVICESAVNKLKDNSLGYEFIKGYNGQIVECGFGKKVKIFSIDEYEDFVQKNYANNRSKASRLMMADIPEKMIERQLNDTRYISKYISNILSNIVRSESNDDGVNSKNLISVNGKITTVLKKDWGMNDIWNDLILPRFIRMNQITDSDSFTTWNERFQKFIPTVPIELSKNFSAKRIDHRHHAMDALVIACATRDHVNLLNNLYAKSSARYDLNRKLRIFEKTTYKDIKTGQIIEREIPKAFLKPWQNFTTDAKDAIESIIVSYKQSLRVINKSTNYYQKWVEKDGIVKKEKIKQEGKNWAIRKPLHKDTVSGLVQLSWVKVPKGKVMTATRKSLDSSFDLKTIATITDTGIQKILIKYLESKGNNPESAFSPEGIEDFNNNIHLYNDGKKHRPITKVRLYEIGSKFPLGEKGNKNAKYVEAAKGTNLFFAVYANNKGERSFETIPLNLVIDRLKLGLSAVPETNEKGDNLLFHLSPNDLVYVPSEDEMENLKLINLEHISKDQLNRIYKMVSSTSNRCFFIKSEIALSIVNKIEYSPLNKMEKSIEGIMIKDVCLKLQVNRIGNLERYFS

SEQ ID NO: 1422 - protein, 1346 aa, unidentified
  REGION 1..1346: note = Description of Unknown: Cas Enzyme sequence
  MOD_RES 575..588: note = Any amino acid
MGQEYYLGLDLGTASTGWAITDPEYHVLRKHGKALWGVRLFESASTAEERRMFRTGRRRLDRRNWRIQILQEIFAEEICKIDPGFFLRMKESKYYPEDKRDINGNCPELPYALFVDNDFTDKDYHKKFPTIYHLRKMLMNTEDTPDIRLVYLAIHHMLKHRGHFLLSGDISEIKEFGTTFSKLLENIKNEELNWNLELRAEEYAIVESILKDNMLNRSTKKTRLIKALKAKSTCEKAVLNLLAGGTVKLSDIFGLEELNETERPKISFADNGYDDYIGEVENELGEQFYIIETAKAVYDWAVLVEILGEHTSISEAKVATYEKHKSDLRFLKKIVRKYLTKEEYKDIFVSTSDKLKNYSAYIGMTKINGKKVDLQSKRCNKEEFYDFIKKGVLKKIEGQPEYEYLKEEIERETFLPKQVNKDNGVIPYQIHLYELKKILGNLRDKIDFIKENEDKLVQLFEFRIPYYVGPLNKIDAGKEEKFTWAVRKCNEKIYPWNFDDVIDIEASAEKFIRRMTNKCTYLIGEDVLPKDSLLYSKYMVLNELNNLKLDGEKLSVELKQQLYTDVFCKYRKVTXXXXXXXXXXXXXXGIISGNVEITGIDGDFKASLTAYHDFKEILTGTELAKKDKENIIMNIVLFGDDKKLLKKRMNRLYPQITPNQLKKICALSYKGWGRFSKKFLEEIVVPAPETGEAWNIITALWESKNNLMQLLSNEFQFMEEVETYNMGKQAKTLSYETVENMYVSPSVKRQIWQTLKIVKELEKVMKESPKRIFIEMAREKQESKRAESRKKQLMDLYKACKNEEKDWVKELGEQEEQKLRSDKLYLYYTQKGRCMYSGEVIELEDLWDNTKYDIDHIYPQSKTMDDSLKNRVLVKKEYNAAKLDIYPLSKMNENIQPKMHGFWKSLLDGGFISKEKYERLVRNTELSPEELAGFIERQIVETRQSTKAVAEILKQVFPESEIVYVKAGTVSRFRKDFELLKVREVNDLHHAKDAYLNIVVGNSYYVKFTKNATLYVKENPGRTFNLKKMFISKWDIERNGEVAWKAGGKGTIVTVKQTMNKNNILVTRQVHEAKGGLFDQQIMKKGKGQIAIKESDERLASIEKYGGYNKAAGAYFMLVESKDKKDKTIRTMEFIPLYLKNKIESEESIALNYLEKDRGLKEPKILVKKIKIDTLFDVDGFKMWLSGRTGDQLLFKGANQLLLSNEHAAIMKKILKFVNRQKENKNLLLVDNDEITEEMLIQIYDMFYEKIKNTVYNVRLSAQEKTLSDKKKNFLNLKKEEKCVVLSEILHLFQCQSTSANLKMIGGPGKAGILVMNNNISKCNKISIINQSPTGVFENEIDLLKI

SEQ ID NO: 1423 - protein, 373 aa, unidentified
  REGION 1..373: note = Description of Unknown: Cas Enzyme sequence
MDLTRAYVFRLYPDTKRQKEIDERLLLAQRLYNAILEKVKSEYKKNKISNISESTLNKYMKEAVNENKDFLKLYSQTRQDVFIRLLKAFRNFFCKCEEKKSGKKIKAGFPRFKSIDRYRSITYPQNNGSFSIDKERKVYMLRVSGIGRMRIELHRPIEGEIKTLTIKKKAGEYFAIFTTVKKVQVPKVADTNPVGIDMGLHSFVALSDGTKIEKPNFAKRSAKRIAKWQKIVARRNKGSKNREKAKQKLQRKWEHVVNQSNDFAQKLSSKLVNSGYTSFALEELNIGSMVKNHNLAQAIYAASWRKFMQMLSYKAESAGLRVFVVDAEDTTQECSRCGHVKTGDERLGLSERIYHCNVCGLTIDRDINSALVI

SEQ ID NO: 1424 - protein, 966 aa, unidentified
  REGION 1..966: note = Description of Unknown: Cas Enzyme sequence
MADQINNPKYGPKLAERIKEFNSAFKLGIDLGTKEGGIALVKDNQVLVARTFLDFHKENLKDRRAHRRNRRSRLAKKRRVAILRSWLLRQKVNGKQLPDPYKIKDISLFKRANAKNWIDAVISGQDTSPEAFVRALTMVFKKRGQSYEEMAKQIEDMTYRELKDYINSLGSITEEEYNALSEEIKYRNESSENPSEKNRYASLLESLKTKLSNKENIKNRGEREKELEQIVTTFCKANNVYESGKWISQLKSLLNKPIRKARFMNRIVIRCNVCDRPTPKKSRPDIRELLYTDAIRNFLRAGRIDPNEEVINYYKTLYEKAAEIRKSIIKKAPLTEEQKKLKKELSKQLRKYINKDYRASAQKKMLEQIKVLMFEKLSGRSRYCIEHLKARANGEDVEAGYHGRVQKRHDMNIAQKNHDKRVINLIEYMLFRRDESLAKELKDKGIMYITIEAPEPDTKKAKKGETTERDERNIKEKLLDEQFDVDEQRFICIYTGQELAKARLNEYEKDHIFPESRDGPSIRDNLVITTKEINKEKGDRTPWEWLHEDPVKWQEFENRVMRLYRSGKITERKKELLLNESSEFPIDNPTELARAGARVNNFIADLNELLKKHGLPEAQTLFENGKPIVQVVRGSETQRLRRQWNTIDPSFIPLKDRAVSFNHAEDAAIAASMPPTFWRSQIYRYTWHFTPNKERPDFALPDIAPHWEDFIAKRNSPIIAVLGKTKYSWKNSIFDDTLYKSYNDRAFFKEIYKQPPPKENGDEKSNQPTKPIPINEHKMDPNYKYYHVKVDNKRFLIKSQKGGSLITIKPKHTLWPRQIQVNPTYGSVVLTKGDKGEIALHYTPISPIVSMYKQGIIMDMDETLKHALSDKIRYEDNKRELHVHDIIYLPATKRHREGYFLVTKLGKSGVKVVPEDKLKIRDAKQNSKDLDSESEKNKSKNENVEIGLNKEDLSYLYNNLDSMHIK

SEQ ID NO: 1425 - protein, 1306 aa, unidentified
  REGION 1..1306: note = Description of Unknown: Cas Enzyme sequence
MKSRQYLLKLQGETNQEKLLASWQQHPFYRSALVMGIDIGLEGIGVYLRHGEQELFARTLDLSGVLPEKSDALANRRQMKHARRCRHNRRIRMRRLDELLEKHGLPLQWQDAPEAFRRTDPYKVRHRAIRADGTGLESKFALANAIRHCVQHRGYDYGRFREEGNFPWGDTSKLSKAITWLKTASLDERTAGDLREMALNRELEVKEALADQSWDEFTTLINERVAFAREHDIERVLQEHAKGDKHDNLRKRARGVAFPRGQVWAHLEFIVRRHAHLIEDADGFLAALGCNPDDRDEYPDLAASAAARERAIFWYNRKTRHEMERHWAKKSKDCPYAERLGLGDDKKTSARGELSLRLWSMLEFGITRRVEITFLNAERIQAMKERGEKVPSKKPAKELIHRLSTEAVSTLIGMIKVQHGSDGKLLPLSNERRTEIKKEARVIIEQDIIKNSGVAAALGPKPASLKEGKEEKWNASFFDQLNDLVAPAPSTLKGTGSLYHETAQRLYTVASANEQDFSKEGFNQRLVELGFYDWRRESVLDWGVFPQVEFLLGRRLKHGKRRGEVSESCQGFLRKLMRDLVKEGKLAEGTLAPEFCVVEVIGNAPRTQEKKAEILKEQKANRSVRDEQFIKAGRDDSGVASRRRRISLHAQQKGRSPYTGRALPDDPLSSELEIEHLFPAALGGLSVDDNLVLTYKKENSDKGDRTPLQWLGAEKLEQMIAVNKDMKWGGLKREVFAWGTRREDDPSGKWPSHYDEAGKLLIPDFGNTTRVAQLARQLRAAVAHWLGIEKDAEAMALRIGTPSGWLASQALRSWLPDYRKNRDDITHHLIDAAVLANIPPREGMNSIHCGGIFYSDRVWLPDEKKPGEQTSRLITRALPELSPAARLAKWLPDERKEYTECPVLKHRPSKNKQAIGDATFWRQAESAKPELAQRPQKPFNAEDYKGDADKLLVELRLMKINERKHRQWCARNKRKGLPEPAFRDVLPTYKDVESYLERATAALQSERGREVEPLRLRDSKDGTKGTPITKVWKWSKKRNLDSPLGLSGRQRTEDGEVVFEALRFLKESNDRMELWLGYDWELAIKARKAKAQDWEAKGWRYYRRLVPHAMALRHLKQLGFTFDRDKRAKAPAYMQTKPEAPETHVSLRELLLGDELPPFARKVGEFRKGDVLLLGLNQEGGIAGPEEGIVWSAHFAVSALSADFTLEMQPLLFKDKSATPLKDIERKHLTQKAKSAVVHAGLLNLPSPAQLAAELMLKNSKMRIPPEPKEKEITKSNDPPSDTPRRRGRRAVPAGQADLLWQEDRA

SEQ ID NO: 1426 - protein, 1174 aa, unidentified
  REGION 1..1174: note = Description of Unknown: Cas Enzyme sequence
MKYKFAFDLGSTSCGWSVVRIDDENNVIGFEDIGVRIFPDGRDAKSKEPLQVSRRNARGARVRNDRILQRRHKIIDLLKQNGMIYNNTDERKNPYELRAKAVDEKVSLPELGRIMYNLSLRRGFKSNRKELQKEGGCKTKQAMEKLKQELNGQTLGQYLWDKMQQLQGKEKIRFSNLFDGNKIKDGSVYPSREMYEDEFDRIWQKQAEFYDILKNEDLKNSFHNAIFYQRPLKPQQRGFCEFEDGELRIYKAHPLFQRFRALQTINQIEVDDMPLTTEQKHILKQVLLEKFKYNPDDGRNALFNNSSTKEISVNKDGTLSFSKIKTIFGFPKSAKINIESEKRKDIYADKTSYLLSRPQCFGEKWFEIPFDEQCSIVEILIGNTEDEAVKQFLQEHYNLDDEHCENIINANLESSTGSLSKKAIKKILPYLEEGLLYNDACKMAGYHHSYFDGDIKMLQELPYYGDVLKKSCVQDKNGQYRITNISVHVALNQLRLVVNELIKKYGNPDSVAVEIARDLKMGTKELSKVNKQQEKNKKENDRIVAEIQKRVGIKNPSREDIQKYKMWEMLATDETKRCCVYSGKPISIHNLFSPQVQIEHILPYSRTFDDSIFNKTLSYREANAYKGNRTPYEAFGESKDDYNWNEIMERVKNLPKATQWRFNKNAMSKIEEYLEKFGLNDMIARQLNDTRYMSRLAVKYLKNICKNVNNCYGLPGSQTALFREQWGLNDWKDKENDEKYRASHIHHGIDAFVVACMTRSQLQTIASNADKIERSGDYENQKAERKALFKNCNTPFEGFDREKFNELCDKMPISFKPKLKNPKQENSTVGALHNETAYSLLEFEKGLNGVFVKREELSQFDEKKKKQKENNEDEVVEDNEQKNEGEKKKDNKKKKIDFIKSVIDTQAEQLIKEYGETEEAFNKFKEYCNKNGIKKIRCNSFADVSTYIPVFKTKEERDEYHKAYEDWFVFEGRSPENETKEQKEERLKKEQELLKIVQQKALKAYKWFVGGNNFRADVYQINSKDKLYTKERGKWQVEVLSNYMATLNKGQALWRKKHPTARLVMRLKIDDMVMGEFEKDDEKLPKGIKDLVLHRCEKHKTDKVEILFRVKKIGSNGTIYIRPDFITKEEGDQKSIALTATSAKKYKIRKVFVSPAGKLVDNGFSDKWNDTKCD

SEQ ID NO: 1427 - protein, 1459 aa, unidentified
  REGION 1..1459: note = Description of Unknown: Cas Enzyme sequence
MKHILGLDLGSNSIGWAFVQQDFENKQGKIMATGSRIIPMDQKMLTNFEEGTTVSQTAERTTYRSTRRLRERHLLRRERLHRVLHILGFLPPHYDAQIDFTKRYGKFIDNAEPKIAYNNGNFIFTNSFNEMIEDFKKHQPQLFYKKSNGEESKIPYDWTIYYLRKKALSQKITQQELAWLILHFNQKRGYYQLRGEEETEGNDMEIISSKVLSVIKKDKDKKYDKYWYDIILENGLVYKAAFYNDLVYSWIGQEREFVVKRTLLKNGDEKIELSYLPTFDEIAKMDKKQQDKFYQKIKVKTESSIGNKTVGAYIYDHLLQNPNQKIKGKLVRTIERKYYKNELKAILTKQIALQPELFTENLLADCIRELYRKNETQQQNLLSKDFLHLFVEDIIFYQRPLRSKKSTIANCTLEKRSYIDKETNERKDAPIKVCAKSNPYYQEFRVLQWLQNLRIYEIETDREVTTEFIETPQDYEALFNFLMSQKEIDNESLLKYFLFAKNPQIKDKAAKSELKKWLTTYRWNYVYDVADNSSKKYPMNETGYDLQRYLQKVEGLPANFLTFDTTYKLWHLLYSVKDKVEFEKALKRFAKKKQLDETSFVESFKNFKPYPNEYGSFSEKAIKKLLPLMRFGNHWDFNRIDVSTQKRIDDLINGVTNEEIRTIIREKAEKYQLNSETCFQGLPLWLAQYVVYNRHAEATDIEKWTSVSDLEAYLEDFKQHSLRNPIVEQVVTETLRVVRDIWQQYGGGQANFFDEIHIELGRELKKTAEERKQLSNRNQENENTNLRIKKLLAELKEDASIQNVRPYSPVQQELLKIYEEGVFSSTDEIDEDIQKIRKKADPTTPEIQRYKLWLEQKYKSPYTGEVISLTKLFTEEYEIEHIIPQSRYYDDSLSNKVICESAVNKLKTNLLGLEFIQKHHGEKVRVAGNKEVTIFTEEQYKDFVKKHYANNLAKQQKLLLDEIPEKMVARQLNDTRYISKYISEILSKIVRSDEKDEGVNSKNVIPCTGKITTALKQDWGLNDVWNELILPRFERMNQLTQTQLFTSYNDRYQKNLPTVPIQYSQGFQKKRIDHRHHAMDALVIACATREHINYMNNQYALDKSKDKKEKQQSRIDLRTILCEKKNNNWQFKKPWGTFTQEAKEALEHIVVSFKQNLRVINKATNYYEKWEEKNGVLVKKKVKQEGTNWAIRKPLHKETVSGKIVLDRKIGKDKILTATRKAVDITFTEKVISSITDTGIQKILLNYLKYKGSPEVAFSAEGLEELNKNIAQYNDGKKHQPIYKVRIFEEGSKFPLGETGAKATKFVEAAKGTNLFFGVYQGKEKRSYATIPFNKVIERQKQGLPSVPERNEKGEPLLFSLSPNDLVYVPMEGEIAETIDFNNLSKEQKERIYNVNDFSSTTCYFTPNRVAKAICPKEIDKKGKDSGSFDTKTASIEGVQIKEVCIKLKVDRLGNITKA

SEQ ID NO: 1428 - protein, 1450 aa, unidentified
  REGION 1..1450: note = Description of Unknown: Cas Enzyme sequence
MKNILGLDLGSNSIGWALVQQDFENKQGKIMATGSRIIPMDQGILGDFEKGNTVSQTAERTTYRSMRRLRERHLLRRERLHRVLHILGFLPPHYDAQIDFTKRYGKFIDNAEPKIAYNNGNFIFTNSFNEMIKDFKKYQPQLFYKKSNGEESKIPYDWTIYYLRKKALSQKITQQELAWLILHFNQKRGYYQLRGEEETESPNKEVAFHSLKVVEVEAEAPNKKGEIWYTIRLENGWIYRRTSKIPLDDWKGKTRDFIVTTDLNDDGTIKVDKEGKEKRSFRAPEENDWNLLKKKTEHDIDFSGKTVGAYIYDHLLQDPNQKIKGKLVRTIERKYYKNELKAILTKQIALQPELFTKNLLADCIRELYRKNETQQQNLLSKDFLHLFVEDIIFYQRPLRSKKSTIANCTLEKRSYIDKETNERKDTPIKVCAKSNPYYQEFRVLQWLQNLRIYEIETDREVTTEFIETAEDYEALLNFLMSQKEIDNESLLKYFLLAKNPQIKDKAAKSELKKWLTTYRWNYVYDVADNSSKKYPMNETGYDLQRYLQKVEGLPANFLTFDTTYRLWHLLYSVKDKVEFEKALKRFAKKKQLNETSFVESFKNFKPYPNEYGSFSEKAIKKLLPLMRFGNHWDFNRIDVSTQKRIDDLINGVANEDIRTIIREKAEKYQLNSESCFQGLPLWLAQYVVYNRHAEATDVEKWTSVNDLEAYLEDFKQHSLRNPIVEQVVTETLRVVRDIWQQYGRGQANFFDEIHIELGRELKKTAEERKQLSNRNQENENTNLRIKKLLAELKEDASIQNVRPYSLVQQELLKIYEEGAFTSTDEIDEEIQKIRKKAEPSTPEIQRYKLWLEQKYKSPYTGEVISLTKLFTEEYEIEHIIPQSRYYDDSFSNKVICESAVNKLKTNLLGLEFIQKHHGEKVRVAGNKEVTIFTEEQYKDFVKKHYANNLAKQQKLLLNEIPEKMVARQLNDTRYISKYISEILSKIVRSDQKDEGVNSKNVIPCTGKITTALKQDWGLNDVWNELILPRFERMNQLTQTQLFTSYNDRLQKNLPTVPIEYSQGFQKKRIDHRHHAMDALVIACATREHINYMNNQHALDKSKDKKEKQQSRIDLRTILCEKKNNNWQFKKPWGTFTQEAKEALEHIVVSFKQNLRVINKATNYYEKWEEKNGVLVKKKVKQEGTNWAIRKPLHEETFSGKISLKREKVGKGNILTATKKPVDSSFDVKKISKITDTGIQKILLNYLKYKGSPEVAFSAEGLEELNKNIAQYNDGKKHQPIYKVRIYEKGSGRFVLGEKGTKSKKYVQGAPNLYFGVYQGKGKRSYATIPLNKVIERQKQGLPSVPERNEKGEPLLFILSPNDLVYVPMEGEIAETIDFNNLSKEQKERIYKTVSFTGNQCFFVQEAVASPIVNKMEYSPLNKMERSIVGIMIKEVCIKLKVDRLGNITKA

SEQ ID NO: 1429 - protein, 1113 aa, unidentified
  REGION 1..1113: note = Description of Unknown: Cas Enzyme sequence
MGRLVLGLDIGITSVGYGVIDIDKYKFVDYGVRRFKEGTAAENETRRNTRGHRRLISRKATRINDMKHLLKSLGIINDDFHSLGNVYEIRVKGLKEKLSNDELATAILHITKRRGSTIETADDTEEADKETGELKEILQANSKKLADGKFICEVQLELLNNGESIRGHHNNFKTKDYIKELKEILSHQELPEEACEEIVQIVSRKRAYYEGPGGQKSPTPYGRYIEANQKEPIDLIEKMRGKCSVYPDEPRAPKLAVTSDIFNLLNDLNNLTYDGNRKITMDQKDEVFKIVDKKAKVEPKDIAKILGTDLSNISGFRIDKKKNPLKSEFKGYAKLKKCFKECGETISLKDYEALDQIIEILTNRKGIEERKQLLNLVNSSLITDETVNKLANLDGIANYHSLSLKTMKELNEEMYVSNYNQMQLIQQIHKGKDVSALKGKKSIEADDTAILSPVTKRAQRETFKVINALRREYGEFDTIVVEMTREKNSADQKKSINNRQKFYEEKNKEVDTLLKENGYDPDKINGKTKMKVRLYLEQDGKSAYTLEPLILGEVITNPRYTEIDHIIPISISLDDSYNNKILATANENKAKDNRTPIDAYNKHLFDNPALELSGDLQTYISAVQSSKRFSRRKKNYLLYKDDITKMDVVQKFIARNLIDTSYANRVVLNTLTDYFKANEIPTKVFTLNGNITHKFRTQINLPKDREEDYLHHAVDGLIIASVKTMGLLNGCLAKYELKDLYDKDTGEVKKVPGKEEFFDPKYIEFISTLKNIYDESNKYYRGIMTRDQLAYAPIKISHKVDTKPNRQVADETIYSTRIVDGQEKRVMKFKDIYEPKFKNLAEDIVNGKAEDKYIMAKKDPATFEEIVRIVLNHYETFKDDPKQYVKDKKGVKLKGENPLTAYKEEFGKIRKFSKKGNGPEVTSIKCYYKTLGNYIDISKNYKLKQGKRVVLIQISPYRTDFYRDADGKVKMVTIRYKDVYFKESLRLYCIDRDWYQSEKTKKKISDEAVFLCSLHHDELIGIMRKEGQKYIYDDSTESDGNTKLHDGITPEILKFTATNSDAANKIEVKPVYTEPKKQLTAAIGTFVDVRKYATDVLGNLYEVKDNNLKLEFK

SEQ ID NO: 1430 - protein, 1249 aa, unidentified
  REGION 1..1249: note = Description of Unknown: Cas Enzyme sequence
MKRVLGLDLGTNSIGWSLVELDYKNKKNNHLGRGGILGLGSRIIPMNEAQLSEFGKGNTVSQTAERTAKRGARRLRQRHLLRRERLHRVLNILGLLPDHYALDIDFENRIGQFFEDKEPKIAYCKNESGRFDFLFKESFYEMVEDFKNTQPSLFYKKSNGEETKIPYDWTVYYLRKKALSQKISKEELAWLILHFNQKRGYYQLRGDELDKAKDESKRVEFIQVQVTDIIDTGEVQGKDQKRYKVLLENGLWFIKPSKKEIEWKGKVREFILTTELNADGTEKLTKYGDVKRTFKSVNSEEDWIAIKAKSEKVISDSGKTVGCYIYDTLLQKPSQKIRGKLVRTIERYYYEEEFEAILTNQIKLQPEIFTDELFKECVKHLYPKNITHQLGLLNKDFVHLFSKDILYYQRPLKSKKSLISDCKYEFREYVNKKSGETERQWLKCSAKSHPLFQEFRLWEFIQNLKIYEREKRLEGRLHLDVNVTDELIGTVKDKERLFEQLNDRKAIKQNTFLGLFKKDGKKLNDKTYRWNYVEDKEYPCNETRAGFISILKKNKDFDWNEFLTQATEIELWHTLYSISEKRELESALKKLAVRLNVNLTILERFIDFPPFKKDYGAFSFKALTKILPLLRLGRYWDERNFSNKSKTRIERIIDAEADDSIQLLAREKAFDKKLDSINKFQGLPLWLASYLVYGRHSEIGEKVFWKSPMDIERLKQHSLRNPIVEQVINETLQVVKDIWTNFGKGEERFFDEIHVELGRDMKNPADKRKRLTNQITENQNTNLRIRAILNEMMNDPSIEGDVKDYSPSQQDILKIYEEGVLTALEKLPDEIEKISRKSEPTQKEINKYRLWLEQKYISPYTGEAISLSKLFTSAFEIEHILPQSRFFDDSMSNKVICEAEVNSLKDNQTGYEFIEKHGGEIVTCSNGKRVKILFKEGYENHVQRSFKGRKKDILLMPDIPESFTNRQMNDSRYISKVVLKLMSNLVREEHEEEATSKHVIPITGKVTTRLKRDWGLNDVWNDLIAPRFQRMNELTGTNDFGYWDEKGGNKFFRNEVPHDLKKDFDPKRIDHRHHALDALIIALADRRHVNYLNNQSAAASKKEERFDLRKKLRLIEDKQIKDKRTGEYKTIQVAREFLKPWENLTKQAKDKLATTVISVKQNKRVINKNINRFEKWEVENCELKKTFGKQDKHSEWWSIRRPLHQDTVHGQIMLRKKKEVSFGAAIKDWGNIADRHLRKVIKKIAYKMD

SEQ ID NO: 1431 - protein, 1240 aa, unidentified
  REGION 1..1240: note = Description of Unknown: Cas Enzyme sequence
MKKVLGLDLGVSSIGWALIDEDDRKIMGMGSRIIPLTTDDKDEFTKGNTISKNQQRTIKRTQRKGYDRYQLRRQNLVFVLKQNNMMPDIELVNLPKLELWKLRSDAVNKKISLKELGRILLHLNQKRGYKSSRSESNLDKKDTEYVATVKNRYESLKEIGLTIGQKFFEELSKNNFYRIKEQVYPREAYVEEYNKIMKHQQKHYPENISEELINKIRDEIIYYQRKLKSQKGLVSVCEFEGFWIKLNSNGKEKDLFVGPKVTPKSSPLFQVSRIWETINNISIKRKTGESIEITLDKKKEIFAYMDKNEKLSYPELLKILGLKKDDVYGNKNLTNGLLGNKIKTEMMKCISDIDKYSDLFRLELEIKEFDEEVYLYDRTTGEIINSKKKKNIIAAIEDQPFYKLWHVVYSIPDKETCQKILMSKFGIQEEDAAKLATLDFTKLGFSNKSHRAIRKMLPYLMEGDNDYMARCYAGYHHTTTITKQENFQRKLLDKLKNLEKNSLRQPIVEKILNQMINVVNAIIDKYGKPDEIRIELARELKQSREERNEAYRNMNERERENKIIEKELSEFGLRATRNNIIKWRLYHEISNEEKKQNAICIYCGKPISFTAAILGEEVEVEHIIPRSRLFDDSQSNKTLAHRKCNADKKDQTAYDFMRSKSDTEFNDYVERINTLYKNHVIGKTKRDKLLMSEEKIPMDFIDRQLRQTQYISKKALELLQNICYNVWATSGNVTAELRHIWGWDEVLENLQLPKYRESGLIEIIEVGDKDNKQKKEKIIGWTKRDDHRHHAIDALTIACTKQGFIQRFNRLNSGKVRNDMLQEIENAKQNYDKRKNLLENYILSYRPFTTKEVEREAEKILVSFKAGKKVASTGKRKIKKDGKKIIAQTGIIIPRGPLSEESVYGKIKVIEKEKPLKYLFENPHLIFKPNIKALVEERLYKNNNDPKSAIASLKKEPIYLDKEKTIKLEYGTCYKEEVVIKKPLQALNEKQVEDIVDPIIKQKIKDRLVKFGGKAKEAFKDLENEPIWYDEEKRIPIKNVRWFTGLSAIEPISKDETGKEIGFVKPGNNHHLAIYIDEEGKKQLSICSFWHAVERKKYGLPVIIKNPSEVVDFILAEENEDKYPESFLEKLPAGKWTFKESFQQNEMFVLGISKEAFEEAISRNDYSFLSNYLYRVQKIAMIGKQPNIVFRHHLETQLKDDAYAKKSNRFYLIQSIGALESLYPIKILINCLGEIITNNK

SEQ ID NO: 1432 - protein, 1722 aa, unidentified
  REGION 1..1722: note = Description of Unknown: Cas Enzyme sequence
LLRIKYQEIFLKKQIEGKMKKILGLDLGTNSIGAAILSFPEKFEDYGKEGKIEWLTSRIVPFDEDYSKAFLEGKNGSPKVKTPAANRRQLRGSRRLKYRYKLRRTKLIKLFKLLGWLPEDFPLDNPKRIKDIIAEYGKFNFRISDYVPVSDESYREFYKYFGYSEEQLNEIIEEIKFRRIHNGNKRNEEIKLLPEDWIVYYLRKKGLTQKLTTEELIRILYLFNQRRGFQSNRLDLKENETTIVNYEEFKEKFKELRRNENGKMIAKVKEKYKNQNFETKFVSITRVINIEELTEEGEKAEKKFRIYLEDNRIEAYEIERKEKPDWLNKEYTFVVTQKIEKNKFKQNIPKTPEENEWIYCTTALDEKMGNKYPGEYFFDELVNAHIEKREYKIRQYPVYRHRYQKELETIWKKQCELNPELAQLNINQDILKKLAEVFYPSQSKFNGPKIKEFLNNDLLHVISNDIIYYQRDLKSQKNSIGECRYEKRKGIDGETYGLKCIPKSSPLFQEFRIWQDIHNIRLIRKEHINPDGKKILDIEETSLYINDELKEKLFDLFNSKEEIKEKDILLVINQYHKDIKPIQIGKKDEEHSHYINLFRTRKTLKGNETKHRYRKIFKELDFNGDYILNNNDLLMKLWHADYSNSNTDEKKSFKGILSALGWKSENEKNKNWNVFQLSFEDAESIAELIVKLPAFKKEYGSYSALAIRKMLIFMRTGEYWKHPQDIINQIQNEIKNGTVNKDTKEKEKFLQSLENALDKADKTYERLKSINFDERKIQDVDDDEIPKQLLKSFIKKRSYEEFIKGLNTYQAGYLLYGKHSEQEIIQVNSPEEYSAYIQKTLKPGSLRNPIVELVVRETCALVKDVWKKFGQIDEIHIELARELKHNKEERARISEIQNENLEEKQRIKEILYELLNYESFEHYDENGSRIISGFTIKPNPENLEDIKRFRLWKEQASLSDKEWDKKIKEEKIPTQEQIKKYILWLGQNCRSPYTGKIIPISKLFDGNEYEVDHIIPRSKMKNDAMNNLVIVESRVNKAKGNELAANFIANRNGYCEYEGKKIDLLKYEDYKKLVDDIFRNNRAKRKNLLATEVPDDFIERQINDTRYISKKLGEVLRPVLKDPYAVIFTIGSITSELRNNWSLNEIWKDLLKPRFERLEKILDKQLIIKETNSNKFYFDLSFNEKLEKDGIKRLDHRHHALDAIVIAATTREHIRYLNTLNAADSDEEIKKYHLTLCKGKIRDFKLPWENFVKDVKDALQSCIISYKESKPIVTKPYNKYEKWVIENGKAIKKIFKQEIDGGGKWMAVRRSMFKQPLGIIWLKQIKAVEIKDALKIQAQWNEIKNDPQLKKNKPYVYDDYAQKYLDAVVEQLNLSPKNFTKKKNEIDKWIESISEKVNTGITDKNGKTKTKTLYNLDGKIYEKIEIAEFVQYKTKRMKISPENLKSYSIEKMIKNIPYFEFISEEQFNEFNEEQQEIIKNAGINIGNKKMSPINFVLLLHIVKYRNNPKEAFNNEGIENLNELAIQKIGKSIKCITRLDGEVNNQEIFRNAIYETDKGANIYFIMYENIKSKQREYLSPSPSISVLKAIEKKNKMKDIAPEKEGFKRIVLSPGDLVYVPTIDEIEEIKKNNTSIEDLLKNKAMKDINERIYQVRKFTGDACYFIKYNIAELILSYSEVDNKKIGELGSQNLSEYTMDDDEIPIKKHCIKIKINRLGEIQIIY

SEQ ID NO: 1433 - protein, 1492 aa, unidentified
  REGION 1..1492: note = Description of Unknown: Cas Enzyme sequence
MKKILGLDLGTNSIGWAMTTHDFELKKGEINGLGSRIIPMSQGILGKFDSGQSHSQTAERTRYRGVRRLIQRSLLRRERLHRVLNVLNFLPKHYANSIDFKKCFGQFTKGQEVKLNYKKTIEGKHEFLFMDSFQEMANEFKEHNQGTKIPLDWTLYYLRKKALTQQISKEELAWVLLNFNQKRGYYQLRGMEDTDSDKEKNKTFETLYVSEIKNSGDIIKKTGDVLYDVYFDNGWKYEKQITKPENWLHKTKEFIVTTSILKNGEIKRSFKIVDSEKDWIAIKKKTEQDIKESSKTVGEYIYETLLSKPKQKIRGKLVKTIERTFYKEELQKILKTQITFHPELEDRKLYQACVNELYPRNEAHQNNIKNKDFEYLFLDDIIFYQRPLKSKKSTIANCPYESRVFLKDGIKQNPQPLKCISKSHPLFQEFRLWQFLRNLKIYQKENNENGKLDVDVTAVFFKDETDWVNLFKFLNDKKDIEQKQLIEYLIGIDKIEKQNKTNYRWNYVEDKKYPANETRASFLSRLKKIENLQVDEFLSKAIEFSLWHIIYSVKDKQQYKTALKTFARKNNLDETTFIESFIKYPPFKNEYGAYSEKAVKKLLPLMRMGKFWNEDEIPELAKDRISNIQERLESIDYDKEVFEKDKNDRLKTIVDDEIPKQFVKSFLSFKNRNPLTGLNTYQACYAVYGRHSEVGIIKNWNSPTDITAYLDEFKQHSLRNPIVEQVVTETLRVVRDIWQHFGNGEKDFFNEIHVELGREMKNSNEKRKRMSDRNTENENTNARIKSLLEELKSESNNDIRPYSSSHQEILKIYEEGVYQNPEVSYQKLTEDDVIKIRKNTTPSKAEINRYKLWLEQGYISPYTKEIIPLSKLFSIDYQIEHIIPQSRYFDNSLSNKIICESEVNQLKDNRTAYEFLKDENGRIVALSNGNSVKLLNIEQYEDHCTQYFKKNRTKLKNLLSEDIPEGFINRQLNDSRYISKLIKSLLSNIVRDDGEKEATTKRLIPVTGAITSKLKHEWGLNDKWNEIVAPRFKRLNALTNTNDFGYWDDKINAFRSQVPDAISRGFNKKRIDHRHHALDALVIACCTQRHTNYLSALNAEKENFGLRDSLLIKNENGHYTKHFQIPWANFATEAKAQLEKTIISFKQNLRVINKTNNKTWQWKPQDNGAFKKELVKQTIGNNWAIRKPLHEDTFYGKILNGQNDGKLKIRTVLDTSFDKKKIEDKVVSGSIKKILLNHLSQEIFQNVKDDKGRVIKSCELAFSDEGIEGMNRTIVNLNDGKYHNPIKKITLLHERGKKFSVKTILKKETKFAKSATGTNMYFCIYKSDNEAQKYSTPSFEELIEIQKQEAILKKEDKVNVPPFLFDKKNNKYSLAFYLQPNDLVYLPTHIEIENPELVDFSKLDKSQVNRIYKFTDGSGTTANFIQNSIAKTIFNLNKKEQLKLNINYIIQNEFGLGSPQSKNQKSIDGIMIKENCWKLRVNRLGNIFKIVK

SEQ ID NO: 1434 - protein, 1379 aa, unidentified
  REGION 1..1379: note = Description of Unknown: Cas Enzyme sequence
MKKVLGLDLGTTSIGWAFVKEAENKSESSEILKLGVRIVSYDNFSIVDKSGTVSQSKDPAKDFSAGKGLSPNAKRTNQRGARRNLDRYQLRRDTLISVLIENKWITDNSSLYEESSAGLHESYELRARAVTQKITLAEFARVLLMINKKRGYKSARKAENEDDGGALLDEMDIAIHLQKENITPGKYALELLKNDKKQLPSFYKSDLENEFDKIWLLHKETYPDILTDEFYKQIKGKAKVITTKIFFAKYGIYTAKNSAKNKKIQSFEWRSEASISVQQKEVMAFALAEVNGNISNSSGYLGAISDRSKILITEKLTVGQFQYSQLKEDKHNSLKKQIFYRKDYEDEFETLWNNQSSYYEFSEDLKKKIKESIIFYQRPLKSQKGLISFCKFESKIVEVVIDGKVKKKTIGSRVAPRSSPLFQEFKIWQQLANIKFKSNDGEVFLLSNEDKSKIYDHLNTTESLTSKQIGEILFAEDTKDYTMNIATIDGNKTNSRLLDAFCKMIELDGYNKNIRKTKGKSKLDIIRSFFEENGIDQTILDFDHTLEGHLLVRQSAYKLWHLLYSYEGDNTRTGIEKLYKALKEQYGFERENATFLINVSFIQDYGSLSSKAIRKIFPYIMKEGYSDACDKAGYNHSNSLTAEENNLRKLADSLDILPKNSLRNPVVEKILNQMIHVVNAIIKSPEMGRPDEIRVELARDLKKSAKERAKTTADISKATKLHEEYRKIITVEHGIKNPTRNDIIRYKLYQELAHNGYCTFYTNTYVKPQELYSKNIDIEHIIPKALSFDDSFSNKTLAIRSVNQSKDKMTAIDFINSLKNEDGVGDYRNRVESAYKDRHISKAKYQKLLRPESDLAEGFIEREIRETQYISRKALQLLTEVSRSVTATTGRVTDRLREDWNLINVMKELNMPKYKALGMTYKEERKNNQHVVKIQDWTKRNDHRHHAMDALAVAFTQKRHIQYLNNLSAKSDRGGAIYGIEQNVTFIDGNRRRKFVSPFDNFREVAKKHLESILISRKASNKVATRNINKTKINGKINKQVTLTPRGQLHKETIYGKISQYDTKAELVNASFTQDKIATVANQKLKDALLKRLNANDNNPKKAFTGKNSLSKNPLLLNNGKEWSEKVMTVKMNNVYTIRKHVTPDLKIDKVIDKGVQRALQARLEEFGGNAKKAFVDLDENPIWLNKDKGISIKRVKITGISKAESLHEKCDLSGNIIINADGIPIPSSFVSTGNNHHVAFYKDTKGKMQENVVSLFEAIARVNEGLEIIDKHLNEDEGWVYQFNMKQNEYFLFPSEEFDPLTIDLLDPSNYNKISPNLFRVQKFTTRDYFFRHHLETTVEANQGTLGVSWLRCGLSGIQDVIKIRLNHLGIIVDVGDY

SEQ ID NO: 1435 - protein, 1397 aa, unidentified
  REGION 1..1397: note = Description of Unknown: Cas Enzyme sequence
MKKILGLDLGTASIGWALVNEAENDSEQSSIIKLGVRVNPLTTDEQTDFEKGRPITVNADRTLKRGARRNLQRFKLRRTNLIEILKRNGFILDTTLLTEAGCGSTHETCRLRALAASERIEKGEFARVLLAINKKRGYKSSRKAKNEEEGSLIDGMAVAKELYENKFTPGQFVFNLLSEGKKYIPDFYRSDLQGEFDAVWDIQKAYYPDVLRLDLYKDLQGKNKTQSWAICQKPFEIVGVKLQGDATEKRLERYRLRSIALKEKIDLEHLAIVLQEINNDLNQSSGYLGAISDRSKALYFNKETVGQNLYKQLQLNFHTSLKNQVFYRQDYLDEFECIWETQVKYHPELSNELKEEIRDVVIFYQRKLKSQKHLISACEFEKHHKAIPKSSPLFQEFKIWQILNNIELLCKETNTIYDLSLDDKRVLFDELNMRGNLKADGVLKVLGLDKKKWVLNYSEGLEGNCTNEALYEVYKKIAEYEGYAFDWGKKSVAEIKTELNAVFNDVGIKSEILDFNSNIEGQCFDKQVAYQLWHVLYSAEDDDKISEVDKLAYGDTNVALKKKLHRSFGFEPKYGNRLANINFQSDYGRLSARAIKKILPFLKEGHVYSEACALAKYNHSHSFTKEELANRPLKDRLELLQKNSLRNPVVEKILNQMVNVVNQVVDTYGKPDEVRVELARELKKSSKERSSAMTRINAAKTKNEGIRKLLQTEFGLKNPTRNDIIRFKLYEELSENGYRTLFTNQYIPREKLFSREIDIEHIIPKAVLFDDSFSNKTLAYRDVNLAKADSTAFDFISHAYASDLEHYKMRIERLCKVEKISKAKQKKLLMPLSDLTDGFIERDLRNSQYIAKKAKQMLFDVVRTVNTSTGRITDKLRDDWGLINVMKELNLPKYRALGLTEMQERKEGKEVEQIIDWTKRNDHRHHAMDALTVAFTTYNHVQYLNNLNASRYDKDNNNNPLFAIRNKITKVYESNNGSSKRKFVPPMPNFRSEAKSHIEGILISFKAKNKVVTKNKNRIKLKGNDTTFEKLQLTPRGQLHKETVYGLSKEQVLSEVKINAKLDLATIERVTKPLYREALKQRLIESGNDAKIAFAGKNAPSKNPIYIDKARTIQLPETVKVLSVQNLYSIRKAVNPENFKNLKSLDKVLDEGIKRVLTKRLNDYNGDAKKAFSDLDKSPIWMNKEEGIAIKRVRISGVRNAEALHDKKDQHGNLILSENGKTQPVDFVSTGNNHHVAIYKDDKGKLQEQVVSFYEAVARVNAGVSIVDYDYRKKEGWQFLFTMKQNEMFIFPNDDFNPEEIDLMNVENSRMISPNLYRVQKISTKNYMFTNHLETIAIDGKMLKEKKQLSEVTYRSIRSTEPLRQAIKVRLNHLGLIVAVGEELIIEKIKPELEYIV

SEQ ID NO: 1436 - protein, 1464 aa, unidentified
  REGION 1..1464: note = Description of Unknown: Cas Enzyme sequence
MKKILGLDLGTNSIGWALTQQNFEQKEGEIIGIGSRIIPMSQDILGNFDAGQSYSQTAERTGYRSTRKLFQRNVLRRERLHRVLNVLNFLPKHYADAIDFEKHLGQFKEHTEVKLNYRKNEHGVYEFIFMDSFQEMIADFESHNQLTKIPLDWTIYFLRKKALTQKISKEELSWILLNFNQKRGYYQLRGEEEDTEDDKTKEFVSLKVKAVIDSGEEVKGNKLYDVIFENDWKYDRQTTKPSDWEHKTKEFIVTTSILKNGDIKRSFKAVDSENDWIAIKKKTEQDIETSQKTVGTYIYDALCDNPTQKIRGKLIKTIERKYYKKELLSILKTQLKYHPELNDRKLYTACIEELYPRNEAHQQNIKDKDFNYLLLDDIIFYQRPLKSKKSTISNCTYEVRKYKKKVEFDGIEKEIVVYEPLKGISKSNPLYEEFRLWQFLQNLKIYKKENVDIDVTNLFFTSENDWVDLYHSLSEKKEVEQKQLIQYLVAKKIIDKKDKDSYGWNYVEDKKYPAMPTKAQFLSRLKKVTNLKNVAAFLTPETEYHLWHIIYSVKDKNEYEQALKKFANTYQLDETSFVESFAKFPPFKNEYGAYSEKAIKKLLPLMRMGTYWDETKISEEVKSRITSIIERLKTINFDKEKIESINDDDIPKQVLKSFLNFKDQNPLQGLNTYQACYAVYNRHSEASIITQWKTPNDISKFLNDFKQHSLRNPIVEQVVTETLRVVKDIWDFYGSGNESFFDEIHVELGREMKNDKKKRERISKQNTENENTNQRIRTLLQELKDTGVNDVKPYSPSQQEILKIYEEGVAQNPNVEYNKLSEQEVLKIRRNASPTKNEISKYKLWLEQGYISPYTGKMIPLSKLFTTDYQIEHIIPQSRYFDNSMSNKVICESEVNQLKDNQTAYEFIDNHGTEKVDLGQGKHVTILSKENFVAHCEKYFKNNRTKLSNLLSEEIPEGFINRQLNDSRYISKLIKGLLSNIVREDDEKEATSKHLLPVTGAITSKLKHDWGLHDKWNEIIAPRFQRMNELTNSQDYGYWEDAINAYRIQVPDEIIKGFNKKRIDHRHHALDALVVACTHRKHNQYLNSLANENKKHELRKGLLIKNEQGDYTKHFTMPWATFTIDAKTILEQTIVSFKQNIRVINKTNNKTWQWVLKDGQYKKELVKQTKGTNWAIRKPMHKESVYGEVTHIETPKNKIATAIRTPLSAIKNRKHIEAITDENIQKILDNHLKNYTDDKGKENFDQAFDVDGIEELNKNMVALNNGKNHHPIYKVRLYEIGSRFQISEDAKSPKSKKFVEAAKGTNLFFAIYWNKDKQKRVYETIPLNEVIEHQKQVANLPKEQRTLVPVNTKNGTFLFSISPNDLVYVPTDEELENSSMINFSSLSKAQVNRIYKMVSSTGSECHFIQNQIASLIKKYDAKSKVGEFGSINKSEKDIESNIIKERCWKLKVDRLGNITHVLKK

SEQ ID NO: 1437 - protein, 1535 aa, unidentified
  REGION 1..1535: note = Description of Unknown: Cas Enzyme sequence
MKKNAMKKKLGLDLGANSIGWALITQDFDKKEGIINGLGSRIIPMSQNILSDFDAGITLSQTANRTSHRSLRRLYQRKSLRRDRLHRVLNVLGFLPKHYKDSIDFEKHFGQFKNGQEVKLNYRKNKEGKHEFIFMDSFNEMVLDFKENGQQTIIPLDWTLYYLRKKALTQKISKEELAWVLLSFNQKRGYYQLRGEDSDNDARKNKTFETLYVSEVRDSCEVIKKTQEPLYDIYFKNGWKYDKQTTKPENWLNKNKEFIVTTKELDSGEIKRTFRSVDSEKDWIAVKKKTEQDIEQSKNTVGQYIYETLLKKPSQKIRGKLVKTIERKYYKKELEYIIHAQIQFHPELKDRNLYKSCVEELYPRNEAHQNNINDRGFDYLFLNDIIFYQRPLKSKKSTISDCPYEERVFIKDGEKKLQRIKCIPKSHPLFQEFRLWQFLQNLKIYHKDSSKSRILEEDVTQSFFSSDDDWVKLYEYLNDKREIDQKHIIDFLVDNERIENVHKKNYRWNYVEDKKYPGNETKASFLSRFKKLKNYNDQEYLSKEKELALWHIIYSVKDKLEYEKAINSFAVKNNLDVASFKDAFIKYPPFKNDYGAYSEKAIKKLLPLMRMGKYWDETKITNDVKCRIANIIERLESINYEIEVFEKDEKDRLKTIADDEIPKQFIKSFLPFKDKNPLMGLNTYQASYAVYKRHSEIGSIKKWYTPEDITTYLREFKQYSLRNPIVEEVVMETLRVVRDIWQHYGKGEKDFFSEIHVELGRGMKSSSKKRNAISKRNAENENTNRRIKDLLKELKKESSIDIRPYSSRHQEILKIYEEGVFQNPKVSYSIVNEDEINNIRKKKSPTKAEINRYKLWLEQGYISPYTGQIIPLSKLFSFDYEIEHIIPRSRYFDNSLSNKIICETNINRDKSNKTAYKYFKEKGGSIICGFLLLSLKEYEKHCNQYFKKNKTKLKNLLSEEIPEGFINRQLNDSRYISKLIKSLLSNIVREEGEKEATAKRLIPVTGSITSKLKQDWGLNDKWNELIAPRFKRLNELTNSKDFGEWDSKINAFRTKVPDEISRGFSKKRIDHRHHALDALVVASCTRKHINYLNSLNSERQNYALRDLLLIKNKEGDYTRHFQLPWVNFTFDAKENLEKIIISFKQNLRVINKTNNKTWQWKLQENGTYKKKLEKQKGPENSNNKVNWAIRKPMHKETVSGSVKIKTIKKGVSNLINYIDKPELILDKVIRNKVKSLAICFDNDIRKIKKHLIETPIIIKEKEITKIRVFEWSSNATATRVSLTQKFTKKQLESVTDSGIRMILNNHLKNYTDDTQKERFDLAFNSDGLDDLNKNIVTLNNNKNHHPIYKVRLFEEGSKFSVGETRAKATKFVEAAKGTNLFFAIYYDERREKRVYETIPLNKVIAHQKQTVFISKEKRLPIQPSNIEGEFLFSLSPNDLVYVPTDEEIEDRSLVDFSNLSKEQISRIYKMVSSTGSKCYFINNHISKLIKAYDVKSKIGEFGSLNKSELSIDNFRIKERCWKLNVNRIGNVKTLS

SEQ ID NO: 1438 - protein, 1437 aa, unidentified
  REGION 1..1437: note = Description of Unknown: Cas Enzyme sequence
MKKLGLDAGSSSLGWFLRNGKDIIKYGTIIFDSGMIKGTSGYSSPTKDRREARLKRNPIKARKYRKTLILKTLIENEMVPLEILELQLWSDYKKGRKNKFPSNDNFKDWLACDFRFSKGENYKNPYELRVKALDTKLAKMDLGRVLYHLVQRRGFKDIGEKNDETIKQKKRREESGFQEALNNSRSIAEALQKEYLEKDKRARDNYPYRDEYEEELLKILAKQGLSLEKDEDKKYKDEFVRNIHKAIIWQQPLKTQKGTIGKCTLEPSKRRCAYSHPLFEVFRALQFINTIKFKKEKDDDFLAISQEYRDKLLLSLFLKESGNFKFEKIRKFLDKQFKQKMIYNYRFDSKKQTYESTVSGMPFCKVAIKYFGDIAKKDILEVENYKQDSMPKNYGNYSLLDIWHNVTEFDNEKLTELGLKMKLDLVERKRNGKIEYVSPLIIIQESLPQGYASLSQYVIRKIIPLLKKGYLYNDAVLLANLKDSLGENFEVHKNSVNEILKKANKEYLANKLIITITNKLIEKFKGEEEANLNGLESERFAHNDFEFQLRSSDKIDIINACISYFGESKWLNYDNKDFLIENVSKQYQEFFFDTERKFRNITKLQELFENYLDENNIILNKPLYHHSKQENIYGKTIKFKDTDIDILPLAKSNSIKNPMFNKAMGVIRKLVNQLIVDGDIDKETDIIIEVAKELNDNNKRIAIEKFQKQREAKRNKIRQFLEEYKSQEKQSLNVEESIVQFELWDEQIFQNTEDENGQTQKNTDRKDILKLNKSINRYELWMEQKGQCIYSGKMISISQLFSSTTNIEHTIPRDILPDNTMANKTIAFRYYNTSIKKTEFPANLPNFNKNTKEGSAIEPRLSKWKEIRDGFKIAFESRQKAKGVEDENTKNTRIQDKHFFKMHFDYWSDKLERFEKTDVNDKWARRQLTDTQNISKYARQFLKTYFTRVGVQKGSTTAEYRKMLKLEDNDNPKDRNLHTHHILDAGVLTYIPTNASRRDKFMKLSYKIRENNNKQFHYIPHKNFDAQKIKKEIETNTLIYNYTKDTLTSQTFKKVRKSGKIQHKKDKNGDKILSEPIISRGNTIRASLYKDSFLAKIKDVERYEDGQPKRNKDNSDWKYKTGKDEFIYAKKEPISKITDKNVNQIIDKNLAKLIESQLGNDKILDWQGNEIRHIRIKKKAGKIVKQRLDYRSDKEHKNFYYAESGEIPYGVMLFNSKNDERILLQVHAYQVANIYREKRKFDIEYFVETFYPNFKEHQKLLLKVGQNLLILNDDAEYENRFSKTFQRNRLYKIIKIGDGSLWLKYHLTATADSDLDLLIKIKKDEILWSYEKQLGLSKILPDEKIDDVKTKNEDFERRKYKLNSYKDFRIKRIIDNFGKNKASDIKSELDKYKKVSSFIEIEGETHLLKLNTSKSWNFLYENEDFEISILGEIRFLK

SEQ ID NO: 1439 - protein, 1316 aa, unidentified
  REGION 1..1316: note = Description of Unknown: Cas Enzyme sequence
MPQHILGLDIGSNSVGSAWIDFKTGTIDTGLSIFPAGVDETDDARGEPKNAKRRMKRRTRITLARRSARKRELRQELISRGLLPGDAAAFNVLLEHTDPWVLRRKGLNHALNAHEFGRVLLHLAQRRGALGLREPPEEEESAQEAAAAKVDGKITAAIGAARSAMLERNARSFGEFMCMLREERRMPIDPTIADTRPVDRRKSAREWSQPIRNRAGSYEFAADRPMIRDEFAMLWQAQKQFNGPLANLLTDELRLKLDDETGDSIWRHRGLLFGQRRQSWDMGTLGRCVLEPSERCVPHADRHASYFRVVETVNNIKISERGKPDRWLTPEERSKVVSMLRGPLGMHEKGAHKGKPRRSASVSDVRNALGLGKAGKKSPIWLNIEADKDREINTDWFHRTIVHGAVTEEKWNAMSERQRDSVNRAVLSFDPDQEEHVTKLRAGAQKWWGCTIAQADAFVACWKKRPPIEKRMNLSRRAVVNMLRVMDAPPADPDCGFDRTKRWLTQIEARKLIAEDDGFCDVTTGERLHERTRIRYATGAKGLTARDRYYIKRHPNTLPPAPMLTNPVVRKAIHEVRRHLLAHVHKNGCRPDAIVIELAREAKMSAKDADRTLLRNRLRDRIRKNILESFNLHSAKPSQQRVAVERVVLAIQQNGVCVLCGKAGITARVAANGEECELAHITPRGIGGGAGLNNMVVAHTKCNRDMGRRTPRQWWGDRFDAEMNRIELMYSEVERIKYSQVDKAEQDKLWACYFDRRDDRAKIVNFKRTVDDIRGFSERDLTDTRYAARQVMAYLSDALFDGKGLPERGGPRLIFTTDGRWTSELRREWGLFQDAHDARAKGISAADEHARKEKNRGDHRHHALDAVVVALTSRSLQIEFEQRVKAADKAGITAEQFESYCRDNPIRPPEPFKSREDLRNRAIASIFGERPVSHRAVKRKLIGALHEETLLSPVVDGHGKPGGLYTGRKSVLALDPNHLRMPRPETEKEAIARLADRRQRETGVDEKTAKKWAREAARSKGYTPAIVDPPPGKGGLVRDVALRRALRKCLESNGLDPGEFTASQIKRLADAGKVTHASGVPIRSVVLLRAMSDPVIVSRWEHDYATGKPRKVYDALTGEGRAAAARAYVGGNNHHIEIRVDARGKWSGEVVSAHEAAQRRIAFFRALRKAGVPRFKDLKKLPRAERLRWSPQISAADAAHPVVDRSDNPANGGRFVMSLCEGEMVYMKHKDRPDEPPNYFVVAKLDKPQTVVLVPHWDARKAGERKDAAGMKVPDSAREQFSATPTDLKDLAPSGHPHAVKVRVSPLGEVELLKRD

SEQ ID NO: 1440 - protein, 1523 aa, unidentified
  REGION 1..1523: note = Description of Unknown: Cas Enzyme sequence
MKKKILGLDLGTNSIGWAVVNDENGLKSISHAGSRIIPMDAKLMGDFESGNSISQTATRTAARGARRLYERHALRRERLNRVLTILGFLPDHYTKELNRYGQLNKGAEPKLAWNIVNGKYSFLFKDSFLEMVKDFGNAHPELLVNGRNIAYDWTIYYLRKKALTQPISKQELAWILQQFNQKRGYNQARGEEEEQKENKRQEFITQKVISVRDTGEKSKGKSVYEVCLENGWIFTKESKYPLDWEGKTKNFIVTTTLNSDGTDAIDKDGKIRRTFRAPADDDWGLLKLKTQHDIDASHKTVGEFIYDALLQNPDQKIIGQLVRVVDRKYYKDELKRILDTQKQFIPELQNGDLYDECIHALYPQNEAYRNSIAGKDFTYLLLNDIIFYQRPLKSKKSLINECPYEYHVFKEKDGKWQKQYLKCISKSHPIYEEFRLWQFVENLHIYREAANGIGKEDCTTEYIANKADLISWLLTQKEVSEKSLLTQLVGKNKIKGLSWNFVSENDKKYPAAPISSTIIGTIKEAGGDINTLTDPFEIRKNKHHRKLSGKEQDEKAKKNNRIINNLEQIWHMLYSISDKSQLLAALKHYAETNHLSDVFVEKLGKMKPFSDYGAYSEKATRKLLSLMRCGEYWSEEAIDANTKSRIEHILTGEVDDAISERVREKLEAMNEIKDFQGLPLWLAEYVVYDVRKNDTKWETPEDIDRYLQSFRLHSLNNPIVEQVVMESLRTVRDIWKQEGQIDEIHIELGRDLKQNAEQRKKTMLRQQENEKANLRAKLLLQEFMNPDMEIEGVHAYSPSQQELFRIYEDGVLSANKPDDDTLRIINDLSSLKQPSLQDIKKYRLWLDQKYVSPYTGEIIPLAKLFTPAYQIEHVIPQSRFFDDSMSNKVICEAEVNARKDRMLGHEFIAQCGGERITLSGGKVVQILSLQAYEDTIKKNFAGDPRKQEKLMLDEIPEKFVARQMNDSRYISRLMMQLLSNIVREKISNTEYEPEAVSKNLIVCNGATTTRLKKDWGINDVWNKIILPRFERLNQIQNTTVFTAQTANGHIIPNVPLELKQGFEKKRIDHRHHAMDAIVIAFTTRNHVALLSNESALDKDEKARYDLQTLLRKREVWRSADGKDHYKFTDFIAPYDGFQKDVQETLENIIVSFKQNLRVINKSNNRSIRFVDGKKQMVRQEKGENWSIRKSLHKATVFGEVNLRKKKYANLTYALQHVEDVVEKDLRAKLRELLQESKDEKQIKQYFASEPDVWSDVNLKRIEVYYYTKDTNDHYYAVRTALDDSFTEDYIHNKVTSEAIQKILLAHLERCNNDPKLAFSPDGIEKMNADIQALNNGVPHKPIYKVRTYEKAEKFAVGQIGAKSKKFVEADKGTNLFFAVYSTKTEEGSEKRFFVTIPFKVALDCQKRGKKEWRTLLDQWTQNQQLVPENAKLCFILSPGDLVYVPTIDELHSKQYSLRRNRIYKLVSTNDANAYFIPCSVASPIVSNIEYTQLNKIPRLDTGELIREICIPIKVDRLGNIVAQ

SEQ ID NO: 1441 - protein, 1134 aa, unidentified
  REGION 1..1134: note = Description of Unknown: Cas Enzyme sequence
MSTDMKNYRIGVDVGDRSVGLAAIEFDDDGLPIQKLALVTFRHDGGLDPTKNKTPMSRKETRGIARRTMRMNRERKRRLRNLDNVLENLGYSVPEGPEPETYEAWTSRALLASIKLASADELNEHLVRAVRHMARHRGWANPWWSLDQLEKASQEPSETFEIILARARELFGEKVPANPTLGMLGALAANNEVLLRPRDEKKRKTGYVRGTPLMFAQVRQGDQLAELRRICEVQGIEDQYEALRLGVFDHKHPYVPKERVGKDPLNPSTNRTIRASLEFQEFRILDSVANLRVRIGSRAKRELTEAEYDAAVEFLMDYADKEQPSWADVAEKIGVPGNRLVAPVLEDVQQKTAPYDRSSAAFEKAMGKKTEARQWWESTDDDQLRSLLIAFLVDATNDTEEAAAEAGLSELYKSWPAEEREALSNIDFEKGRVAYSQETLSKLSEYMHEYRVGLHEARKAVFGVDDTWRPPLDKLEEPTGQPAVDRVLTILRRFVLDCERQWGRPRAITVEHTRTGLMGPTQRQKILNEQKKNRADNERIRDELRESGVDNPSRAEVRRHLIVQEQECQCLYCGTMITTTTSELDHIVPRAGGGSSRRENLAAVCRACNAKKKRELFYAWAGPVKSQETIERVRQLKAFKDSKKAKMFKNQIRRLNQTEADEPIDERSLASTSYAAVAVRERLEQHFNEGLALDDKSRVVLDVYAGAVTRESRRAGGIDERILLRGERDKNRFDVRHHAVDAAVMTLLNRSVALTLEQRSQLRRTFYEQGLDKLDRDQLHPGEDWRNFTGLYPASQKKFLEWKDAATALGNVLAEAIEDDSIAVVSPLRLRPQNGSVHDETIDPVKKQTLGSDWPADAVKRIVDPEIYLAMKDALGKLKELPEDSARSLELPDGRFVEADDEVLFFPENAASILTPRGVAEIGGSIHHARLYGWLTKKGELKVGMLRVYGAEFPWLMRESGSRNVLSMPIHRGSQSFRDMQDTTRKAVESGEAVEFAWITQNDELEFDPDDYIAHGGKDELRQFLGFMPECRWRVDGFKKNYQIRIRPAMLSREQLPSDIQRRLESKTLTKNESLLLKALDTGLVVAIGGLLPLETLKVIRRNNLGFPRWRGNGNLPTSFEVRSSALRALGVEG

SEQ ID NO: 1442 - protein, 1035 aa, unidentified
  REGION 1..1035: note = Description of Unknown: Cas Enzyme sequence
LNEFLDSLRLGIDFGEDYGGIALVQANRVLHAETFVDFHQATLKDRRRNRRGRRTRHARKMRLARLRSWILRQKLPGGQRLPDPYGVMHWPFKTKKGHTIKTGLASRQDGKRTIIQKCKIGTATPEEFVCSLTLLFQKRGFVWEGSDLCELSDQELAEELMTVRITEAVAAAIKEEIERRKKEPEDNKEGEIENLETVLCDAVKRARSPRTPEHRSIVESDLKDIVDGWTRKNCPQMTDMWKKELSCLLNKHVRPARFENRIVAGCSWCGKMVPRKSKVRELAYKVVVKNIRVEDFTSRQPLTAQEAEYFSQLWVDKEAKPPARTAIENKLKKLKASPKMANQLYELLAPSEPKGHTNLCQQHLEMAARGAFMCNRHHAICENNNGDHQTIDSVKEGRKRAGPRNPCREDRDRRMIRRLEQILFETPGKPGKPSHSIPRLITIEFPKPNTAQTAGCPHCKEKLSLDARVRWKMARPMKLEASNDSTPFFCPSCAAGIKITLYKKMRIKEKEIVQKYSPKDTDVLVRKTAAGGLKKLKYDMYLKETDGTCVYCGTSIGSGQIDHIFPQSRGGPNIDYNLISCCRTCNGNLKKNKSPWEWFGNIDQRWREFEDRVKKLPAPQRKKAILLSRESAYPENPTALARVGARTKEFIGRIKQMLLANGVKENEIADNYEKDKIVIQTIDGWMTSRLRGCWRTFPDGTANFPPKNDADKRNHAQDAVLIAACPPHTWRERIFTWKPENPYFSVLQKIAPRWKDHQATMKILGRYFPRWHNQNSDIQFVHQHKTQNGTSYTMRDTVESIDVGTDKKGGSIERIYSKSFRDFFSRTFKSLGIKMAMNEIPKLKSQWLNERRAAWMKKNPATPVPNQRERAWEASFPRRLQFDMGYGEDVAEVNPKNGPSRFVRAQPVNDRIEVWTNDVRQAQIRTVKNRILFRHIQDNSPQGRTLERIFRRNDMIQLDAVQKRGRKGITGKSYEAGEYMVVKIEKGGKFTAVPAHRGKGRENQRQVSQREIAKLCGVSLSPKRRKPSRSTSESG

SEQ ID NO: 1443 - protein, 1484 aa, unidentified
  REGION 1..1484: note = Description of Unknown: Cas Enzyme sequence
MRFPVKRIEKKLICLLTNGVCMKKILGLDLGTNSIGWALIENNFDKKEGALKGLGSRIIPMSQDILGKFDSGVTISQTADRTKYRGVRRLYQRDNLRRERLHRVLNLLKFLPKHYAESIDFDKKLGQFKPGQEVKLPYRKNEKGEYEFIFQDSFNEMVEEFKVHGQDIKLPYDWTIYYLRKKALVKKISKEELAWLLLNFNQKRGYYQLRGEEEDVDTSKTKEFVELKVKELVDSGKEVKGKRLYDVYFDNGWKYEKQVVKTEDWIDKTREFIVTTSTLKDGTIKRSYKKVNSEEDWIAIKEKGQKEIDLYNEQNQTVGVASYIFSKLLINPSQKINGRLIKTIERHYYRNELEAILKTQIQAHKELQDMQLYEACIHELYAYNDAHRNNIKANGFEYLFVDDIIFYQRPLKSKKSTISNCPYETRTFIKDGEQQIQAIKCISKSNPLFQEFRLWQFIHNLKIYEKEASLDGQLVINLDVTKEFLDSETSYSDLFDFLNHKAEISQSVLLKYFKLKENTHRWNFVEDKKYPGNSTRAEFVKRLSKIKGLDVSKLLTQAFEKELWHVIYSVKDRQQYLAALGTFAKKKGINALEFQESFKNFKPYESAYGAYSEKAIKKLLPLMRRGKYWNKERISVEVTNRIDSIMERVQSVEFDIDKIELLADDDIPKQLLKSFAKTRDPYQGLNTYQACYAVYNRHSEVSEVQCWKSPQDIDNYLKSFKQHSLRNPIVEQVVTETLKVVRDIWLKYGQGEINFFDEIHVELGREMKNDKKTRERITKSVTENENTNERIKNILQDLMEDSHVYGDVRPYSKGHQDILKLYEEGVYSNAKEQYKNISLDDIDKIRKTSSPKKSEIEKYKLWLEQGYISPYTGKIIQLSRLFTTDYQIEHIIPQSRYFDDSMGNKVICESAVNELKDNQTAYEFIKGNAKRIIDLGQGRQVELFSLEDYESHCKSYFKGQTKKLKFLLSEEIPEGFIDRQLNDSRYISKVIKGLLSNVVRAENELEATSKNLVTLNGSITSKLKKDWGLNDVWDTLVTPRFERMNALTGTSDFRKSIVDGHGNTYMINTVPDELKKGFTKKRIDHRHHALDALVVACTTKDHINYISSLNTQRNNFSLVNKLRVKEERTVINKQTGQTKTIHVAKAYHKPWGNFTKEALEKLETTVVSFKNNIRVINKTNNKTWQWVEVNGNRKKVLKKQDGVNWAIRKPMHKQTVYGKIQIPTPKGKIATAVRTDLTEITTRKRLEAITDKSIQNILENHLKAYKTDKGIEDFEAAFSETGIENMNANIQVLNGGKAHKPIRKVRLYEVGVKFPVGETGNNNKKYVEAEKGTNLFFNIYWDEKKQKRNYETVPLNEVIEHQKQVAHLPKGERTETPINNKMGAYLFSLSPNNLVYVPTDEEISNPSLVDFNNLEKEQVNRVYKMVSASGSQCFFIKAEVSTTLWNKKEYTAGNKMERDIEGNMIKDRCWKLQMSRLGTLKRVG

SEQ ID NO: 1444 - protein, 1109 aa, unidentified
  REGION 1..1109: note = Description of Unknown: Cas Enzyme sequence
VIATMPLNLRLEQNLQHFIPSLRLGIDIGQWAGGIALVQDRRILHAETYVDYHATTLEDRRTLRRGRRTRHSKKMRVARLRSWVMRQPDPSKRQEIAAWRREHPKERLPHQLRLPDPYRLMSRHCFQCQPTEYRQTVATQKPSLGTWVEAAVKGALPDGTPLTSEGFVVALTQLFQKRGFVWGGSDLSEMSDKELSQELDHIRLTPEVALQIEREVQRRRENPQSEREGKIPDFEKRVADALCRQKQNRVAEHRSIVESDLREVVKKFTSAHSDGKNKLCDAWIRELLKLLNKPLRLARFENRVISGCSWCSKNTPRKYKVREDAYKAAVRNIRIRIPGAASGVPLNEQQRQEFLSRFYDPEFRNKTEKVRQATFERMLSRIRAQEALARQLAELTGNNKPTGRTNLCQQHLRLASEGSFQCYRHRAICKLSGGSEHETLERIERLGPAVRTTRNPCREAHDKRLIQRIEQIIFDGDKLRFGDVPSLVTIEFPKPNTAQTLTCPFCKEKLAADTQLRYRIRKLKLEPAHKADDAKNFSCPNESCSSSASGQQLRLVAERRIFNRGKVDWKLFSVPNNEAVLRKAAGGMKQKKKQQYLAEINAKCIYCGSSIGIENSQIEHIFPESRGGPFLDYNLTLACSRCNPAQDSKTNGWQGKDNRTPFEWIERDKGGPVTWQRFEERVQSLPMPQRKKEILLSKEESYPDNPTALARAGGRCRQFIEELKAMLQEHGISQDQIADNYATGKLVIQTIEGWTTSKLRASWQNHLDGRPNFPRKNDRDLHNHAQDAVVIAACPPHTWRETLFTETRIVDGKLVPGLAPFELAPDWSAFSAGLSAPLVRLLGRYRLNWKQPAVDTKFYEVSSRFNEPIRFVPLTELKANQVHRVIDQEISKELIRLCAAHAVTGKKVLSTAVIQDLRAVVKRSLNAPLRRVRVRFEGIGSPKKLVCISPKDGPVRRTRPTIPSEGALVWLREGVHLGSAKPRDVNISLLRPEPLQRLGLSAYEPPVPREARVLNENGWRRYDFIFLQDGWFRFKEFSDAKITVLPERSIPDSLAERMALDVVDGFPERYLGKSELLEYFRRLQSKIPEPNKRAQPDNAPASAQAAAGD

SEQ ID NO: 1445 - protein, 1304 aa, unidentified
  REGION 1..1304: note = Description of Unknown: Cas Enzyme sequence
MKSPSLISPIGIDLGSKYTGVYFNQYLQGEILTEGDHRGFVVVDNGKKVWMQSERTQRRHSRRSIKRRKLAKRFFMMLNEFVLHLDLSFKVSTGQSLEEFLMGLFNRRGFTRLEEEFDIDFLEENRERVLELLDINVEKQKSIGSIFLEIAQKQELLERCHLKLDESTDKNEKPLKKQIREGLDKTRTSIIEGHKHRKEYLDNILADMKKVLNANMLNGYSVEQLHSLIGNISNFQLRFLRKYFNDIDMTTKDLWKEQKFNDLLNDYLSSWHVKTELEKKNLKQLRFNFSINQGFNFLISSDPVLSIPPYEDQNNRDPQICYSLILTAEKLDQHLEGWERYTRFNEKKTYGMAEKYHRNEIARNIQLYLDSFKESSIKKKVDIILQSVSTHDDERLKEFLNKYYKEIYQSKFGYWGSSDKEDRVLKICGHKTQHKKKMNFLYINQILFTNHFTCQEDIEKFKTDLKNNKPSVGKKRSYFGILEACSTAQKDHGNSLSFLLNKEVDKDLIQLKKDVSDLSTFTEKYLDQKKDQSKKYNNPFSWAQIYNVLDADIHGFSKGCRFCTRDNIHRMELDPTSNEAKAYRLSTVGARPFDGVVDRLLKDISWKVAQEKVKQIKENTAYDKIENVIIPVCIEENKFEFEEGLLEIKKKKSERRPFVSKIDRIKLDARGICAYTGKSLGDKGEIDHIIPRSFTRKNFKTVFNSEANLIYVSGEGNQIKGEKRYSIEDLHPNYKKILWPQKNDSEITNLIIEKIKKILDDHKGSTIHYHHLNDEERVTFRHALFIEEIEDDILRELHKSNRVRVNGTQKYFVSLLEDNLAKLMPEKKITFIPQFVSANDRSLLREYLAVKDPKFNKPEKQQLDSHILDATLTFAWIAKDEDFEEVLHTKGLIFSETDTISLESIIPKKFSIINLEAKTKSGRSNLGANQLFKDGLIGERYLPLLSLKENGVLMWKKGFSKENSITLTKKNIEGIKNITQFLKFKEDSVQTEEKLNSIILNSNFSYFEIDKKSYHDFLGTQKEKGEETDTSIVELMNELYYRTKKRTIRSQISDEKSGKIFDKDKILEALRKDLLIEKKILHPLFQEWEMLIKHLEKIKAFGNKYTDEFVQDFFIQNSTNKNHQAVRKVFSLPVLDNGGNFRIKRSDPKGSNVWQLLNSEGATHKGFVTKDNQILPLYHDAYIKSTRVISLDPMPINDGIKLPVGFFELNNLPKKALDEGVIRFEVSITEQKRRSVRMILKTSLFEKVKNLLQNGVPLDLLGADLIHPREKRIATIFSNDDFSIIEFTHEGSAGLNQLIQKNLS

SEQ ID NO: 1446 - protein, 1356 aa, unidentified
  REGION 1..1356: note = Description of Unknown: Cas Enzyme sequence
MTKLISPISIDLGAKYTGVHLGNYSQGESFLDGEYKGVVIVDNNKKTWSQSSRRTARHTQRSLNRRRLAKRFLRVVLSKAVGLDISLKINQQQTLEDFLMGMLNRRGYTYIDEGIDYDALEIHEFKYDFFEKIGEAIHSGETLYNFLERVVREKHSSVIREKLKEEKEIKGKLQRVTIKIFKDFDEAIEALEKAINGGHKHREEYLETIKRDIEKFVSKDATQGKITANELWKVVGNISNFQLRFLRKYFNDQRMIQNDLWDEEKFNKLFNRYISSWHVGTSIEISRLKELGAVSHKEGIELLKKVEPKLTIPPFEDQNNRHPPICETLLLKLEVLNKVLPSWKNFASKVAADYKIDFGFPEIEIKDDLDLARKFQIYLDQMMKEKAPNRINAILTFLTNKEPNEKLEHFLKQYYSEQHEARYGYWIQKEDSILSTCGLKTKHKNNMAHYLIGDILNSREKFQTEKSIEDFKSFLRSVKVGRRTLLGTLKACSEAQEDYGNSLNFEIKKVLKVQPDADKGLKKLVEEINHTSIEIQKHLLQSDDQNKKYSNIYSFAQLYNHLESDIHGFSKTCLYCAKDNSFRNNRPEGENITRLSRGTEKPIDGIVGRLLDSISWKIALEKEKQLINYTHIKSISEIILPIVIEENTFSFSFDLKDIKKQQDRSAVGRLNKGQIKDEKKEERSVKRFQEKWDRIKNDSKGICPYTGESLSTHGEFDHIIPRSSTKDKFQTVFNSECNLIYCSNKGNIKKGKNVFTLNDLSEKFLKEIWGNDDKIILKNNIVENFKKLEEESKRGRLDFADEEIRKILRFALFVEETRDSAIWILNKMTATRVNGTQKYLASLISKKIDIVSKRNPTFPLIKKKFLFVSANERSDLRELLAHADPSDIRWKKDGQQSLQSHIIDAALVYARACEDQKIANELITENVIFSEENVKEIQRIIPKSLEIVTMESKHEAEKDIGATKILAATMTSENYLPIFAYKNNTKIEWKIGFSKDNSVNMREGAKVPDWKKYLLPFAEYMNQKISSFDDIASTLQDGKCLYFTINKTKIYEENLKLKNENKGFDETLIKLLDIFSYRIKKISCDSLFIKQEKNKNIGIYNTSEIAKYYQQKIKKSDFTEEGNIDLPIKTTIEKIYKSIKNTTVENLEIICWKDFFPITVQAQKEHIAVKKTYSLSVLTTEGNIRVRRLNPKKESVWQLQKNNAILNKGFFVQNNKLKGIPTEIASKYSFERFGPMPEDYISMSNFIAIIVPNNLKELGIQSILYRLSEAKRRRCRVEISEKVLSTILPQVNLMALEASYSIKDHKSFWFTDSLLKNMRDDKFDLIALKDKSILIEFTHDGNADVNKAIIEAHTQK

SEQ ID NO: 1447 - protein, 1210 aa, unidentified
  REGION 1..1210: note = Description of Unknown: Cas Enzyme sequence
MEKRILGIDTGTNSLGWAVVDKQENGKYSLVSKGSLIFQEGVKVEKGIESSKAADRTAHRALRKQYFRRRLRKIEVLKVLIEFGWCPYLSPEALHQWHVKKEYPMDEAFISWQRTNDNFDENPYYYRHRCLHEQLDLNEMSDSYILGRAMYHLAQRRGFLSNRLEQGDDDETGKVKEGISSLSKSMADAGCEYLGDFFYKIYKEKGNTERIRTRYTDREEHYKKEFYAICERQNLSEEQISKLEKALYFQRPLKSQRQGVGKCTFEPKKARVADSHPAFELFRMLSFVNNIKIKGPQDVELRPLSQEEFEKAKPMFFRKSKPQFDFEDIAKAIAGKGKYQHIKDDGDKPYKFNYRMSQGVTGCPTIASLISVFGDDYENAIAERYTLSDGKTPEQMVNDVWNVLYSFDDKEKLKQWGKDKLQLSDEEAEKFSKLRLTHSFASLSLAAVKKILPWLEQGLIYPHAVLMANVPDIVGREVWKSRGEAITNELLSLISNFNPKDVAMTGTLDFCIKDVLKDMCPLNPGATEKLYHPSMIDTYPDAKKNSQGVYQLGSPRTNAVRNPMAMRSLHQLRKVINTLLREGTIDSDTEVHIEYARELNDANKRKAIAQWNKERETRRKKYAEDIRTLYKQECGKDIVPTNDDIIKFQLWEEQDHICLYTGDSIGITEFVGPNPSYDIEHTVPRSVGGDSTLENMTLCSSKFNRDVKKAKLPTQLSNHAAIMERLEEWRKKIEKLRKDADRVKTHSGMDKAVKDRLIQKRHLLKLELEYWVGKYKRFQMEEVPEGFARRQGAGIGLVGKYAGLYLKSLFHKADDRNKSNVRVIKGATTAEYRKMWGIQDEYEKKSRDNHVHHCIDAITIACIEPGEYNATARYYQQLEEYERTKAAKPSFPKPWPTFTEDIKAIAQEMLVVHSTPDNMPKHARKYIQTAKGRKLAMGDSARGSLHNDTYYGAIERDGEIKYVVRKLLSSLKESDVENIVDDAVKEKVKLAIAEKGFKKAMEEDIFMNKEKGIKIKKVRCFTPTVTNPLHIRTHRDESRKEYKRQFHVTLDGNYCMAIYEGEVKGKIKRTYEIVNMIDAAAYYKKSADLTRQYPIAPENKNGLKYRCTVQTGTQIILLQSDNEEINLSDKEDLARRFYYVAVMRSDGRIVLRYNQDARDATTLKKERKSGAYKVGEQYRSEIMLSLSDFHALVEGVDFKINVLGEIVLLK

SEQ ID NO: 1448 - protein, 1096 aa, unidentified
  REGION 1..1096: note = Description of Unknown: Cas Enzyme sequence
LGKILGLDIGIASVGWSIIDSNTNKIVNMGTRLFESADANNNKIRRETRAARRNLRRKNYRLKCVEELLSDYDFTSSGDINLNPYELRVKGLKEQLNPSEVYVALYHLAKRRGISYLDEAKDEGKNINDSLKINRELLKEKYPCEIQLERLNNYGKVRGIIEIENEDGSIETLINVFTTGAYEREALQILNEQRKYYEQIDNNFIEKYIDILTRKRDFYVGPGDENNRTNYGIYKTDGRIIDSIFEELIGKCSIYKDEQRAPSASFTAQEFNLLNDLNNLTINGRKLNEMEKKKIIEKMLSSNGVGVATMVKIIKEVTGIDGAIEIKGYSVDKDEKMVFNHTFEVERKLKGFLSGTSINYEDFDIDDKDRLALVLSKSMDYKSLLKNCKKDFPGFNDEDIALLFSFLQKNKSLYSKWHSFSLKVMREMREELYKNSKNQMNILIEKGIKKSIKDNFSKYKYIPVGFLNDEIYNPVVKRSINQSIEIVNAIIKKYGDLEAIVIEMPRETNEEDERKKLQKIQGDNEKEKKEATNRARNEYSITEEQLYSQKGLLTKIRLWYQQDGRCIYTGETISIQDLINYPNKFEIDHIIPKSISLDDSLNNKVLCYHNANQIKGQRTPFNAFSINSKNISYNEIKERAYKLFKVKKINKTKYDLLTFEEDINKYEVRQKFISRNLNDTRYASRVILNGLEEYMKDKGKDTYIHVVRGKFTHQIRKKWGLEKDRDESFAHHAVDATIVATCYLLGQSEGTVRNPFLQKLGRYDKSLWGIISDDKYDKEVYKLPWENFIIDLNNKVGKIKYSHKVDTKINRAISDATLYSTREVEGEDYIVEKFKNIYDNVTAKKLVEKIKDDLAKYDDPEDSKILMRKHDPKTFEILVKIIDEYSGEKLNPFEAYKKDHGNIRKYSKTENGAIIKDIKYLSTKLGQSIEISKTDKLSNDRKVVLLSLKPFRTDVYYNEKTGKYKNLGIKYNDLIFRNGKYVVRTEDYSNMKQKLEIDDSYKFLFSLHKNDIIGITYKSNPDDEERYRFLSSRSDNPNRIEIKPIEKSKFDKQNQPTIGTKVLKFNKYHADILGNIFNVTNEKLKFEFTVDNINDM

SEQ ID NO: 1449 - protein, 894 aa, unidentified
  REGION 1..894: note = Description of Unknown: Cas Enzyme sequence
MAKKSKGMKPKEKRELEKQKRIQKAVVKSADDTPVKAEATKAVSVNTDLSVENKHNKKSAAKALGLKSGLVIGDDLYLTSFGRGNEAKLEKKISGETVENLGIGAFEVTERDESTLTLESGRIKDKTARPKDPRHITVDAQGKFKEDMLGIRSVLEEKIFVGKKFNDNIHVQLAYNILDIEKIMAQYVSDIVYMLHNTDKTERNDNLMGYMSIQNPYSVFCNPNFSAAKTQRNVVRQKQELDNIIKSGRLGYFGEAFMVYSGNSSKLRPEKEIYHIFALMASLRQSYFHGYVKDTDYQGPTWPYTLEDKLKDPSHEFRETLDKIFDEGFSKISKNFGKQNNVNLQILEEMLGELYGSTDSKSLACDYYDFIQLKKHKYLGFSIKRLRETMLETTPAACYKAECYNSIRHKLYLLIDFLIYDLYYNRKPARIEEIVDKLRESVNDEEKESIYSAETKYVYEALGKVLVRSLKKYLNGATIRDLKNRYDAKTANRIWDISEHSKSGHVNCFCKLIYMMTLMLDGKEINDLLTTLVNKFDNIASFIDVMDELGLEHSFTDNYKMFADSKAICLDLQFINSFARMSKIDDEKSKRQLFRDALVVLDIGDKNEDWIEKYLTSDIFKRDENGNKIDGEKRDFRNFIANNVIKSARFKYLVKYSSADGMIKLKKNEKLISFVLEQLPETQIDRYYESCGLDCAVADRKVRIEKLTGLIRDMRFDNFRGVNYSNDACKKDKQAKAKYQAIISLYLMVLYQIVKNMIYVNSRYVIAFHCLERDLLFFNIELDNSYQYSNCNELTDMFIKDKYMKEGALGFNMKAGRYLTKNIGNCSNELRKIYRNQVDHFAVVRKIGNYAADIKSIGSWFELYHYVMQRIVFDEYRFALNNTESNYKNSIIKH

SEQ ID NO: 1450 - protein, 1365 aa, unidentified
  REGION 1..1365: note = Description of Unknown: Cas Enzyme sequence
VANEKIYLGLDIGTNSVGWAVTNESYKLKKFKNNLMWGVNLFDEAQQSAERRSFRTARRRLDRRKQRVFLLQELFADEILKTDPKFFMRLKESALLPEDSEHREHNIFFDDKNYGDKEYFKEYPTIHHLICELMSNDAPHDIRLVYYACAYILAHRGHFLFSVSKDNIDKITEFKDIYDDFYTALSELCDIPVFDKNAAGMSEILKKHISVKEKTKEIEQLLFGKKSPKADDGDVIAYDKLVSFISGGTVKLSDMFCKEEYKDLEKNSICVKNADLSDTLEMLTGQIDELHLELLVKVKAMYDWSLLVDILNGHKMISKSKVEIFDKHKKDLSDLKYFVRTYLDKKSYDEIFRVISDKANYVSYVYNAPSDSGREKYKRCSQEDFCKFLKPFIEKMQPKEKDQAWYDALLEKCINNDLCPKQVTTDNRVIPYQLYYAELKKILENASKYLPFLNERDSYGTVADKILSIMEFRVPYYVGPLVDAKKSRFAWMKRKNEGKIYPWNFSEMIDEDASENEFIRKMTCKCTYMAGEDVLPKYSLLYSKFNVLNEINNIKVNGEPISVEIKQRLYQDKFVSSMAKVTKKRIAEYFMSIGEFSDKIEITGIDDNVKSSLSSYHDFKRMLEQRILSENDAESIIERITVTNDKKRLKKWLKDNFRKLSDDDISYLSKLKYKDYGRLSRKFLEELHDVDPDSGEVLSESNIISRLWETNDNLMQLLSSKYKYSDSLEAYNRFYYDQPQNKMSLDERLKDMYLAPAVRRSVTRTLDIVKELKSILKKSPDKVFIEMARGESETPKGKRTISRKEQLSAFLADIDAEDRDVLKKRLDDCDDGKLRSEKYYLYFMQLGKCAYTGKTISFEELEDNHKWNIDHIWPQAKIKDDSLENKVLVDSNANGLKGDKYPIDPEIRKKMSPFWKSLHEKKMMGDKKYNRLMRTTAFTEDELSGFIARQLVETRQSTKAVATVLKELLPETDIVYVKAGLVSEFRQEMDMLKCREVNDLHHAKDAYLNIVMGNIYNTRFTKDPLNFVRKERNYSIKLTTLISKKIERNGEVAWDPSTYFETVRKMMSKNSIRYVKYCFKRKSGQNGGFYDQNPLRKGKGMARIKNNLPIDKYGGFDNSTISYYCLANIKEKGLVIASVELLSSAKFESNEEYAKRYLSDKLTIELKTSILPEHIDFPLKSRIIKINTVLELDGYRVLIAAKQNTSIKFVSAESLILDSDSECYIKKIMGFLNKRKENKELKIHSSMGIEIDSNIVLYDKLVAKCLNSPFSKMYIDLGNKMKESKEQFRNYSLEDQIIILSHMVELLKSGRKTGVDLSKVGGKAHSGVKTLNSFLFKIKDYECIRIIDQSPTGLFEKKSENLLEL

SEQ ID NO: 1451 - protein, 1464 aa, unidentified
  REGION 1..1464: note = Description of Unknown: Cas Enzyme sequence
MKKYFLGLDVGTENIGYALTKDYEVMQVNGKRTMGVLSFESANTAVDRRTYRATRRRLDRRRYRIALLQELFNDEIMANDKNFLRRLGDNDLYLVDRNVEGKYSLFNDTDFNDIAYYKQYPTIYHLREKLMMEGTDDIRLLYLAIHHIIKYRGHFLLAGEVSTNEVGGVKQLEELINKLNSKLDENNDENKNNDNTCFFDKFATTALSDVKDLICGTGDITKNMLNQITIGKKYISKRDKKNKLNELFGVSSSKTSKKIIDIVMGGKVNLTELFGKEYYEKEEVKGFTMAEEWESIEDLQLIKDNILHIDIIDTIKQIYDWVTLNEMLKGKQSLSSAMVEIYETHKQDLHDLKEFIKDYAPNDYERVFGEIKNEKGKIDNSICNYSCYIGGGRYNGDKIGANGRYGSTCTQEDFYKFIKKIIESVTVEEATALRDDLLERIANKDFMPKIVSKNNSTIPFQLNMMELDGILDKARQNPKFTFLNDVDNGWTIADKIKSLLSFRVPYYVGPVKEYEDNDNNKRYAWAVRKESGRITPWNIDDKIDKKQSNEIFIRRMTNRCTYLKLADTLPKNSILFSKFMCLNEINSMKINGDAISCKEKKAIFDNVFCKKNPTIKNIKKYLIENFGYEKGIVLSGIDNEIKSSMKTYIIYKNKLGNKVDADPNMIERIIFLSTIHEDSQMLEKSIREEFGDKLTEDEIKAIKGFKFNGWGSLSAEFLTGYKNNGIKLMFDGEMLDIIDIMYEYNLNLQQIIFNEKCNFSEALEAYNLEHNIVEDSNVSYNKDIADYPCSPSVKKCVWQSFKLVKDIVKQTKIVPDVVFIESCRENNDFKKNQRTSKRRDMIVAIYDEARKKINELQRDKKAEFSIQELEGLSEDIDYCQKTLDNYSDSELKKENLYLYFMQLGKDMYTGKAIDLNQVLFGNMYDHDHIIPQAVIKDDSFTNLVLVAKKENAEKSRTYPLESQFRQTTLWKKLYKIGLLSNEKYSRLIRQTPITDEEQEKFINRQLVETSQTVVLLRDLLNRYFASKNVEVVLTKAGNVSMFRKEFDLTKSREVNDFHHAWDAYLNIIVGNILNKEFNHNWFIRQDNGKDKSYNFLRVLRKQATANNNEILNIIETTMNNIDFQMVKLPEEKKGNFYSEVLKTHENDKDSSLIPMCDSKIVGGKEIHPKCDTTKYGGYKTANTAYFILADSIDKKGAVQRNIVAISIFDDARIKNGKITYKEIFERIGLKDGKLANVEGMKVPIIKTGSLLDFGAYCLRLAGMTGNRLTFHNANQLFVSKDQNRYIKELGILVDKVVKESKKDTKEDKKEAMALEIIEEIIRRKNNPDNKNSNIIVVNRKDNLKLYDFFVYKLSHNPYKDIPTYSSLLDILQRGKEDFEQKEIYAQVLLLFNIIKAFQCNAQKVDVSALSYVNKKGIATKGGAGQCSIAINSDITEIDKLILINQSMSGLKEQRIQLNLKKVDK

SEQ ID NO: 1452 - protein, 1106 aa, unidentified
  REGION 1..1106: note = Description of Unknown: Cas Enzyme sequence
MGYRLGLDIGIASVGWCILDENDTIMKAGVRLFPEGKSDENQKRREKRASRRLLRRRQFRIERVRELLYRYEIIDNYEYDFYTNETTPYHIRKKGLFEKLTKKELAIALFHLAKRRGAGEFNIEVKEDSKEEESTKSILAENEKLLKLGKYICEIQLERFEDKTEEVRGNKNNFRTSDYIKEARKIIDTQREFYKNLDKCFEEEYIGIIEGRRKYFEGPGKNSPYSWKNQEEWMEGLMGNCTYFPEELRIVKNCYTAEKFNLLNDFNNLRIKRAENDRLTKEEKLKLLNLFKETKTEKSITLKKIASILNVNEEDISGYRIKKDGSPEFTFLKSYIEVNKIFRCDDAEILDNISKIATYYQDIETRKEKYREELKDILAITEEIIENLAQKIKFTGSHSLSKKAIKLIEDDLLETSKNQMELFNEKGLIPYKMDFKDEKIKYIPKDYVNNWILSPTVKRSMIQTINVVNEILKEYGTPEEIVIELAREKNSDDKRKTLIDIQKKNEKENNEIKELLENRKLDKRYFELLKYWKRQDGICLYSGSAIGINEILKNPLAFEIDHIIPRSISFDDSQDNKVLVRRIENQRKGQRSPYEYFSSKMTSRSYEEFKAQVLEMFKNKKISLKKRDLLLLEEDISKYSKNFIARNLVDTRYATKEFMSLLRVFFRDKNKKVKIKAIRGSFTSQIRKEWKMTKMREVSHNHHAQDAYIILIAEKTLNKLKWIKNYDENLESSKIYIKREDILSDDELKRLFDYKYSLPIKNYKDYLYSNFVDKKPNRQLSDETLYSTRIIQEKDKKGKNIESEYIIGKISNIYDKKSNVIKYFSDEKKHSELLIYQHDKQTFDKMLEIFNEYGGKGAKINPFTKYFEEFGKIRKYSKKNNGPEISDLKYRVSQLGNHLDITHKYKESKNRVVMLSIPTYRADMYFNGKEYKFISVRYLMLRDKGKCYIIDSKEYKKEKNKKGIDENYDFIFSLYTGDILEIERKDGSIEKVKFKGVNNDERKCIEVDNIERNYGSYIELIRDIVAKKEEAEKKGSRYNFEEDLSLIIGTTLTKDEGEKILKSTPISSKQKIVAIGGDIKKLRKIYTNILGKEYDSKENFEETIKK

SEQ ID NO: 1453 - protein, 907 aa, unidentified
  REGION 1..907: note = Description of Unknown: Cas Enzyme sequence
VEPFASVPGRYDDETRRDSIDAAVGARRRATRAANLGTFTGYRIGLDIGNGNIGWCILFEDGMVPRFMTAEDLAAHNAALPKHARRTQLPDMASFVPLGTYKFRARNENGVSLSKVRASERAKRRLLDARQARKRHLRDVLIRAKLLPAEGEAVGGHSDIHADVLRAKLLDPAFVAHRHDLGRALYNTLKRRGWMKPRGRAGEDNDSTFGKTQTKTYREVLSRFGCPTIGAFLERCAQDAKADGVPRFRKRHRTLAVQKQADAKDREEALRSGKSYEAFQFLTPTNELVREEAAALRAAQSAHVPIDDETWALIEEKAGFRRDLKTRTPGRCRFLTDEPRCIRALPSFQLFRILQQVNNLRVDGRPLDERQFRDVVDLLQRNDRKTLRDIAETLMLKPKQLAQAEREGASLVGARTDVALGRVLGEAWTSLSIEERDRWTMRFLRRHWNPDGEKPWTKDDEAALESDCAATFGPDALDRIDGEAAKEFEDNFANVSHKYVMTAIKVLKNRGGPDDILKALGVPEPRIELFERLPYYGRVMPDLTVPADAFAPLTRTCDDEREYGRAPNPDVHVVLNRVRVVINEIIDMMGGILPTTCVVEIARDALTDTEAEEHTKLARERENLRRAIERDIAHVFEGLGKKMPFGPRLDRLVDRWKAALRQGWRDYDGSQIQRSLLVEGDIYQLDHVSPAAFGEFRTNNIFVTRLNAHKGRRLPWEAFPEHRDALLAFAIFGWEQRIAALKAVLKRKDRPLSAKDRERLQRRIEDAKDQLAALAEYGTPRADVLASLRRTLTDKLDKQFETGVARLRRRRAASSRRSAHRSRQRCSPGSAPTRCRRMVNMPRAMPQTSAGRQSWSGATSSISARVRWRSSHGRCGRYAACSTSTNVVRTSATMQSMLSSLPILTSA

SEQ ID NO: 1454 - protein, 1012 aa, unidentified
  REGION 1..1012: note = Description of Unknown: Cas Enzyme sequence
MDASPVKPNDPLQFCLDIGTNSIGWAVFTLDRPGGAVTGFANGFGALPAGARVFPQGRDESKLTTLNATRRGQRLTARRLQRRSRQIKALAVFLRQEQIGLLPPPDSAEYRELLNNRGNLLNPYRLRAEAVGRDLLKHELGRVLLHLAKRRGYDAGRRFGSNRGDEDSKKLGPRIKALNAALGGMTLGQYLWHHGWCSGRPQRVRFHKGSEFYPTRKMLRDEFNCIRTRQQGVHTLDKDAWKRIEQLIFFRRRLKPSVAGDCPFTNEKRAAKALPVVQRYMLYKTLNDLRPRLAPNEIASIGAWAETRATIELKEIRQRLGWSDRLFSIERDRPGAKGRKTIRGDETSAALAQALGATWHTADDSLRDEIVRAALRPVEDDAARALAGFGLTGAQVDAVLEGLPEDYHAYGETVIRCVLPYLMRGIDERHALEQAGFAEQAVPSRERLPFYGEILRGQCQPIGRKTPNVALAEAAWGRIPNPTVHIALNQLRRLINAMLDVWGVPDRIVVETTRKLKLGAEALREERGRNRENEERNVKYDQEAVDILGHPLSPNQRERWRLLLALWHRQDKWCLYSGRPISCAALAADEVEIDHVLPWSRTLDDSRQNLVLVFRTANRRKARHTPWDAFDAETLDAIRERAAALHAKKQIPKDLLRRLDPVEGRKILESRNWLGRQLNDTAYTARVARTYLSCIVPKQRILFPSGAATAHARHALDMVKDRNDHRHHAMDAIAMGLIDWKTIHALNTASAQERELPAITPPDGMKRATEELLARIVVSHKLDHGRPRSLYGLDGAGGGASPTGELHEMFAYRVLQVDGKIATITRADDGKPNSGKKKPTASLRHIRHVRADGQELTRTVFTGGNAYLEVFELPPAISGRRTVRRTGGELVTEFDANSVELLPDGRKRPFQPRWVRAHKGARLLMRLHKGDMVEIVDGNPTNRYRIVKQMTEDQGKSLVKLTPHWCGIGVEDAKKDRSGLVRSMQATAVTANGVRLVSVDMLGRVNYRQRPG

SEQ ID NO: 1455 - protein, 1156 aa, unidentified
  REGION 1..1156: note = Description of Unknown: Cas Enzyme sequence
MNYFLGLDLGSGSIGWAVIEKQNGIPVRIIALGSRIVPLTPNESDNFSQGKAVSINQQRTQKRTARKTLDRYQMRRALLCKTLTDNDMNPTHKLMCASKEELWKMRSDAATQQISLKEIGRVLYHINQKRGFKLAKNEASSTDKTEQTYIQSINQRCAAIAGITIGQYIYGELIKNPEFRYRQLVYSREKYIEEYDTIMKCQQQFYPDVLTDELISKIRNEIIFYQRKLKSCKHLVSYCNMELHEIKVADGRIVISGPKTAPKSSPLTQVCKVWESINNIVLCNKKGDTFSISDEQRMAIFQFMERNEKLKVTNLYKILGISKKDGWWGGKAIGTGLQGDTTRIKIEKALNGKYPHLLKFNIDNSGKCVNKDTGEELPCVKDTAFNEPLFKLWHTLYSISDIEELKAALRKNFNITDECVLDNLSSIDFVKEGYANKSHKYMRKILPQLQKGVMYAHACEIVGSSNCSNYKATKRANNGALLLSPIAKGELRQPVVEKVLNQMVNVVNALIEKYGEFEEIRVELARDLKQNREERNEDYKRMTTQNKKNLEIAERIQQEYKLYPTKARIRKYRMWEETEHRCIYCGAPVSIKEFLSGIDAEKEHIIPRSLLFNDSFSNTTCACRSCNHDKGQMTGFDYAESKGKAFFDDYINRINKLADKKEISRSKFKNLTTKREDIPQDFIERQLRETQYISRKAVEMLQSLYADKPSGKLYVKTSGGIITDFLRHQWGWDTVLHQSNFKRFEKAGLIENVPVITKGEIHFEKRIIGWNKRIDNRHHAIDALTVACTQQSHIQRLNTLNANKEAFTKLDATTNEGYRAFIKRVAQEAPFTTAEVLEAADNIIVSFKPITKSTTPGKRKVFKNGKPIIKQTGILVPRGELTEETVYGLIQRYDGKGGFNACSVVRYPLSKITSQADANSIVDEGIKQIVKKRLKEHNDNAKIAFSTPLYSDVAQTKEIKGVRCFSGHKRASLAIVKRDENGKPIGFSPTGNNHHAAFYLNENGKPVELVCSFYHAIQRRLFNIPTIIEKPSEVWDLIETSGKEFSEEFLSQLPNPKWTFAFSLQKNEMAIIGLTKNDFEYALQNGDKKTLAQHLYKVQSISHNDYCFTRHTETKYDKNHANKPDERFLRYKSASSLLRDFTAKVSINVIGDIIEK

SEQ ID NO: 1456 - protein, 1147 aa, unidentified
  REGION 1..1147: note = Description of Unknown: Cas Enzyme sequence
MLRALGLLRRPGLGWVFCLFSSRIIYFNDLTSIVWHYRLMETVTNSRFWVGIDVGTNSVGCAAIEVDSDGMPIRILNGKVQVHDSGVDPQHAKTATTRLAVSGVARRTRRLVRRRRKRLINLDKQLKAWGWWSELTSNDPYFPWRVRARLVDELIEDASERQQLLAVALRHIARHRGWRNPWLRIESLFNPSEPSKFLTGFRERVETETGRYFDHDVTAAELAVAALKHDSSIPLRGGKTANLRAEKTFSFIGSKLEQSDNANEILRMAETQQLSIAQTEEIIRLVFAAESPRGSYIGRIGKDPLPGQGSKYRAAKASDSFQRYRIASLIANLRLKDGSSERPLNVRERNELFDYLMNVKAGANPQWLDVAEHMGWERSQLRGTATITADGERAAARPPVHNTNEKIGTCKVRTLKSWWPDASPEARDAVVAVLSDGLFDDDSAAGAEARELIESLTDEELVALDTIKLPPGRAAYSSDSLNRLTRRILEDGVDLHEARKLEFGVDDSWAPPAEPIGAPLGNPAVDRVLKIVARWLGAVEAEWGAPEKVVIEHVRSAFGSEAAAREHIRETERRFQQNQQQMRQLAESQGISGVVRRSDLFRYQAIVRQNGECLYCGTAIDYTTAEMDHIVPRAGIGSTNKRENLVAVCSRCNKSKSNTPFAAWAARTQLPGVSVPDAIERTNHWNSGPGETAKRHRDYVREVQARLRKTSEDEEFDGRSLESVAWMANSLRQRIEAHYRERFPAASTKVSVYQGRITAEARRASGIEKQIPFIGEAGKTRLDRRHHFVDAAVVTLLDESIARTLAERVNLRDSERNLHAPETWKDYTGSSERPQARFENWVERMQILLNLISSALNDDEIPVMEDLRLRLANGTAHKDTILPLVRMQVGDAMSLELIDRASTPALWMALTLDPDFDEKEGLPANPNRQIRVRDQHLGPYDEIGFFRKLTAAIAVRDGYAEIGSTIHHARVYRIDTGKKPKYAMLRVFTTDLIRHRNDDLFSAPLLPQSISMRTADKTLRKALAEGTATELGWIVVGDELELDMSSFTTGDIGDFLKEYPGTTRWKIDGLMAPTRLRLRPVILASEGLGEEPTKASKTILDRPGWLPYINSLWNVQELTVIRRDALGRERWSSAAGLPVSWRVENSV

SEQ ID NO: 1457 - protein, 1115 aa, unidentified
  REGION 1..1115: note = Description of Unknown: Cas Enzyme sequence
MRAQVYKKLNDRVFMRLYAGIDVGSRSLGLALWQVDELGTPIALLNGITVLHDGGIHRGMEKTSTTRLAAAGFARRARRLHHRRRARLRHLDEVLKELGLPLPAFDEKRDPRFPWTARARLASRYMDDPTERDELLSISIRHIARHRGWRNPYQRVSNLFSRHSPTPELLKLAREAGLPFDDSSAPTVAQIVQHHLDMWIDPALTGPRIRHDESNPGLLDQRLNQTDYANELHTIFAVQKLDEDTARAIIDAVFQAESPRGSWLGHIGKDPLPGQGGLFRASKADPAFQEFRIRGTLANVRIVESGQELPLSNEQKNKIANGLNSWHSVDAPTWSDVSQMIGVPRNHLRGTAAAGIDGEPSVRPPINITDRAIRRSKIRPLVIWWEQASPEEQSLMTEIIVGDRAPNDSSSEFLSVGDALVNFSEDDLSKLETLKLPAGRAAYSRESLRSLTDRMKETGEDLHESRKAVFGVGDSWAPPTDPINAPLGNPSVNRITKEVGRWLGRVEEKWGVPDRIVIEHVRSSFISVAQAKDFERANERRRKVYDATRNRMAEEGIGDVETIRREQVLRFISVQRQNCKCLYCGETINYHSAQLDHIVPRKGIGGRSTQDNLVAVCDTCNRGKSNTPFRIWAERTTRPGVSVKEASDRVDHWVMPVGWGASTELRTLRKAVKARLIRTEADEPIDDRAMESVAWMARELAGRIRGHFAQITTGHENPPNVWVFRGRVTAEARRAAGVDKNFKMIGGYGKQRFDRRHHIVDAAIVALMQPRVAQVLSERLALRDEAQLLNVHRDWKNHHGSTPDLRVTYNRWLNNMNEAVRLLQDAIDSDTLVVRNLLRLTKNIGRLHEESIRKLERHRVGDALPAKLIDRAATPALFYALTQHPDYDTKLGLPESPRRGIRLHGTHLANHNEIEFFKTNSAALATQGGYVELGSTVHHARIYKYKKGKTFRYGMIRVFGADVSRMKGDIFSHPLRQGDISIRTANDGVRQALINGTAEYLGWLVPGDEIYLPNAALRASNASEFATEFPSVERWEVLSFESPMRMGLQPLLLSREDVPEGLAKAVTEVFKRGWLANVNKLFAMPGIRIIRRDALGHEREKSAANLPTSWAPQQE

SEQ ID NO: 1458 - protein, 1085 aa, unidentified
  REGION 1..1085: note = Description of Unknown: Cas Enzyme sequence
MRIRVGIDVGTNSVGCCALVVDEAGAPTNILSCLSLIHDSGIGEDGQKTASSRREQSGVARRARRLLRQRRKRLRQLDALLEKRGYPIVDPSAQKDPYLVWRVRAKLAQETLPEESRRYALSMALRHIARHRGWRNPYANVQSLLLPAPESEFIKAMRQRIMEKTGEILDESITPGQAMAETALTTSIPMRGPNGVLGKLHQTDNANEIRRICEKQGISAEECKELLLAVFASKSPRGSSLGRVASDPLPGQGGLKRAPKCDPEFQRFRIISIVANLRVTEQNKGSRPLSPDERERVVNFLLESTSEDLAWADIAELLGIRRQDLRGTATTTADGERASAQPPTDVTNRIMSGCSVKALRTWWKKADADRRSAMIGYLYESAEDSECADFLGSLTEKEQGKLDSLHLPAGRAAYSHDSLARLSERMLQTDDDLHAARMHVFGVDDAWRPPVEAIGAPVGNPSVDRTVKAVARFLKAVDNVWGYPESIQIEHVRDGFASERTARELDRENNRRFKQNQDTVTEIQKVYGVQGEVHRSDVMRYTTVTQQDCTCVYCGSTITYLTCQLDHIIPQAGIGSNNHRENLVAVCEPCNRSKSNLPFAVWAEKCDAPGVSVEEAVARVRKWRNIQPGRAQATRLKKLQKDVIARLRRTDEDPAIDTRSMESVAWMANELHQRVKSAYPSAKVAVYRGSITAGARRAAGIDSRVNLLGERGRKDRLDRRHHAVDAAVIAMMSPGIAKTLAERSNLRWSEWLSGKLETWKSFTGATPGARENFGAWRQHMLRLTELLNFAIAEDRIHVTENLRLRLGSGNAHDETVRPLILHRLGEGFTSAQVDRASSPALWCALTRELDFDFETGLPASENRVIHVHGKRLNADDTVSFFSKKSGDDSKERPFAAISVRGGFAEIGSTIHHARIYRINDEKPIYAMLRVFTQDLIPHRHFDLFSAPLPPQSISVRCAEPKMKDALSAGTATYLGWVVTGDELEVPMEGFTTGQIGEFHKEFPTITRWRIRGFFSEARLRLRPALLASEGLRDASDPVRKTLSIPGWVISVNGICSTHPTVVRRDSLGRARNSTNSGLPTSWTIE

SEQ ID NO: 1459 - protein, 1107 aa, unidentified
  REGION 1..1107: note = Description of Unknown: Cas Enzyme sequence
MPICIGIDVGERSVGFATVEYDDDGWPIEILNSVVHIHDGGMDPSTGKAPQSRLATAGIARRTRRLIRNKRKRLQLLDHILQQHGFPVPIDELPQTHEAWRARAQLINNLVPHPADRGELVSLAVRHVARHRGWRNPWWSVERLAQAPTPTDSFVQTLDMAETNYPGKAKNSRTMGELVSRIVGTGAPIRPTSKSLGNTVGALMATQVRQEDSLFELRLIFETQQVPDNVADSICAAVFFQTKPHIPRDRIGRCALQPDQLRAPLASLEFQQFRIRDAAANLRVGREKRRLTESEYDIVVEMLTHWRDDIRPRWRDIAEKLDISARDLVDSSLDGSGGTYAPSDRTSTAVEVKFKRNSTVGAWWTTASAAERSELISIITDLSSEDGDIFSDSLQEFLSQETVLDPLAGLNEALESGRAAYSQETLNKLNSIMRETRCDLHTARKVAFGVDDSWRPPLPNFNDSIEHPTVARVNTLVRRYLMNVVDKWGMPDRVIVEHVRGGFLGPSALAELKNEIRLNTFRRDGVANLLRVQGIEHPSRTEIKRNECVERQNCVCVYCGSTITLLTCELDHIVPRASGGSSRLDNLVAVCRSCNAAKGKQPFAVFANHAPNEAISVHEAQLRVKAWQRVGMTSKSFTRLKANVSQRLSLSADDETDERSLESTAYAAREMRARIETFLVEQGKRHEVSAGQVLVFSGAATSEARKAGGIDDRIRLRTMTRKSRFDRRHHAIDAVVLTSLNLAVARTLKERSWLQRDNQFTGKEPGWKEYRGTSAKDQSAFNAWRERIGALAELLEATIRLDNIPVVRQLRLAPRVGSVHADTVQPLAYKSIGDAFSQDEVLRLLDRSLYMRLQEIAEGGDLEFDERRSELQRWASERPVALFPTSAAYLPVRGGAVTIGGTIRFAQIYAWKTKDGFNFGMVRLYVGEFPRIGFGGPGNDFLTTTPPAHSQAMRTANSALRQRIQSGDARLIGWIAVDDEIEIEPTYFQTDGTKLGEFLTLFPEKHWLITGIAEPGKIGIAPSYLAYEGVVTAADMERGGARSEHETPAAVSEVLKANRIPMSVNVILGSPGCNVLRRTVLGRPRWTGDSLPTSWNVLAAAEEAFEK

SEQ ID NO: 1460 - protein, 910 aa, unidentified
  REGION 1..910: note = Description of Unknown: Cas Enzyme sequence
LPFTGLIRPTKKANATVDGPVVPKVLQVDTLAEARLILATQQVPEASAERICEAMMQAAAPSVPRERIGRCALVDGEVRATTSCLEFQEYRVRAAVANLRIDGNRLSDDQYDQVCDFLLSYRDDPAPKWRDIAELLGVSTRQLKRPTADDTESTSASFAPIDRTSRLIEAAFNKKSQLGAWWRAARGEDRAELVAFLADGAAADSEPASAAVVEFLASANDETQERLDKLEFGGGRAAYSREALRRLVARMRQDRCDVHDARIREFNLPADWAPPLPTFDDPIEHPTVARVNTIVRRFLMGVTSRWGVPDAVMVEHARSGFFGPTALAEHLREVRGHTARRDKAKERLASQGIQNPSNTDVRREEQIQRQNYQCLYCGTAIGMASSELDHIVPRAGGGGNRRDNLVAVCKPCNAGKSRTPFAVWASKHPNPGVSVAEAQARVDSWQALPGETRKQRDRLVRDVKHRLTLTTDDEDFGDRSMESTAYAAVLMRARIIPFLRSHGGTGDEVWAFAGAVTSEARRAGGVDTLLQLRDFTKKTRFDRRHHAVDAVIMTCLRPTIAETLRRRTDLQAEHRATGKYPEWRDYQGAQPGDVANFQAWLPRIGALAELLKASIEQDAIPVVRPLRLSPRVGSVHADTIQPLVPASLAGPLTREEILRVTDNRLYMLLLEEAQGQDLPADPERPTRLRHDPDVTFYPSNAPYLALRSGAAQIGSTIAFARIYAWQTKNGFDYGMIRMPVGEFGRIGFNRAGIDIFTEPLPAWSQAMRTANPQLVRRIDAGEAKQIGWLALRDEIELDAAALMSGNDKVSEFLRLIPERRWTVKGFFDPGRITISPSYLASEGLTEDMGEAIHIVVGAAQGGVPLAINRILSVPEAAVIRRTALGAPRWRADGLPSSWTPAEAAAAAFTP

SEQ ID NO: 1461 - protein, 1079 aa, unidentified
  REGION 1..1079: note = Description of Unknown: Cas Enzyme sequence
VSHHIWAFDIGSKSIGWAVLGADGDGKPTGEVIAANVVLHDGGILNENEGTTRRAVRGEKVRGRRRLKRRKRRLVRLREELEAFGFTKQPGWRDRDPWWARHRLASGPVQDPLQVRHLVAIALGHMARHRGWRNPWLPAPRPAETDTPEEIINLARELDAPATLGGVCWALIRQSGPTAVRNRNEVPEGQRHLREYVPKVHQEHIAAEIAEIWRIQREAHPDLFTDESRDALAEVVLEQERPGVPLERIGKSEIGDPDQYRAPTASPLFQQFRLLDRIANLRIKEPDGAKRRLNQEERQAVYDLLDSPEQVEWRDVAARLGIDEERLMGNPDREGTAGRPPYNQVLAALHNAKIPARDRKRLLAFWENASPDEREALVALAIADRTIEVDDPRTAERVAGELEAQDLFEVVETVGRALPAGRARYSRQALGDLNDQMAQGFDRYEAIGRTYGHVPTGLTTKWDEPVPHAGVEVSMREVRRLVRALEREFGPPVAIGVEIVRDALRTHEERLQHNRRIAREREAREAARRCLIEDFGIANPTREQIAKREHMDAQGNQCLYCGATQAGGFKFETAELDHIVPRASGGSTTFVNIAAVCRRCNQAKGRRPFALWCAEDGEAGAKRMEETLERVSRMAPERWSSSPAKPYIDPNTGRWVRSDKDRNLDKIRRRLKKKSLDKEWGESTDDLQATAYAARVVRERLQNRYPSIPVRVFQGGLTAALRRETDLVEAVGLGGEKNRDDRRHHAFDAVAVGLLTHTTWAARIRRRDEAYHNAKLGLIPESLLERERERAPIDDLLQAVERVKASAPPIFNAMIPVCPRRVRTTGQIHEDRIRPWVKRAIGEAWSKKDIASVRDEHVRTALLRALPARGGLAADPERVLTLADGTTLAADVEVDTARDPEKGTPTATWIPVRGGWAKSAEIHHARLVEVTWSEDGREQSKHALVVVCLADVYGAREPFKVPLSPTSIAVRSCHVLARALAVDQDARVKTLLSLTQGDVFIKNGEAYEITTFNSAADRAESRRPARYGGEPRGVKNPDGPKMVVASAGEFTAGKVKMLRRDHLGRPTPAVSDGDRLAGS

SEQ ID NO: 1462 - protein, 1090 aa, unidentified
  REGION 1..1090: note = Description of Unknown: Cas Enzyme sequence
MTQRHYRAGIDVGTNSIGFSLVEVDDDGYPTDLTNSVVVIHDSGVDPDAQDAGDSRRAVSGVARRARRLYKRAKKRLDRLDAYIESLGWPLIDLESYQDPRRAWSIRAALANEQITDSTVLHEYLSVAMVHIAHHRGWRNPYQRVESLLREQEPSSKLEGLRKRVENLIGRNLSEDLTAGQLINEALRVNPQTKLRGSSGLLGGTLLQSDYVIEIRKIQETQGLSRALVDELIRRVFDSVSPVGSARERVGKDALPGQQQKPRAEKAQPAFQVFRIVSVVANLRIGKGREQRILSKQEKDTVVDFLLHSSAPEQITWDAVAELLKIERPSLRGVARAGIDGENVSGRPPTDATTQVIRSLKIPTLQEWWEQADEIAQETFIDLRSNVGSDDLDPDSLQEITRLISAFSDDEREKLEEATFPMGRAVYSVDSLRRLTECMREDGIDLYEARRKEFGVSEDWEPPAEDIGAPVGNPSVDRVTKQVARWLSAVEKRWGVPDSINIENVRDGFSSEHVTREIMLQNKKSQERNERIVHEIHERRGIDGPVRRSDIIRYKVFSRQKGICLYCGEPLSIENFEVDHIVPRSGPSSTNKMHNLAAVCRTCNHQKSGMLFALWAENSDRDGVSLEGAINRVGMWLPDPGMSRKDFGRQKQETIRRLKRKQIDEPLDDRSMESVAWMANELRRRIDYHFNHEEKKTVVGVFRGSLTAEARRASGLEGKVKLIGGHGKTRFDRRHHAMDALTIALLRPSVAHTLVLRQNIRYAERLTQSPQTWKEFTGLTIADRQIWNHWLQEMDLATEYFNSRISADTIPVMQNLRLKLGNGAAHKAKIGKLEHVKLSDAMPVQSIDRASTPALWWVLTHQPDFDRESGLPADPSRRIVVNGVHYTGESAVDLFPKLVPAVKVRNGWASTSSSIHHVRIFKVDGKKPKYYQLRVFKTDLIPYAHEDLFTVQIPAKSISVRTALPALRKAIASGQARQVGWLVRGDELRLRATNFTKGKIADFFQDFPDMVSWRVTGFESTRQINLRPSLLALEGAPEQISPAVLEILNRSWRPTFSDLFTNGNPVIIRRNALGEPREASNSGLPLSMTL

SEQ ID NO: 1463 - protein, 1167 aa, unidentified
  REGION 1..1167: note = Description of Unknown: Cas Enzyme sequence
MPQLRYRIGIDVGLNSVGLAAIEIDDAGTPVRILCMESVIHDSGVDPSANKTAGTRRAVSGSARRMRRLIRRKRIRLRDLDNTLQDLGWPIIDLEAIKDPRFPWKARLELVSGPVDDHDRLLALLSVAVRHIARHRGWRNPYLSVDSLKQSSEPSRYLLTLAESVSRRLGQEVSPELTVAQIVDLAARTLPAKEAATFKIRGPEKKNNKTGTVSPSGLLESKIHQADNVRELRKIWDTQQLPGDLFDVVVNKVFQAKSPKMSLEDRQSGHSAANRLGLDPLPGMRSEPRAEKASLAFQRYRIVSLIANLRVRTERQERPLGASERRKITDFLFSSAGDVTWTEVSDLLSIDRHDLKGTASETADGERASARAPINVTEQRVRGAGIKELTEWWASVNEIDREALVELISNGAGSGADAESVARAEEFISSLPEEAVNKLENIRLPEGRAAYSAVSLRRLTDRMLTTVEDLHQARKSEFGVTDDWRPPADPIGLPVGNPAVDRVLTIVARWVTAAEREWGVPLSVNIESARDGLMSEKKAREIDRANNQRFGLNQQMRKDIAIHLAGHRDLISNSLDNSFDETADQDFRQLSMRDVDRWRAFKRQENKCLYCGVELNYPAFEMDHIVPRAGQGATNTQVNLAAVCRDCNHSKGKQAFAAWATSGVRPQVNLAEAIQRVNGFRFFGVDERDSRYRARFKKEMITRLKRTDLDEPIDTRSIEAVGWMANELRHRIDEHFRSHPAPADEPTTVGIFRGWITSEARKAAGIEGRMLLIGGHPGKTRLDRRHHSVDAATIAMLQPGAAQALVVRNNLRQTNRIDPNQGDDWKLYKGTNPALFERWTAQMEQLACLVQVQLDEDRVPVFEFLRLRPGSSSGHEDTIRQTQKIRLGDPLSVELIDRSATPQQWVALTRCPGFASSEGLPEDPNRRVRVKSQWFGADDSLEFFGTGAGCVAVRGGYAELGSSFHHARIYRCSVPLKSGKTKQFYAMMRVYQIDLLPHRGKSVDLFDVEIPPQAISRRATEPRLRNALDAGQAEYLGWVVPGDELLLDLSNQASGKIAAVLATFPDTTRWVINAFDQTAKIALKPRLLASEGLEEAAPDEVRKVLGGKGWIVSVDVLFGGCRPTIVRRDILGRVRLTSAAHLPVTWSVVGQPYAIRRVPSADHLPTI

SEQ ID NO: 1464 - protein, 1121 aa, unidentified
  REGION 1..1121: note = Description of Unknown: Cas Enzyme sequence
MLHRLTGPTARSHIETGQFSCSNPTIPWVWYVFLMPAHHLRVGIDVGTHSVGLATLRVDDQGTPIELLSALSLIHDSGIGEDGKKTASTRKEISGVARRARRLLRRRRKRLQQLDKVLLDLGFPIPDLGGQTDPYLVWRVRAQLVEETLPEELRGPAISMAVRHIARHRGWRNPYSKVESLLSPAEDSPFMEALRERIMTGPGEILDDDITPGQAMAQVALTHRITMRGPEGILGKLHQSDNANEIRKICDRQGISSDVCKQLLRAVFKAESPRGSAVSRVAPDPLPGQSSFRRAPKCDPEFQRFRIISIVANLRLSEATGKDRPLTADERRRVVTFLLNDSRDDLTWVDVAEKLGVSRQALRGTATLTADGERSAAQPPLNVTDQIMRKTKINALKTWWAEADAERQGAMVRYLYEGLEDSECAEIIAELPEEDQAKLDSLHLPAGRAAYSRESLTALSDHMLATTDDLHEARKQLFGVDDSWTPPAEPVGAPVGNPSVDRTLKAVARYLAAVENVWGKPKVIQVEHVRDGFASERAARERDRANNRRYEVNQRAIKEIQESYGVEGHVRPGDVMRYHAITLQDSACLYCGGTIGYRTSQLDHIVPQAGTGSNNHRENLVAVCERCNRSKSNTPFAVWAQTCGIPDVGVKEAIGRVRGWRNRPGGMSPGDLKRLKKEVIARLQRTQEDPEIDARSMESVAWMANELRHRIAAAYPDADVMVYRGAITAAARKAAGIDSRINLIGEKGRKDRIDRRHHAVDASVVALMERSAAKTLAERSSLRWAQRLTGQEETWKQYTGLTVGAREHFETWRNHMLRLTELFNERLAADEVHVVENLRLRLGSGNAHDDTIRKYDTPRLGDGLSVNQIDRASSPALWCALTREEDFDAENGLPARDDRLIRVHGQELTSNDRIELFSKKRSNDAKEKPFAAIAVRGGYAEIGSTIHHARIYRIEGKKPVYAMLRVFTHDLLSQRHGDLFSAVVPPQSISMRCAEPKLRQAIAAGNATYLGWVVVGDELEINVGSFTSGQIANFLDEYPGTTRWRIRGFFDERRLRLRPAYLASEGLVDPSAAVRKTLSIPGWLSAINQVAATHPRVIRRDALGRMRKSSRSGLPASWIIK

SEQ ID NO: 1465 - protein, 1093 aa, unidentified
  REGION 1..1093: note = Description of Unknown: Cas Enzyme sequence
MSAHHLRVGIDVGTHSVGLATLQVDDHGTPIELLSALSHIHDSGVGKEGKKDHDTRKKLSGIARRARRLLHHRRTQLQQLDEVLRDLGFPIPTPGEFLDLNEQTDPYRVWRVRARLVEEKLPEELRGPAISMAVRHIARHRGWRNPYSKVESLLSPAEESPFMKALRKRIMTKTGEVLDDDITPGQAMAQVALTHKIYMRGPEGILGKLHQSDNANEIRKICARQGISSDVCKQLLRAVFEAESPRGSAVSRVAPDPLPGQGSFRRAPKCDPEFQRFRIISIVANLRISETKGENRPLTVDERREVVAFLMEDSQADLTWVDVAEKLGVHRRDLRGTAVLTDDGERSAARPPFDATDRIMRQTKIRSLKTWWEKANSEQRGAMIRYLYEDLTDPECAEVIAELPEEDQAKLDSLHLPAGRAAYSQESLTALSDHMLTTTDDLHEARKRLFGVDDSWTPPAEAINAPVGNPSVDRTLKIVGRYLAAVESMWGTPDLIHVEHVRDGFTSERMAEERDKADRRRYDDNQKAIQKIRQDYGKEGYISRGDIVRHDALELQGSACLYCGTTIDRHTCQLDHIVPQAGPGSNNRRGNLVAVCERCNRSKSNTPFAVWAQTCGIPDVGVKEAIGRVRGWRKQTPNTSSEDLTRLKKEVIARLRRTQEDPEIDERSMESVAWMANELHHRIAAAYPETTVMVYRGSITAAARKAAGIDSRINLIGEKGRKDRLDRRHHAVDASVVALMEPSVAKTLAERSSLRGEQRLTGKEQTWKQYTGSTVGAREHFEMWRGHMLHLTELFNERLAEDKVYVTQNIRLRLSDGNAHTVNPSKLVSHRLGDGLTVQQIDRACTPALWCALTREKDFDGKNGLPAREDRLIRVHGQELTSNDHIKLFSKKRGNDTKEKPFGAITVRGGFVEIGPSIHHARIYRIEGKKPVYAMLRVFTHDLLSQRHGDLFSAVIPPQSISMRCAEPKLRKAITTGNATYLGWVVVGDELEINVDSFTSGQIASFLEEYPRTTRWRIRGFFNETQIRLRPAYLASEGLIEPSEAVRKTLSIPGWLPTINKVAETHPRVIRRDALGRVRKSSRSGLPTSWIIK

SEQ ID NO: 1466 - protein, 1095 aa, unidentified
  REGION 1..1095: note = Description of Unknown: Cas Enzyme sequence
MSAHHLRVGIDVGTHSVGLATLRVDEQGTPIELLSALSHIHDSGVGKEGREKHKTRKKVSGVARRAQRLLRNRRKRLQQLDEVLLDLGFPIPTPGEFLDPNEPADPYRVWRVRARLVEEQLPEELRAPAISMAVRHIARHRGWRNPYSKVESLLLPADESPFMKALRERIMTKTGEVLDDGITPGQAMTQVALTHAVKMRGPEGILGKLHQSDNANEIRKICDRQGISSDVCKQLLRAVFKADSPRGSAVSRVAPDPLPGQGSFRRAPKCDPEFQRFRIISIVANLRISEATGKNRPLTVDERRQVVAFLMKDSQADLTWVDVAEKLDVHRRDLRGTAVLTDDGERSAARPPIDATDRIMRQTKISSLKTWWEAADSERRGAMIRYLYEEPADLECAEIIAELPEKDQAKLDSLHLPAGRAAYSRESLTALSDHMLATTDDLHEARKQLFGVDDSWLPPVEAINAPVGNPSVDRTLKIVGRYLSAVESMWGTPEVIHVEHVRDGFTSERMADERDKANRSRYNDNQKAIEKIQHDYGKEGYISRGDIVRFHALKLQGSACLYCGTTIGYHTCQLDHIVPQAGPGSNNRRGNLVAVCERCNHSKSNTPFAVWAQKCGIPHVGVKEAISRVNGWVEHNHSTSSGDLTRLKKEVIARLRRTQKDPEIDERSMESVAWMANELHHRIAAAYPETTVMVYRGSITAAARKAAGIESRINLIGEKGRKDRIDRRHHAVDASVVALMEPSVAKTLAERSSLRGEQRLTGQEQTWKQYTGLTVGAQERFEMWRSRMLHLTELFNERLAEDKVYVTQNIRLRLSDGNAHTVNPSKLVSHRLGDGLTVQQIDRACTPALWCALTREKDFDEKNGLPAREDRVIRVHGHEIKSSDYIQVFSKRKKTDSDRDEDPFGAITVRGGFVEIGSSIHHARIYRIEDKKPSYAMLRVFTHDLLSKRHSDLFSVDIPPQSISMRCATTELRQAISEGRATYLGWIIAGDELHVPVETFTTHKIGSFLKDYPDTTHWRICGYDSETMLILKPRVLSAEGLNNSSNIAKYVIKDKGWRIAINKLVKVHPTVVRRDALGRPRYSSKSNLPISWTIE

SEQ ID NO: 1467 - protein, 1125 aa, unidentified
  REGION 1..1125: note = Description of Unknown: Cas Enzyme sequence
MLHRLAHQPAGLTARSHIETGQFPYSSLLISWVWYVFLMPAHHLRVGIDVGTHSVGLATLRVDDQGTPIELLSALSLIHDSGIGEDGKKTASTRKEISGVARRARRLLRRRRKRLQQLDKVLLDLGFPIPDLGGQTDPYLVWRVRAQLVEETLPEELRGPAISMAVRHIARHRGWRNPYSKVESLLSPAEDSPFMEALRKRIMTGPGEILDDHITPGQAMAQVALTHRITMRGPEGTLGKLHQSDNANEIRKICDRQGVSSDVCKQLLRAVFKAESPRGSAVSRVAPDPLPGQGSFRRAPKCDPEFQRFRIISIVANLRISETKGENRPLTADERRHVVTFLLEDPRDDLTWVDVAEKLRVPRQALRGTATLTADGERSAAQPPVNVTDQIMRKTKISALKTWWVEADAERRGAMVRYLYEGLEDSECAEVIAELPEEDQAKLDSLHLPAGRAAYSRESLTALSDRMLATTDDLHEARKQLFGVDDSWAPPAEPVGAPVGNPSVDRTLKAVARYLAAVENVWGKPEVIQVEHVRDGFASERAARERDRANNRRYEVNQRVIKEIQQSYGVEGHVRPGDVMRHHAITLQDSACLYCGGTIGYHTSQLDHIVPQAGTGSNNHRENLVAVCERCNRSKSNTPFAVWAQTCGIPDVGVKEAIGRVRGWRNRPGGMSSGELKRLKKEVIARLQRTQEDPEIDARSMESVAWMANELRHRIAAAYPDADVMVYRGAITAAARKAAGIDSRINLIGEKGRKDRIDRRHHAVDASVVALMERSAAKTLAERSSLRWAQRLTGQEETWKQYTGLTVGARERFETWRGHMLRLTELFNERLAADEVYVVENLRLRLGSGNAHDDTIRKYDTPRLGDGLSVNQIDRASSPALWCALTREEDFNGKNGLPAREDRLIRVHGQELTSNDHIKLFSKKRGNDAKEKPFGAIAVRGGYAEIGSTIHHARIYRIEGKNPVYAMLRVFTHDLLSQRHGDLFSAVVPPQSISMRCAEPKLRQAIAAGNATYLGWAVVGDELEIDIDSFTSGQIASFLEEYPRTTRWRIRGFFNETQIRLRPAYLASEGLIEPSEAVRKTLSIPGWLPTINKVAETHPRVIRRDALGRVRKSSRSGLPTSWIIK

SEQ ID NO: 1468 - protein, 1119 aa, unidentified
  REGION 1..1119: note = Description of Unknown: Cas Enzyme sequence
MTNKVRIGLDIGIGSIGWAVITGEQKNSRIENFGVRVFDSGELENGKSRKSQVRRGFRGVRRLIRRRYFRKELLKAHLQNIGLLNEKVMREYERIKDQNVHVLKAKGVSEELSPAELYKCLIHTCNHRGYRDFYEDDETLDMEDETSVNRAAASEFEKMFKSSGCETVSLFICKHFVNEAGQIEFRNRDSRKDKYLLIRRSLLRDELRIILDKQAEYHSALTPHNIETIDKIIFSQRNFEDGPGNPDDPFRRYTGFLESLGSCPFCTGDRRGFRGTVIADVYAVVNTLSQYRFVDKETGEYCLKPDIARQLIDFLLKNASLTLSDVKRILKANNFELLKSENSDDKALTKAVRFLKLAKSSIENGGENWEDWISEEQFDIEKPSKLHKIGELLSKYQTPSYRSSKFKELGFMTPQLIKAFSGKKISGTAGAGYRYMCDAIHAFLDGDIYGNFQANKLKQISEEKNISKRSVKLLPEHIDDEDIKQNPVVFRAINETRKVLNAIIELYGSPEVIVVEVASELNSSFLERNETAKRQKENERKNDEAKRVISELLGISVEEVTGNMLDKYKLYHEQQGKCLYSGRPLGDLTEVLKDKDKRYEVDHIIPYSLILDNTLNNKALVWSNENQTKGQRTPLMYLGAEKAAAFKARVNEMRTRKENCISDRKYRYLMLESIYGTEAEDLLSQWKSRNINDTRAITKYIVSLLSKNLVFSGTSGQPVFGVKGALTSKFRRIWLGNTVWGDSDKDRTTYLSHAVDAVVLANLTPPYIEIASDNIKLQQIYRKYKSQSAAEYQDYLEKCLDKMQKYGFSREYTLHLLTKTQRVPSYLPNIASEVEIRFDDEDEERFKTNVVKFYGDALESFIVKPQMPIASIKQERKFRGEIADANPIRVVEINSEPHKIARKDIKSITKKDIDKLYTTDTTLVATLNRIFEGKDDKYTVEKYLKENNLTTFKTDSGQPVHKVSLDAGKISNFFKKVISDSNYTMLGGLNYYCVEVYKDKKGNTKVWGIRYVDIRRKDKKLHVIKERMPEDYCSHVMYLFKNDYIRIYRGGEVRFEGYYKHVDNINKKRLVFSYGNYTNTRDIEIAQKDEFRKVYIDILGRLGGEVKCSAPLLSISEKE

SEQ ID NO: 1469 - protein, 1345 aa, unidentified
  REGION 1..1345: note = Description of Unknown: Cas Enzyme sequence
MPAKGNFGEYYLGLDIGTDSVGWAVTDKNYEILRFRGKTLWGIHLFDPGQTAKGRRKQRIARRRLDRRKHRIALLQSLFSEEISKVDFTFFNRIRDNRLIIEDREHKCHDSLFNDPAFKDKDFHKKYPTIYHLRNELMTSPDKPDIRLLYLACHHIIKYRGHFLFSTGDGDIPRFREVYMNAVDAMNDECRTDISGDLYETVRQILHSNDGVKEKKNKLYELIGEPSKSAKAFMDLLAGSSTTIGKLFVDVEEDIKKAKLALDGTDFEEEREKLENILRPEQMDVLNLAKAAYDSAKLEKLIGTHGSLSKSKIAQFEQHKKDLEMLKSILRKNRPVYYEVFKSTSENNYASYVRAHRKNRSEVESCTQSDFCKYLDGILEDVLEDQTFITEGEKMDMRDRIKAGEFMPKQVSKNNSMFPNSLHCSELRKILENASRHYSFLLQKDESGDSVKDKIEKLCTFRIPYYVGPLVPREQSKRAWFVRNEEGEITPWNFERKVNLEASGEKFIEVLTNKCTYLPTEDVIPMNSTLYSRYMLYNEINNIKINKERIQLELKKQMVAELFESDSAENVTQKRLESWLRAKGLCSKENKITLDGADFPIKASLRAELRLRPIIGDVRNNRRLAEDIIRTITIFGGDRSMLKKKLSTDHKGKLSEEQIDSLSRLKFSGWGKFSEKFLTRIRAMVEGEEMCILEALENTNLNLMELLGDEYGFTKEIQKLKEPCIADGRIMYDLMDDLHVSPPVKRGIWRAMSIIKDIVNVTGHPPAKVFVETTREDMDNKKRTSSRKESLLALYKSCKNQERDWIAELKDMGNGRLRSNDLYSYYCQQGKCMYCGNPIDINDLSNNNIYDLDHIYPRSKKMDDSMSNNLVLVHKSCNMEKGDKYPIPEEWQNRMIDFWSYLKDGKFITDEKYKRLTRISELTEDELAGFINRQLVETSQTVKAVIELMKRIFGDNTDVVYVKANAISDFRNGNNGYIRESDDDPGLKFIKCRSVNDYHHAKDAYLNIVVGNAYDVKFTKDYKKVIRDGEPYSLRLERMLASDIERGGMCAWKAGNDGTIKTVSKYMRRNNILFTKFAHVDNGALFKITPQPRPSDNKQDDSFLPLKKELPVNKYGGYTGIEYSYFIVLEYTNGKKRMKKLEGVPTYIAVQKSESKILEYLVSKGYSEPKIVMNKIRKGTTFEIDKFRLFIAGRTDFTCGKQLMLSDPSYAYCKELLKYTSALTENKNTKPESFRALNKESNISLFDELVHKLETSYDTPFLENEKRQLCEARDRFLVSEISSQLKTLDHMLRIFHCNPARADLSDIGCKATGRILISDPIKLGAKIINQSPSGIFETETDLKKI

SEQ ID NO: 1470 - protein, 116 aa, unidentified
  REGION 1..116: note = Description of Unknown: Cas Enzyme sequence
LNQTISEIVNRKPRFICIEDLNVSGMMKNRHLSKAVQVQGFFWFKKQLEYRCSDKGIQLIVADRFYPSSKLCSCCGNIKKDLKLSDRVYRCECGNMIDRDFQASINLKTYGEKFAS

SEQ ID NO: 1471 - protein, 1344 aa, unidentified
  REGION 1..1344: note = Description of Unknown: Cas Enzyme sequence
MKMGGNMVQDYYLGLDIGTGSLGWAVTDSNYQILKKHGKMLWGVRLFESAKTAEERRTFRTARRCLDRKNWRIKILQELFAEEISNTDTGFYLRMKESKYYPEDKLDSEGKCPELPYALFVDSDYTDKDFHKQFPTIYLRKWLMETEETPDIRLVYLAIHHMMKHRGHFLLAGDISQIKEFDNTFKQFVKNLQIEELDWSIELDGEKIKRVENILKNRHITRTDKKTRLIKVLFAKSSCEKAILTLISGGTAKLSDIFGDKELDKAERTKVCFSDNGYDDYVTELESELGEQYYIIESAKSVYDWSMLVEILGDSSSISEAKVKIYEKHKKDLMYLKHVVREYLTPEEYQEIFVISDGKVSNYCSYIGMTKKNGKKIDLQGKKCSRQDFYDFLKKNVLKKISDLATVEYIEKEMACDTFLPKQVDSGNCVIPYQIHSYELKIILQKLSKKIPFIKENAEKIIELFEFRVPYYVGPLNNIDAGKDSKFTWAVRKSGEKIYPWNFEQVIDIEASAERFIRRMTNKCTYLVGEDVLPKDSLLYSKFMVLNELNNLKLNGIGIDLKLKQKLYEDLFCRYRKVTQKKLKKYLVIEGITDKNVEITGIDNDFKASLTAYHDFKEKLTDVHLSQNDKENIVLNIVLFGDDKKLLKRRLKKLYPDFTENQLKGLCSLNYSGWGRLSKTFLENIIIPAPETGEVWNIITALWETNENLNQLLSNKYTFMEEVNRYNEGEKKTDISYKTVEELYVSPAVKRQIWQTLKVVREICKVMGCEPKRVFIEMAREKQESKRTESRKSRLIDLYKSCKNEERNWISELESWSDQQYRSDKLYLYYTQKGKCMYSGEEIHIEDLWDNTKYDIDHIYPQSKTIDDSLDNRVLVKKIENETKSDIYPVKQDIYEKRKDFWNSLLQGGFISKEKYNRLTRRDKFTEDELAGFIERQIVETRQSTKAVAEILKQALNDSKIIYVKAATVTRFRQDFEFIKVREMNDLHHAKDAYLNVIVGNTYFVKFTQNAVTYIKNDHERSYNLKKLFKSKYDIKRNGETAWKAGENGTIVTVKKVMDKNNILVTRKAYEVNGGLFDRQIMKKGKGQIPIKGSDGRLADIEKYGGYNKATGAYFMLIKSKDKKGKEIRTLEFIPVYLKKDLQIEDNAIQYLIQEKGLKEPEILLKKVKIDTLFKVDGFKMWLSGRTGGQVIFKGAIQLILEKNDVETLKKVLKFVQRKKENKNINLVSADKVTEENLLHLYDAFLDKLKNSIYNKRLSAQLKTLGEKRENFVKLCIEDKCIVLGEILHLFQCQSGSANLKSIGGPGNAGILLMNNNITGCNRISIINQSVTGIFEKEIDLLAL

SEQ ID NO: 1472 - protein, 1258 aa, unidentified
  REGION 1..1258: note = Description of Unknown: Cas Enzyme sequence
LENNKKYILGLDLGVASIGWAAMEINEEGEPIKLLDANSVIFTSLDNDNGKLYNVERREKRGSRRVKRRRVNRIKTIKKFIIDNNILKEIELKNLFKGTLEDIYSIRLKGLKEQLSNFEIARLMIYYAKNRGFKSNKKSEDNLIKKMDLKKETKEENNEKKLKLAIAKSIKYIEEGGLSPVEVINKIREENNILKFRNESGVYKFGFTRKQIETEIREIFMNQNILTNKIVEEYLKIWGSQRDFSDGPGGDSEYKVDYRDISGKCIYTGEIRAVKASPSSEIFVLLQKLNDIRYYEEVEGNYKNEYKKLSVDNIKNILLKAQNGKKINYELLSKELNGQNIKFKDLPDLPKSKWKEYREKIQDIEEFNKKIFNERMKIEILKDGLKNLKKLKVEFKNNGISNEKIEELGGIDFLDKVAELLTYSKTDNKLIKYIENDDRYKLLSNTDIIEAMKNMSAYSGNMNLSLTAIKKLNSKMLEGKDYYESRKDLGYFNDKEVYWEKFPTISEIEDAFNTSITNVNVKHVLVQLRKLYNALLEKFGKPSKVHIELAREMSKDFSERKKIKDKQLERYNEKQIAKFELFSENKDIINKNDLSNESFLRFNLWKEQDYKCIYSGKDIPREKVLSFELEVDHILPYSRTRNNSYFNKVLVYKEENQNKKERTPFEWLGKDELKWEEFKNRIENLKITEIKKRNLLRKDSIEVEGFLERELHATSYVSRLSYTIFDKMIDPSEKYLVNEDGSIKEERYNDNVVAYNGSITSQLRKSYGLNKFTHNLENSNLIRDVNYRLNDIKIEINDKDNKYTLIFEIYDEIFRIYSEIKYTTNYNKKDKMFKTNKDESMYRFIVKLSENEKFYSEFKDIVFNWKLEKISKNDINSLNIKFENELLEDEVIDDNVKAVIWGLLSDIKNRVNIKNRDNHLHHALDATLLTIMNKKMQNKLLKYNQLLMKKSNKDEKLEDEINKLLIDGVVEEKESDGLKFNIYNKEIKLGLKYPYSEFENDILKTIFDKINGKLPYHVPVKNTKGALHAETILGESKGKITKRISISKLKLKKGKIEEEIFDKEGSQKEVYEVLFKWLKDKKSYTPILKNGNIIKKVKIVVSDKVIAIGNKRYVEMGQTTTKILVFRKKDKKGESKLYFSSLGRFRYNQMLKGEDINISLFPNEEKSEIKYSELKNKGYEKYLEIKPHNCYKIKFKDNREVKCKITGYTSGLLEIKSIIGDGLDLIKNGIERTKDDRFRPNVNKIDSIEELKYDILGD

SEQ ID NO: 1473 - protein, 1360 aa, unidentified
  REGION 1..1360: note = Description of Unknown: Cas Enzyme sequence
MKYYIGLDMGTSSLGWAVTDDKYRLLRKKGKDMWGVRLFDEADTAAARRTNRVAKRRRNREKARIGYLKELFATEIEKIDSGFYQRLDDSKFWKEDKTVQQKFALFADTGYTDVDYYKEYPTIFHLRKKLLESTEPQDVRLVYLAILNIYKHRGHFLNANLDENGNDDFADIYANFVKMAKDVVDIDFSQDISDNWLRETLSSSELSKTGKHSAIIEHYGIKKSAEKKKVEMLKLICGLKGVLSKIFEDTEWEDEDKKFSISYRDSNYDETSQKAEELLSESAYELFCTMKQMHDWSLLANIMKGEDGEYKYLSLARVAAYEKHQKDLKILKKLYKDNDLKKYNEMFRIMNQSNYSGYVGSVNSDKDKRRRGAQCSRDDLFKKIREDIKDFAETAEKNYVLEEIGKENFLPKQLTASNGVIPNQIHKKELKKILENAENYLPFLKEKDESNLTVSERIVKMFEFQIPYYIGPISPIVNGDMKYSKNVWSVRKEAGKVYPWNFEQKIDTEESAQRFISRMVKHCTYIGGEEVLPKNSLLYEKFMVLNELNNLRINGERISVKLKQDIYEYLLKKEKKVTKSKLIEFLQTHGEVEPQDTPEISGIDDGFTNKRANYCKFCRLFGVDTLTYEQEKIAEQIIFWSTVYGDTKKFVKKKIQDNYGDVLSDKQIAQAAGYKFKDWGRLSKELLKVEGIDKSTGEESTVIQKMWSDNYNLMELIESDNFTYKQNIEERAKVIDKTLSEIVYEDLDELYISAPVRRMTWQTILVLKEITEVMGEAPARVFVEMARDPNAEKKRTESRKNKFLALYKNCKEEERELYNQINKRDEADFRSKKLYLYYTQKGRCMYSGERIDLDDLFNDNLYDIDHIYPRHFVKDDSIDNNLVLVKKEINAHKSDGYPLADGIQKKCRVFWNELKSGGFITAEKYERLTRTFEFTEDERVSFINRQLVETRQGTKAITDLFKKTFPQADIVYVKAPNVSAFRQKYKLLKCRNVNDFHHAQDAYLNIVVGNVYHVKFTKNPYNFIREYKKAPEKNPYHMDKIFNYPVVRNDEVAWQTKNDESITMVKSMMKKNTPLVTRRNFEVHGALENKLGIKSAQLAKKANGVGYIGVKTSDARLQNVCRYGGVTDIKGAYFCLVEHTQKKKRIRTIEPVPLYLKHQLDTNEKLEKYFAETYGYENPNVRIEKIKVYSLIKVNGFYMYLTGRTGAQLAVCNAVQMILPWKWMLYVKEMTKAIGAEFTDEYMEKTGTISKSKNRQLYDLLCEKHLNCIYKLRPNPVGENLIIGKDKFNKLSILEQIYVLLQILQLSQLINQGANLELIGLAKKAGTTKISKNISNCNEFKLINQSITGLYENEVDLLTI

SEQ ID NO: 1474 - protein, 1318 aa, unidentified
  REGION 1..1318: note = Description of Unknown: Cas Enzyme sequence
MQQSGRDYYIGADIGTDSVGWAVTDTEYRLKKFKGNAMWGVRLLDESNTAEERRGFRTAVRRSKRKRDRIEWLQSLFAEEIAKVDVSFFQRLKESNLYLEDKSAAVPYAVFADEGFTDKDYHRLYPTIYHLRKDLIENGDPHDVRLVYLALHHLIKHRGHFLFESLSAEEVNSFEIVLESLNETLSDELGFCLESEDISAFGEALKSKQLNKTAKYNRFLALCDVNKKEESQKAEAIALLSGKIGKLSVLFADPSIDAEEVRKAELGGNYEEKSAEYQSLLGEQFIVIEKLKAVYDWAVLADILDGERYISCAKVKSYEKHRSDLILLKKYVKERCPEKYNEIFKRSSDKLDNYTAYSGMVKKNGRTGVLQNKCTQTDFCSYLKKQFKNLSHDGYEKMFSEIENETFMPKQHIKDNSVIPMQVHRMELVAILDNAKQYLGFLNQVDENGKSVADKIVDIFSFRIPYYVGPLNPHSDKAWLERREGKIAPWNFEKIVDVDRSAENFITNLTSKCSYLPQKDVLPKNSILYCRFMVLNELNNLRIDGEKISVELKQSIFNDLFLKRKKVTQNALKKYMTSLGYRDIEITGIDGDFKANMKPYLDLEGYGLTADEMEHMIAAITIFSDDKKLLRKRLRNELGNKLSKEDIVKISRLSYSGWGRLSKEFLTEIMGVNPETGELMNMITALWATNDNLMILLGSKYNFAESLAAALKGDEEKSMREIVKSMYLSPKVKRPVYQTLRIMQEIVKTQKKAPKKIFIEVTRYQGVKNKRTVSRKAQLLELYKSCKKDAAELYAALEGTDEEKLRSDKLFLYYTQMGRCMYTGEQIDLDSLFDSNVYDIDHIFPQSKIKDDSLDNRVLAKKTANAEKGNIYPISDKIRHKQYGYWKMLLDKGLIRKKKFERLTRAYGFSDDELSDFISRQVVETGQATKAVAQVLKQLYPDTDVVYVKASLASDFRHKYDMLKCREVNDLHHAKDAYLNIVVGNVYDVRFTKSRANFIKDLQRGTVSLNQMFTYDTKGAWIAQDNESIEIVKRMMRKSKILLTRFSYIKSGTLFDLNPLKKGKGQVPRKGAGPLSDIQKYGGYNNAQTAYFTLIQYHDKKANAVKAIIPIEMVNRSEFEHDPSRYLNNHLGLNNATVLLPVVKVGTCVELNGFRMHIKGKMNNGAYIIYSSAMELILDYADDRYIKDIGKYLDSLSKRVIPAKHTLNPEDNGKLYDALSSKMTDTILRVEYEALGKSLKDRREAFCALPIENQCKMLSEIIKILKCNSVEGDLKGIGIKSTGKLYTNGKISNIKGVKSYKIINQSITGLYENSYIVI

SEQ ID NO: 1475 - protein, 1396 aa, unidentified
  REGION 1..1396: note = Description of Unknown: Cas Enzyme sequence
MDSSKQGLRRYHLGLDIGTNSIGWTAIDDHFSLLRVKGKNAIGVRTFKEGETAADRRGFRTARRRLSRRRWRLQFLDEFFAPYLAEVDPNFLARLKQSDISAKDPAKNQEFMGKLLFPDQEAASDGNGYPTLIQMRKEMPAEKAADFPVFNIYQLRYALMNEKRKFDLREIYLAVHHIVKYRGNFLNNTSVDKFKADQIDFNKSFETLNDLFRQVQQIAPFQIDLTKVDELGKLLLDTKQKKLDRQKAAAKLLPLIEDGTDKEIVKAHQQTAREISKLILGYKAKAGLILQNNLDQTLDMSTENSDDQLMQIAEELDDYQMELINQLSLLYSQIMLNEIVPNGETVSASMLNRYYKHRRQLKELKTYGAARDKKIREQLDHLYAEYIGQVPKDSKFDFTKDLKKLMDKSDLGQKIKGEIEAGDYLPKQRTSANGVIPHQMHQQELDQIIENQKEYYPWLAEPNPVEKNIKNAKYKLDQLVSFRVPYYVGPMITLADQQKTSKASFAWAVRKETGKITPWNFDEKIDREKSANNFIKRMTNKDTYLLSEDVLPASSLLYQKFTVLNELNNIRVNGRKLQPALKQAIYTDLFQKRKTVNLKALTNFLTVHEPTLTKPKIEGLANGRSFNSSLGTYIDMSKILGDRVDDLNYRDDIEKIIEWSTVFEDSEIYGVKLQEIQWLTNEQREKLVRKRYQGWGRLSKKLLTGITDENGQRIIDLMWDTNKNFMQIVHQPVFEEQITELNQQLLQDADKAPLEVVDDILADAYTSPQNKKAIRQVVKVVADVVKAVGNAPASISIEFARNEDRNKELKNSRRRSIEKLYHETAEKLVKQTNLLEELGNVKDLNDRYYLYFTQAGRDMYDGTPINIDEISTHYEIDHILPQSFLKDNSLDNRVLVKKSENAAKSDRVPAKLYGAKMRAFWKQLKESQLISNRKYLNLMTDPEQVDKYQMQGFVHRQLVETRQIIKLAANIFGSLYPDSAVIETRAELTKQLREKFSLYKVRDVNDYHHAVDAYLTAFAGHYLYQRYPKLRPMFVYGDYAKIYADDLKRLRSVNLFHDLEKDQYNSGTAVNPETKEKIVDVDWLSDYVSKIQHFKYMLISKAIYTQRGQLYGATILPAAQVDKISAPIGIKNDKPVDIYGAYTNEVAAYMAIVRVNGKKPKYKVVSVPVRMLQRLKMAEQEGHEQYMQTLHDILSRNFTSLKKNRKTGLKEAVVKDFDVLVPCVRYNQLVIDGDVKFTLGSAAYQHNAKQLVLSDHSLETLANNFEYVRKHPDEADERMTMLYDDILDQVNHYFTLYDKNKFREKLNAGRDKYLKLPTFSQFENNKKTAIGKSEAIINILRGLHANATITNLKCLGMSTPFGQLQSQSGIELSENAKLVYQSPTGLFSREVLLKDL

SEQ ID NO: 1476 - protein, 1369 aa, unidentified
  REGION 1..1369: note = Description of Unknown: Cas Enzyme sequence
MEKQEYYLGLDMGTSSVGWAVTNTKYELLRKKGKDMWGIREFDEANSAAERRTHRVDRRRRQRNVVRLGLLKSYFSEEIAKIDPNFFIRMDNSKYFLEDKDERVRTKNGIFDDDNYNDTNYYKDYPTIFHLRKALLDIDNTGAKFDARLVYLALTNMFKHRGHFLLNAEGDVLNTEQVDLVYQEILDRLENEYEIIIEHKPIQQVTDILGSTDIGRKKKHEELQKLFEVAKKDKRANELLKCLCGLSVNAKLIFDENAEEKVTLCFNDFSYTDKISELMEQLTEEEYALIEQLKSIYDYAVLVGTLKGYDYLSCARVKLYEKHKKDLKLLKALYRKYKTEEEYNKMFRSNIDGTYSAYVNSLNSEDAIFKSDEVVECGKYRRNMKERKSEHIYSTIKKAFKDITDDKDVSFVLEQIEKEQFLPKQLTGANGVIPNQVHKKEMERILKNAENYLPFLKEKDESELTVSERIIQLFSFQLPYYVGPIGENSKTGWVVRKEGGKVLPWNINDKIDMSATSEAFIGNLIRTCTYIHDEKVMPKASLAYERYCVLNEINNLCIDGERIDTKLKQQIYKDCFMKGKRVTKKQLCSYLAAQNAIHSEEQLTGIDKNINNSLSSYGKMYAIFGERLKEDAILAAAEDIIYWGTIFGDSKKMLKQRLKKYVEEGIIDENQLKRILGYKFKDWGRFSKAILTLSGCDKSTGEIITLGQAMWEYSLNFMELINSEEFTFKEELEKHTTDAMKSLSEFTYEDLEDSYFSVPVKRMIWQTLLVVREIEKVMGYAPKRIFVEMTRTEEEKGDNGRKESRGNQLLELYKSIKNTESHNWKEEIATADKDGKLRSKKLFLYYMQMGRDMYTGEEIDLGRLYDDNLYDIDHIYPRHYVKDDSIMNNLVLVNKRANQDIKKDFYPIPEQIKANSKVRELWDTLHKQKLITDEKYARLSANTAFTEKQLGDFIARQLVETGQGTKGVADLLEQLFKDTDIVYAKATNVSDFRRDNGLLKSRLINDFHHAQDAYLNIVVGNVYYTKFTRNPWNFIRKDYEKDKEKNRYNLARMFDWNVVRGSEIAWIAGRKDEKGTIATVRKMMQKNTPLMTRMNFEQHGAIANATLYSAKKAKVENYIPLKTSDERMKDVTKYGGFTSATIAYYFIVHHKEGKKENVSIEGLPLHCKTKVEQDANGLEKYCEEVLGYSEVNILRRKLKIQSLLEFNGYQVHLSGKTGDRLILRNAMNLCLPAKWVTYIKKLEKAVNVQIFEEVITSGENIKLYDILTDKHANTVYAKRPNAYGQKLLADRKTFVALQLKQQCEALLQMLQLTKIGSTETNLLLIGESEHSGKILISKNLKTSDRPAIISQSATGLYEKKEWIFDDKVK

SEQ ID NO: 1477 - protein, 1365 aa, unidentified
  REGION 1..1365: note = Description of Unknown: Cas Enzyme sequence
LKNENYNIGLDIGTSSIGFAVTDEFNKLARVKGKNYIGVRLFEEGETAAERRQFRTTRRRLGRRKWRLGLLEEIFAPYIAKADPYFLARLKSSNISPKDTNKKFIGSILFPNETDTAFYAKYPTIYHLRKALMTEDKKFDIREIYLAIHHIVKYRGNFLVSTSISNFKQESVDFTADVSELNESFMQIHTESKFEIDTAKVQEISQLLLDNKITRMDRQKQVANVLAKNSGDKEADKINKKIATEFCKAVLGNKAKFNVILGEDAVDSDWSFKMDDENSDEEIEILMGQTNGQQQNVLRIIHQWYSQITLNGIVPDGQMISESMIDKYELHRKHLLLLKQQIKVTKDKKKAQQLHEAYEQYVHGTGAKKKLTQDDFYSKVTKNLETSDFSDEIKKQINAETFMPKQRTSANGVIPHQLHQQELDKIIEKQAKYYPFLAELNPDTKRQNIAKYKLDELIAFKIPYYVGPLITTEDQKKTSGKSFAWMVRKEPGKITPWNFDQKVDKMASADQFIRRMTTKDSYLITEDVLPAESLIYQKYKVLNELNMIRVNGNKLTKHDKQNIYQQVFEKYKTVNVKKIQNYFLTDGRYQHAPKITGLSDDNKFNSNLSTYIDFKKIFQDVVDDPQKQKDFERIIEWSTIFEDRHIYEVKLKEISWLNDEQRKELKKKRHQGWGRLSAKLLTGIFDENGYSIMDQLWNTQKNFMQIQAEEGFNKKIQAENSKHLEKNDFEDILEDAYTSPQNKKAIRQVIKVVEDIQKAMGTAPQKISIEFTRSADKNPRRSIERQRQLEEIYYNDAKEIVSEGMQDNLQNFTDNKQTLTDKYFLYFTQLGIDMYTGKKINIDEIGNYQIDHILPQAFIKDDSIDNKVLVSSAINNGKSDNVPLSMYASVRIKSEVQNKWKNFAEHGLISQRKLNNLMTDPESIDKYKARGFIKRQLVETSQVIRLVAEILNEKYQGETEIIEVRAKMNSQLRKDFDLLKNRNVNDYHHALDAYLTTFIGNYLYRRYPKLRSYFTYGHFKKIDDAKLKQFNFLHDIENDKDPKYVNDNGELLWDREKDIAYFKKIYNFKYMLVSHEVSTRQGAMFKQTIFPAAADAKSKLIPIKNDKPTAIYGGYTNNNDAYLAIIKLAKTGQFKVVGVPQRAIVKLKQAYDKETGDYSNVLYKVLEPKFVKKKVNRKTGEITYQVEKFKIVVPKVPYRQLVIDGDQKFMLGSSTYKYNAKQLVLSENAIKILDKKSFDQSGYKSSDLDTVYDEILSQVDRYFSMYDKNKFREGLHNGKKYFQRLPMIDNVEKGKIKENGKFKLLNEILIGLHANPSFGNLKSLGISTPFGMMQFASGISLSENAILCYQSPTGIFERRVALKDL

SEQ ID NO: 1478 - protein, 1099 aa, unidentified
  REGION 1..1099: note = Description of Unknown: Cas Enzyme sequence
MMMHSIKFPWRLGLDLGTNSLGWCALALDGEGRPWRIIVMGSRVFGDGRDAKSGASLAIDRRTARAMRRRRDRFKQRRAALLKHLVTDGLFPNDEVERKALERLDPYELRARALREPLPLHHIGRAFFHLDQRRGFKSNRKTDRDSNDEAGKIAAGIDRLRHAIVAAGAETFGEFLYLRRKPALDSAGEGRHNVIPSVRTRLRPETGEGAKGDGYDFYPGRDLIEEEFEAIWDAQAPHCPDRLIPEVRDRLHEIIFHQRPLKRPKIGKCTLAPDEERLPKAHPLFQRRRLLEEVNALMIVLPGQPGAKLTKDQRDLLLMELSGKAKVKFESLRRKLKLDPDARFNKESENRKELAGDEIRAVLGDKKRFGNRWAFISTEQQWSIIERLRDEEDDKALRLWLRETHDLDDAQAKAVASVRLPDGYGRFGLTATRALIEELEAEVIVYSEAAKRAGYHHSDFRTEKIFEDGRGNPALPYYGVPLERHIMPGTGEPSDPEEMRIGRVTNPTVHIGLNQLRRAVNALIRAYGPPADIAVELARELKTSEEQKAEYNRENAKNKLEAERRSKKLIELGQADSGANRARLKLWEELDRDNVIDRRCVYSGQQISAKMLFSDAVEIDHILPFSATLDDSNANKILCLREANREKRKRSPFEAWGHTPQWDEIAARAAKLPKAKRWRFEPNALQTFEEKGGFEARQLVDTQYLSRLAREYLATLYPGEGEGSSHVWVSPGRLTEMARRKLGLNDLLPDHNFGGGADQPKNRLDHRHHAIDAAVIAIIDRSMLQAIARASGLEGEEGRERVIIPPPWEGFRDDLRVAVNQIIVSHRPDHGTVSKVGLEKGKDQTAGQLHNDTAYGLTGQTDAKGNSVVVHRTPLTSLKPADLEDDPNKGVRDPVLKAALRDFTKGKDGKAFEEALRAFPELGSLDYRGIRRVRVVEPLNVIPIHDRNGRAYKGYKGDSNYRYDVWEMPDGKWQAEVVSMFDAHQPDRTSSIRAGCPTARRVLSLHQNDFVAIGQDGGRRLMRVVKFGQNGQITLVEPQEAGDLKRRDARPNEEDPFKYTAPTAGGLKKLQARQVRVDEIGRVLDPGFPPRKARRKVPG

SEQ ID NO: 1479 - protein, 1092 aa, unidentified
  REGION 1..1092: note = Description of Unknown: Cas Enzyme sequence
MTASTNPSPLDLAFDIGHSSIGWAVLATPDAAPPAVLGCGSVIFEKDSALANSRRLHRSQRRHVRATRQRIARMEKLLVHLGVFTADELRLKHRASGGSATPWLLAARVLASDGAQTLTWPELWDVLRWYAHNRGYEEITGETSDETEESDEKKQDTEKVENAKAALAQFGKNSMAETICAWLGQDPLGPRTSTTENYKAKNCAFERAFVDAEVTRLLASHLGKLPGMTEALVAALILDARAIAVPNIRLPRRYQGSLLFGRLATRYHNRIIGHCPISGEKIPNKNCSEFLRYRWAMQLANLRVADSADTPLRPLTVAERKILHDAMMHEGALTPGELKKLVAALPGRARDNLEQFFLHPDAKEGLVLDPIQKLIAGDSRAVAVWPHLPERLQKRARGRWRRGKATTLAKLRDEAAKLGHDCTAFDAAVDALCAPPKKPSKKTLPPTRDELLNAPLDARRELAKLSGRAPYARPLLAKAFDEVMAGRDPKATGGSLEETDDVRRRREARPLPQQTNNHLVRHRLQIFGRLLADLVADPAYGADKPSRVSRITLEVNRDLREMAGLTAQDIAKELGQRLKQHGDAVQWLEQDPQVARKIGAGLIRKARVALDLGKRCPYTGEEINPIDLVTKRVDLDHIIPRSQRTSDSLDSLALTFSAVNKWKGQRTAWQFIQDEGGKAVPDAPQLSLMTPARFKAHVEALNTKGHLDDYRRKKRRKEFFMLERYEEKARTFTPGQLTQTSQLARLAAQSVRQVLPHLEPHDLVALPGSVTGTVRKAWDVLGCLSAAAPGVLETVKLPDGSEKQEVRTKTEIRDITHLHHALDACVLALAAHFIPNRGDVWRLLAERRLDSAQQAQLAALGLFDFDARGQFRLRDLAPELKDQIRQKLAERRVVQHVPADMSGLRVEENTRGIVKREHDRVFLRQRKKNADGQVVVNLTEESESKLVGLPRVDGSGGKLAALNGVRVIADNFGVAILDNATLPPDERFAVIPHERVWKRIEELKARNGGKRPTILRMGMLIEVPRGRYVGNWMIRGVQLNQRAGLLVDLSFADFITYRKAGRVEAKQNVMLSTLIKDGLRIKRCALTGNERS

SEQ ID NO: 1480 - protein, 1019 aa, unidentified
  REGION 1..1019: note = Description of Unknown: Cas Enzyme sequence
MMIPTALAVRESQTLGIDLGIGSCGWALIENADSGNGRIVAMGVRCFDVPETAKERVPTNQIRRKNRLLRRVIKRRRQRMNEVRALFKAHGLLSDDGKKALATGLNPWSLRATALDRPLNGQELAVALGHIAKHRGFKSNSKRDRGKNSTDESSKMLGAIEKTRERLKDWRTVGEMFASDESYAVRKRNRDGNFDRSVLRDDQQREVRLIFDRQRQMGNAIANPDLERDFIGTAFFQRELQDSDDMVGFCPFEPDERRAAKHSPAFELFRLASRLCALRVRSFGSERPLTTEEISQAMADFGAPGVKLTYKRLRRLLDLEDGARFDVPLEEEGKRELASRSGDQAAGTKAFRNVLGDAWKTLIGVPEKVDRAAAIITFRESPDSIRRGLEEISFEPLVLEALMKGVQDGEFAHFKGAGHISAKAARKLLPHLMKGLVYSDACKAAGYDHARRPETDLSSINNPIARKALGEALKQVRAIVREYGVPGAIHVELAREVGKSKEEREEITRGIERRNKAKDRLREEFTAATGRESATAEDLLRYELWKEQNSKCIYSGDHIPIDWVAGNQNLAEVDHILPWSRSGDDSFINKTLCTAKANREKKGRTPFEWFKQEKTEREWEEFATRVESSKAFKGRKKRNYMLRDASVLEEKFRPRNLTDTQYATRVFAETLKTMYPQDGSRRVFTRPGALTDRLRRAWGIQGLKKDKDGKRIPDDRHHALDALIVAATTEGALNRLTGAAKIEEERGTSRFIARFPMPWPRFKQDVDTLFPTIFVSRAERGRVRGETHAATIRSIGDDGTVVYERKAVDALGEKDLDRIKDAERNHRMVAALRAWIAAGKPKDNPPLSPKGDPIRKVSLATNKKVDVLIRDGAADRGEMVRVDAFRKKNGKGVHEYFLVPIYPHQVANKTDFPQAPAAYVRGGGAEEALTADHEFIFSLNQLSFLEIEKQDGTFLDGYFRALDRNTGAIKLSPHDTLQTMITGIGVRSLKFIKKYQVGRLGERNEIQSETRTWRGVACT

SEQ ID NO: 1481 - protein, 1054 aa, unidentified
  REGION 1..1054: note = Description of Unknown: Cas Enzyme sequence
MTRILGLDVGIGSVGWAVADMPDIDAMTGEVTGDFAIAACGARCFDVPEDPKTKELKNKKRRQFRGQRRVTRRRRQRIAEIRKLIAAAGLALPEPDAPGTVAGHVWQLRAQALERVLVPAELASVLVHIAKHRGFKSNSKRDRDNQSDAGKLLRQIALTGQKLAGHATFGAMLAADPAFQDRKRNRSGDYRLTPLRDDLAREVAAIFAAQRRLCSAHATEALEAAYREAAFFQRPFDQGDLLVGACRFEPGEKRCPRHAPSFERFRFLQRLNNTRVHPIGERPRFLSPAERERAMDLFASVQKLTFKAVRKAAGLPPGTVFDGLPSRKGDPEAATFAVFEGSRLLAEALGEQQFQAAVDKDPAKLDAAMAALVYFDAPERITSEMVKAGLDGPKIGVLTADEVLGRASAFKGVGHISALACRKLMPHLADGLVYSAACEKAGYDHSAIGESRIEDIRNSVVSKVLREAKKQIEVIVAAYGLPDLVHFEMARDVGKSKKDRDEIEAAIKYRTAERERHAAEYETLLGRKPNGDELLRFELWTEQNHRCPYTGEYISPAQLAATDNSVQVDHILPYSRSGDDGYRNKVLCTAKANQEKRRRKAFEWFGDDGIRWAEFKARIEGSPHLHKQKRRNLLTTAFAEREEGYRERHLNDTRYALRVLRMEIERMWPALRTRKDERRRIFVRPGAVTAMVRKSWGLNSLKASGELGDRDHALDAIVLACTSEQLLQQLTRAAQDLEEIGSGRATPLVPTPFGATPADRERLRQLVAEKTRAVFVSRPETRRGRGPAHDATLYGFEVDGQGKETQYEACPVTELTLEDLGWKDEDGARKWKEDRCRLKGDSARTRSLREALTAWLERATTLKLKPVKLFQTEPPRMPSRNRDGPVVRTVHLRRKSTKSGIKISRGDATAHADLDSMIRVDVFRKDAKFFLVPIYAWQVADQARFASPPGRAIVAFKAETEWALIDGTFEFRFALYPGSYVVAANRSGERFEGYYGGVDRQGGQLTLQPHHSVGKADRPGTRLLAEFRKFHVDRLGCRHEILKEPREWHGAVCS

SEQ ID NO: 1482 - protein, 1099 aa, unidentified
  REGION 1..1099: note = Description of Unknown: Cas Enzyme sequence
MSLHLAFDVGHSSIGWSVLLASSPSSPALLGTGVVTFEADNCLASKRRAYRRQRRHVRATRQRIARLEKLLAHLEVLSATDLEAKHRQAGGHSAPWFLAARVLADNGAAQHLLTWVELWDVLRWYAHNRGYDGNRRWSSAEQADSDEAQDDTEKAQNALALMAEYNTPTMAETMVRVLGLDVAGDKRASRVRFKAKNAAFPREIVEQEVVRILEAHRGHLRGIDNDFISLLTTRTLSKDQRDQLAAIGIRLPARYQGGLLFGQLVPRFDNRIIATCPISGEKVPTRNCPDFLRYRWAMQLAAVRVAESEAAELRPPRPDELRTLDNRMRAEGRLTKLEFKKAVRTLPGIVRDNLDTLLMHPDAEEALLLDPVTQLVRSDRLKNFWPILSPRAQKRARDAWTRGKTLTLSNLRALAEKYGEDTAAAAFDSAIINRLDAANTRKRKKDGGLTRESLLAEAFSVKKLSGRAAYARPLLQRAAEEVFAGKHPKEEGGCLYLDEAKRRAQLNRRIEEQTNNHLVRHRLLILERLLRDIVNDPAFANGDRTRVSRITIEVNRDLREMSGKTAKQIEQDLGLRLSNHDKVSKKLEAAFEEQTFSGRPIQITAGLIRKARIAEDLGWECPYTGSKFEPIDLVSRRVDKDHIIPRSQRPSDSLDSLVITYSEINKWKGNRTAWEFVRDEQGKPVPGLPHLSIRPLNEYNEWVEALEAFKGHDDDKRRKKNRKALLLLPRYEEKNKSFLPADLTQTSQLVRLGAQLITRFFADLPAPPQIVSLPGSVTAVVRRSWNLLGCLSLAAPQILDPNDPHRTKTKTEMRDITHLHHALDACVLAYASLLLPRDGGLWELMLKRNPNESDRARLAATGCFDFDSQGRFGLRDLPKDWKHQISQRLAEKRVVQHVPADMSGLRVEENTRGVEKVNNGRVHLRQQSRDPKTDAITIKRTNETLEKVVGLQPKDGNGKLKEVRGVRVITDNFGIAILDHASEGTEKFAIIPWHKVWHRIKELTQRNGGQPPRLLRPGMLFKVPRGRYQKSVWSLRGVAINQKAGHVVEIAESDVVNSREPRKPYCKQNVSLNTLIKDGLETIKTTLVGVPLTAINTTD

SEQ ID NO: 1483 - protein, 1033 aa, unidentified
  REGION 1..1033: note = Description of Unknown: Cas Enzyme sequence
MTRMKKAQGDSVSIQYRLALDLGATSLGWALVQLDKHRNPCAIIRAGVRIFPDGRNPKDGSSLAVTRRAARAMRRRRDRLLKRKARMHKLLVDHGFFPADEPARKALELLNPYQLRAKGLDEVLMPAEFARALFHINQRRGFQSNRRTDKTDADSGALKTAIKGLRAQLDPAGTDGKARTVGELLWRRMQDDKIRTVRARYREVRLPKDDGKIRVDKSYDLYIDRAMVEAEFDALWTRQSALNPDAYKAAAGAALKDCLLHQRPLRPVRPGRCTLEPEEPRAPLALPSQQRFRILQELNHLRLLGGRLLEEPLTLEQRDKLAAALEQGHKSFDAAIPKLLSLPGTVRFNLADAKRNELKGNATSILLGKKDYFGPVWHSFSEVRQDEIVMRILDEESEATLVSWLLESTTVNEAQAERIANAPLAEGYGALSAKALARILPALRAEVITYDKAVLAAGYDHHSNISHAATTGEILPELPYYGEYLQRHVGFGSGELKDPPERRFGRIANPTVHIGLNQVRVVVNALVRRYGHPSEVIVEVARDLKQSLEQRKEAQAQQAKNQQRNERLRKLAAEVLQIAEARVRRSDIDKLILWEELSFDVADRRCPYSGVQLSAALVLSDEVETEHILPFSQTLDDSLNNRTVAMRRANRVKGNRTPWQAREDLAAQGWNYDDILLRAERMPKGKRYRFAAEGYEKWLRDDKDFLARALNDTRYLSRVAREYLSLVCPARTRVIPGQMTAQLRAKFGLNDILGLSGEKNRDDHRHHAVDACVIAVTDQGLLQRFAQASADARGKGLDRLVETMPDPWPTYRAHVKRVIDALLISYKPDHGYEGAMHNDTAYALLGNGLVSVRKTENGERRREVGPLKVIEMHSVKAGERHGHLADGSPRPYKGYKGDSNYCMEISHGADNKWEWRVVSTFEAYQVVRTDGLPRLRDARVGFDGRPLVMRLMIGDYLRAEFKGELRLLVVKKIKANGGIFVAQANEANVRQREDAKDPRLIYGSFSAGSLRKAQGRAVSVSPIGELRDPGFKG

SEQ ID NO: 1484 - protein, 1070 aa, unidentified
  REGION 1..1070: note = Description of Unknown: Cas Enzyme sequence
MEVRQGGRKMARIKYRLALDIGANSLGWCVYHLDEHNEPDAIIRLGARVYSDGRDPKTLASRAADRRLARQARRRRDRATKRRVKLLHALVKFGLMPANDTERKQLQAADPFQLRARGLDLPLSAFELGRALFHLARKRGFRSSRKDSREKESAKETGRVNLAIQGLRERIQLAQCRTVGEYLAQQHAARAPVRARRTSDGGYVLYLQRDMIEEEFIALWSAQQAHHPRLLTDTARDELLDIMLFQRKLRPVEPGRCPFETREYRARLSAPLQQRFRVLQELNHLRVNEGIGDRALTLNERNRMLEVLSMETGPKPVSFSRLAKAAGLRKDDFSLGRDPKRTGLKGDPINSRFCADKAIGKAWITFSSAQQYALAVLVEQADQTETLEKALLALPDNSPEAEEILRGIFDGTERDAISTALRTFPLKLSDAQAREISSFILPDGFGSLSLKALSLIVPELERDVVTYDDAVRRAGYQSHSEFHTGEIFMRLPYYGEVLKGYTSPMPTSKIESERRYGRIPNPTVHIGLNQVRLLVNALIKRFGLPHQIVIELTREFGASGEKRREITSKQKENQERNDNLNAELQQLGIRATRENRQKLQLWKELGKNDAMHRCCVYSGQPMGIAKLFTDEVEIDHILPFSRSLHDGIGNKLLCTRQSNREKGNRTPFEAWGHTGRWLEIEDRAARLPEQKRKLFSESAIEIFLDGKDFLARHLSDTAYLGRAAKQYLTFVCPQNEVWVSSGKLTGMIRGKFGLSRLLAEDGAKNRNDHRHHALDAAVIGLCSRSLIQRMAKAAENAESKGENRLLAQMDLPWPEYRDNLSACLELLLVSHKPDHGKEAAMHNDTNYGLRDGPDKSGNPLVGRRKPLETIKHARDAESIADAALRNEIVQLLSPLISPKDIKAALLEFSTRTGIRRVICQERLSVIPIRDRRTHRPYRFVKGDGNFCYEIFRRPDGKWDGEVITSFEANQNTFVESKYVAQNGTPLVMRVHKDDVIALELDGNIRRMRVARFSEGMIALVDLHEANVDARTRSKNGLKYFFKSPSALKPLHARLIGVDILGYSNDPGYSA

SEQ ID NO: 1485 - protein, 1057 aa, unidentified
  REGION 1..1057: note = Description of Unknown: Cas Enzyme sequence
MAITKYRLALDMGANSLGWCVYRLDDCDEPDAVVRMGSRIFSDRRDPKTLASRAADRRLARQARRRRDRVLKRRHKLMLALAQFGLMPADAASCKQLQELDPYILRARGLDHPLTPHELGRALYHLARKRGFRSSRKDARDEESVKESVKVHAAIAALHQRVNAAGCRTVGEYLARQHAERAPVRARRSNDGQYVLYLQRTMVEEEFEALWAAQQPLHPQLLIDNAHDTLRDIMLYQRRLRPVEPGRCQFEPDEYRARQCAPLQQRFRLLQELNHLRVRDGIGDRALSLDERNRMLQLLQGEAGLVTFSRLARAAGLRNASEFNYGRDEKRKGFKGDAVAARFAAPEALGESWHQLTAEQQNALSVLIEQADQMEPQIDALKALPTDVTGAADIMKKQHDELLVIDALRSLPIIIDEKQARALAAFNLPDDYGSLSLKALARIVPELEREVVNYDEAVRRAGYQHHSQFYTGEVFPQLPYYGQLLAGYTSPMPTATDQDERRHGKIPNPTVHIGLNQVRQLVNALIKRYGYPHQIVVELTREFGASGERRKEIIKQQTEAQERNERYDVELKKLGARANRENRMKLQLWEELGKGGALDRYCIYSGKQLSKTVLFSDEIEIDHILPFSRSLHDGIGNKILCTRQSNREQGNRTPFEAWSHTDRWAGVVERAEKLPEHKRKLFREDALEAFLDGNDFLARHLTDTAYLGRAAKQYLTGICPPNFIWVSSGRLTGLIRGKFGLSKLLSDDGIKNREDHRHHALDAAVIGLCSRSLIKRMSDAARQAEENGEQRLLETLELPWPTFRHELGACLGGIVVSHKPDHGKQAALHNDTNYGWRGAPDKRGKLLVGRRKPLESVKNASEANSIASETLRAEITELLAPLTSASDIKSALLAYSQRTGIRRVICEERLSVITIRDKRNGQPYRYVKGDGNFCYEIFRKPDGRWDGEVISVFEANQKSFIASPHLAQNGMPLVMRIHKDDVLAIEIDGEPLRHMRIATLSEGKIAMVDLRESNVDARVRSKRLKYLQKSPSTLKPLKARLVGVNILGYVNDPGFHG

SEQ ID NO: 1486 - protein, 912 aa, unidentified
  REGION 1..912: note = Description of Unknown: Cas Enzyme sequence
VKVAVAALRERVQAAECRTVGEYFAKQHAGRAPVRARRSSDGGYVLYLQRTMVEEEFDILWKAQQSHHPKLLTDAARNELRDIMLFQRRLKPVEPGRCPFEPREYRARLCAPLQQQFRMLQELNHLRVNEGIGDRPLTLDERNRMLTVLTGDPGPKPVSFSRLAKAAGLRKADFNLGRDVKRTGLKGDAVGARFSTSNALGSAWRDLAPEQQYALAVLVEQADQTEALEAALLALPSESPAEIEILKGIFDGTERKAIANALRSLPFKLDEVQARQIAAFNLPDDYGNLSLAALSRIVPELKQDVVTYDEAVRRAGYQSHSQFHTGEIFTRLPYYGEVLKGYTTPMPTAKNEDEHRNGKIPNPTVHIGLNQLRQLVNALIKRYGSPHQIVIELTREFGASGEKRREIISRQKENQERNERYDNQLHELGVHANRENRQKLQLWEELGKDDAMDRYCVYSGQRLSKAMLFSDEVEIDHILPFSKSLHDGVGNKILCTRQSNRDKGNHTPFEAWGHTDRWAGIEERAERLPEHKRKLFQEHALETFLDGKDFLARHLTDTAYLGRAAKQYLTYVCPQNEVWVSSGKLTGMIRGKYGLSKLLSEDGAKNRDDHRHHALDAAVIGLCSRSLIQRMAHAAEEAEARGENRLLERLELPWPGYRAELATHLAAIVVSHKPDHGKQAALHNDTNYGWRDEPDKRGNLLVGRRKPIESIKNAADAKSIASESLREEIVQLLAPLSAAKDIKAALLEYSARTGIRRVICEERLAVIAIHDRRNGKPYRYVKGDGNYCYEICRRPDGRWDGEVISSFEANQKNFNESPNEAQNGLPLIMRICKDDILAIEQNGAMRCMRVAYFTEGVIALVAPHEANVDARTRNKESGLKYFFKSPSTLKPLRTRLVGVHILGYVNDPGFRE

SEQ ID NO: 1487 - protein, 1046 aa, unidentified
  REGION 1..1046: note = Description of Unknown: Cas Enzyme sequence
MDKKAPIRYRLGIDLGSNSLGWAVLRLDTADKPDYLVRIGTRIFSDGRKPKDGASLAVDRRMARQQRRRRDRFLRRKARLLDLLRTLRLFPPPGEAAQALKSRNPYELRARGLSAPLSAYDLGRAIFHLNQRRGFRSSRKSDSKNEEKGKIATAVAALTEKLQEKGFRTVGEYLYDRLQQGTGTRARRIGDGAKAIYEFYPNRAMVEHEFDLLWTAQSIHHPAICTPENASRIKGVLLFQRPLRPVRPGRCSLEPSEDRAPLALPSVQNFRIHQELSNLRLREPHSHTERGLTSAERSTLVALMAVKATISFAGIKKALDLSRATTFNLEGLKREKLLGNLSAAELGHADAMAEKWSALTLDEQDALVAQLLDDRIPDDELLRRLQSDYGLELSRAERVLDTKFPDGFGRVSLKAIRALLPHLMEGLTYDKAAVAAGYGLTNTDGDGSLDLLPYYGAVLQRHVAFGTGNLNDPDEVREGKIANPSVHIALNQVRRVVNKLIDRYGKPTEVVLELTRDLKLGWKRAREIEREQKDRQDENEALKEELKSLNVGLSNDSILRLRLFRELAAGDGLTARCVYSGETISLTRLFSGDVEVDHILPYSQTLDDSIANKVLCMTSANRVKGNQSPFQAFGHSPIGYDWSAILDRAASLKRNRRRRFDEDALSRFQEEGGFLARQLSDTAYMSRVAREYLSFVCAPNKVWVTTGQLTAMLRGKWGLNKLISDGEDKNRLDQRHHAIDATVIACVDRSLVHRVARAAKASADRRAGRLIESLDYPWPTFRDGLEHALTKMVVSYRPDHSPAAALHNDTAYGQAGTAMVPVGHLVKGDVKSYVRILSLVGEKSEKFLEHVVDQSIGMRLAQIADSAGSDKKAYQSMLEKFVSDTGIKRVRWQETLSVIPLVDDRSGTPTKFVKADGNYCIEIYKDPSGKWSSEMIPTFTANQPRYAAFIKTPDYRTRTFSGHELVMRLIVNDMVKVGKGDSSVLYRVQKLSAGRVVLAHHLGSGDLTRNDFSLKGVKTSLSLSAEGLKKAHGKRVFVDEIGRVLG

SEQ ID NO: 1488 - protein, 1126 aa, unidentified
  REGION 1..1126: note = Description of Unknown: Cas Enzyme sequence
MAYRLALDVGTASCGLVVWELDEAGQPSKLAYDSLDIWSEPLQPAKSGGVGEPKKAARRAARMMRRGIYRRARKLRHIAHLGSLLNLQTPDPSPLGTKERIRNGGRAGQDVYRLRARAAIEQIELDELLRVLLHLAKNRGPSGDWVYAEPDKPPSKGKRSVRASAVTSTDASVTADTDKNVAEDKRGVIAGVRKLEGLMAEATAALGKDAITLGQYLDYRRKRSESVILGKPDVGLYPSRRMVEQEFDQIWQTQAEFHTALRSPDVRQKFFHAIFDQRPLKSPAPMVGRCPLEPTLPRAPAAQMAAQSFRIEKQIADLRWGIGRDKQALSPEQKGLLRKLLNDANQLTQKGELSFQKTLPALDASGFPGPQGCDLNMNRSSRESLKGNTTLAAFRKLGLEEEWQTLDEKTQIQAINFLADLGSPDALDSDAWHLNFETTQVDPETKRCKKRKFTPALVSFINQMRQLGSKKFGRLSTMGFDNKRMGYSIKALKNLATLMQEGWDEHAAVDQAYPEHHQAQALSETLPLPDETGNTVVDVALRQVYRAVRRTMQAMGGQPAQVIVELSRDMALGLKQRGEIETRINVNNKARKAASDALVGEGQQATDRNIHRYLLWESQSHYCPYCADRISLGDALSSVTQREHILPRSLTRVGGKRSQLVLAHQVCNQQKDNHTPWQAFGDDESRWRIIEDRAAILEKNKQWSKAKLLLLKDWDEEVLDNEAIKGFTDRQFHESSWIAKLTALWLRRVCSDVAVSRGQMTAYLRRIWKLDTVIPEVRNSTGLPVLDRDGQPISTEEFERHKSWWEGHDERAGGVSTERKPDKRIDHRHHLVDALVISLTDRKLFKKMADNYKVESEKARRGVPAKLTRHVDPPFAVLRDLAVNIVTNAEIRHKMDRHPDGQLFDEHAYGISREPNDEGKHLLAISKPLTALIDNKGNANKTRRALEKIESVETRASVLRAFDQRVAAGKSIKQIFDDPILHPQFSTPIRRVRVLSNSEETAATVTHTNRLGEVLSKRYPHAGNAYLEICVEDIKLVGKPRLVAVQEAMKEKGLHPPFGVTRFWKGDTVCYGGKHYLIGMITAYNDGRLCLVPVTETCTFGELKKRGLTLRTVSGNALAQVTVINV

SEQ ID NO: 1489 - protein, 1112 aa, unidentified
  REGION 1..1112: note = Description of Unknown: Cas Enzyme sequence
MAYRLGLDVGTASCGLIAWTLDEQGQPSELAYHSLDIWSEPLLPAKSSGVGEPRNAARRAARMLRRGIYRRARRLRRIAHLASLLGLDRCAVPPDSGQDIHRLRALAAEQRVELADLLRIFLRMAKNRGPSGAWVYAEPELTSGKGKRGKKNPSETALADEAVATLVEADKKAAEEKKGIVGGVRELEKLMREAAQALGKTELTLGQYLHYRRERGESVILGKPDAKPCPLYPSRRMVENEFNRIWDTQAQFHPVMRDRTVRDQFFGAIFAQRPLKSPAPMVGRCPLEPTLPRAPAAQMAAQAFRIEKQIADLRWGMGKRAQPLSPEQKAIVRELLNSQGEVAFSTIREALDKAGHPGPPGCGLNMERSSRESLKGNTTLAVFRKLGLDAEWNALDEKTQVQVINFLADLGSPDALDSDDWHLNFETVQKDPATGKRKKREFSTAMVAFVNHLRQRPKFGRLSSMGFDGGRMAYSIKALKKLTELMQEQGLDERAAAERAYADHFKAKPLSCELPLPPETGNTVVDVALRQVYRAVDRAMKALDGPPSQVIVELSRDMALGIKKRSEIETKINVNNKARREAAQAIAEHGEQVTDKKIDRYLLWEQQMHYCPYCDRRIELGEALGSETEREHILPRALTRVGGKRSQLVLAHRTCNQQKGNRTPWQAFGNDEALWRIIETRAEQLREKKQFGKARLLLLKDWEEEVLDDKAIQDFTDRQFHEGSWIAKLTAQWLRTVCADVAVSRGELTAHLRRIWKLDTVIPEVRFAQKLPVLDREGKPISEEEFRHHKLWWEGHGKEAGGIETERKPNKRIDHRHHLVDALVISLTDRKLFQKMAENYKQEREKERRGERAKLSLYEAPPIPSLRELAVEIVTNAKIRHKPDRYPDGPLFEQSAYGLNRKPNAEGKQQLAISKPLKALIDNKGSAKKTRKALENIESEVTRSTVLKAFDSRIAAGTSIKQVFDEAILHPQFGTPIRRVRLLGDSEDTATRVVHTNRHGTQLEKRYPHAGNAYLEIRVEGNKLVGAPRLVKPLEAMREKGLRPPTGVRRFWKKDTISYNGARYIIGKIISKNGGTLCLVPVTETCTHDELPHELKKSVSGKSLASVTIIDV

SEQ ID NO: 1490 - protein, 1053 aa, unidentified
  REGION 1..1053: note = Description of Unknown: Cas Enzyme sequence
MRRLGLDIGTNSIGWCLIEDDRRIVDIGVRIFSDGRDPKSGTSLAVDRRAARAMRRRRDRYLGRRTAFLKTLVAHGLLPADADQARLVAERDPYTLRKRALYETLEPYEIGRALFHLNQRRGFKSNRKAERKAKSGEEGKIAGGAKALDQAMAEAGADTLGEFLADRQVKRVRLSSQNQEYDFYPLRRHVEYEFARIWEEQAKHHPELLTDAARAALHRILFFQRPLKEQEVGYCTFAGLAGVPFDERRLPKAHPLFQQRRLYEEVNQLRIVSAGAVERSLTRDERDALILKLQDKRKVSFQSLAKVIRLGEGERFNKESENRKDLIGDEVRAELGDKKRFGSRWLHFSLDEQVRIIERLRNEEDPDALHQWLQAEYGLDPERAEAVAGARLPEGYGRFGLTATTRLLDALKGDVVTYDKAAEAAGFHHSDHRTGQMLERLPYYGEILTREIAPGKEEYGDPLERRYGKITNPTVHIGLRQLQKLVNAIIAVHGRPDQIVVELARELKLNEKQKDEHKRRIKQDTEAAIARGKKLTAEGFADTGANRMLLRLWEELNPANPLDRRCPYCGEPISIRQLFSGEADVDHIIPYSISLDDSPGNKVVAHRNCNRIKGNKTPWQCWGHSERWETISAQVARLHKSKQWRFAPDAIERMERDGGFLARQLTDTQYLSRIAGKYLRSLYPTADAGRVDVIPGRMTAMLRRLWGLNSLLPDHNFVENEHSNAPKNRLDHRHHAIDAAVAAVTSLGLMQRIAHSAARAEAKDLDRLFEDLPQPWQGFREELGERLARVTVSHKADHGRKRRPSKDRDVTAGRLHNDTAYGFTGEFAADGKTPIVVHRVPLMSLKPGDLTASDRIPDTALRDALYTATRDLTGKEFEQALARFAREHPVFKGIRRVRVREPLNVIAIRDREGRAYKAYKGDSNARYDVWRLPDGKWVHDIVSMFDAHRPQASERRPHPAARKVLSLRQNDLIAIERNGGPREIVRVVKFSTIGTLALAAANEAGALKARDAAPPEVDPFKYIYAQGNSLKKMKARQVRVDLLGRVFDPGPRE

SEQ ID NO: 1491 - protein, 1083 aa, unidentified
  REGION 1..1083: note = Description of Unknown: Cas Enzyme sequence
MKKKFSYRLGLDIGTNSIGWCVYRLGDSGEPTSIHRTGVRIFSDGREPKTASSLAANRRMKRQMRRRHDRVLKRQGRFMQILVESGLMPDNIDERRKLAVLDPYELRTRALDHELAPHELGRALYHLSKRRGFQSSRKDRSDDEKEKGKIDSAIRATRDMMAENDCRTYGEYLALQHKDRQPVRARSTPDGKGYIHYPQRSMIAEEFDAIWQVQARYHPALCTTAVKDELRDALLFQRKLRPVEPGTCIFEESEPRIPQCSPLQQKFRVLQELNNLRIGGGLHSRSLTLSERNKLFDLLKSSKEVKFKRIKQELSIPQSTQINLESERRKELKGDIVSMGFANEMALGDGWWQLDTLQQEALAVLVESAITSEELACALRALPDETALAAGIIRGDERRVQPYLRALASLPWSIPEKAIPALLKLKLPDGYGSLSRKALEEIVPPLESAVITYDEAVRRTIYGSHSDFYSGEIYDRLPYYGQILKSYTSPTPSARNLDERKFGRIANPTVHIGLNQVRIVVNEMLRRWGWPDEIVLEVAREFGMSGKRRREIEKQQEENQARNRKLNEELMRLGQKENRENRQRLQLWYELGNEDALDRCCVYSGDRLSIHSLFSADVEIDHILPYSRTLDDSLGNKVLCKTRANRFKKNRTPFEAFGHSGGGYQWEEIQERANAFSRHKAARFKESAIVDYIGRAELDTTRLKEYGFSETEGFLARHLTDTAYLSRVARSYLTAICPPNKVWVVSGRLTGKLRYQWRLDAILDPEGAGKNRSDHRHHAVDAAVVALCDRLLIHRMAKAAQRAEEMGENRLLSRLDLPWDNFREELSESIERVVVSHRANHAVDGPLHNETNYGWLLGPDRVGGAPLVVHRVPIESIDSIKKAEGVQDPAIREKLKNLLVNQAGTAIKAAIAEFSRETGIRRVRFAERISVIPIHDRHTGVPYRYVKGDGNYCYDIFSTDSGRWGGEVVPLFYANRKEFKMQLKKGSKHWRNTEGLPVLMRLRKDDMLLVEDNGLRRIMRVAKFTHGQVSMAEHMEANVDARERDKNSGFSYFRKSPNALKNVQARLVGVDPLGYLNDPGFSE

SEQ ID NO: 1492 - protein, 1088 aa, unidentified
  REGION 1..1088: note = Description of Unknown: Cas Enzyme sequence
VRYSLGLDIGSESVGWSVVEIDDQDRPVRLVRLGVRAFEAVRGEGANATTPAEERRLARSQRRRLRNRKRRIREAVNLFAESGLVEDRAELETALKTLPGDKTPWQLRVEALDRRLDTREWLRVLFHIVRHRGFKSTRRGEIETADNQEREKLGQMLQGIRSIHDGMVSHGYRTVAEYMLSADWPHGEQKRNKGGQYICTIGREDLIAETRTLFAAQRQFGNPFASADMEARYIAIVDEPPNLTEGPDLVAKVGHCFLEPTERRAPRATFTAQRFMALQTLANQTLTNTTTGERRRLTGKEIRALFDDALAVKELKYKRALKTLNLDDRWLFEVRGRTKRSKNLAEMQSETLLKLESYHKLRDALEKDFPETWQRIRTDADMMDEVASALTYWLRPDTAYQALLELGIEEAAARRLADSVVCDGHARLSLKAMRNLIPYLEQGYVYSDACARAGYDHSRRTAGSKSDRIPPLDTLEDFNSITNPNVKRALTQARKVFNAIIAEYGVPSRVVVELAREAAQSPTMRREIERRQRENRQHKERIFEKVLEVAPSVSPERVWKKHLLYEQQEGKCAYSLKPLDLTRVLTDSTYTEIDHAVPRSVSFDDSLANTVLVLTEENRNKGDELAAVYVRRAHGDEHYERYKAWVQGCTMPAKKKRLLLTEELTHEQRQELEARYLVATQYAARYFLQVVKSHVDIPESRVLAVNGRITSDLRWHLGLGAEKDRQASDTHHAIDATICALADHETVHRMARYFKLRETATRTPDGTWVDANGVIIEPPTLEPWDGFRDDVLQHVADVVVSRMPNHRLTGRGHKETIYSLKHVRKHLDAVPTHGRITLSADTPRPTKRTRLDQLSDTQIRDILKQPSPVLVDEDANWRLYSLVRERLRAVEHGQGKTWAERAFGPQAEPLRMPTNDGRPGPVVRSIRIFTDTRSGLAVRGGLAENDTIVRLDIYRKVDTRGKSRHYVVPVYAADVAAGWTPKRAAVQGKPESEWPVMDESFEFLFSLFPGDYFRVWKSETEPGPLLYVTSFDRNSVRISANLPDRSNRSTDGKVEAVRTAVATSPKVEKFEVDLLGIPHLVRSTSGIG

SEQ ID NO: 1493 - protein, 1046 aa, unidentified
  REGION 1..1046: note = Description of Unknown: Cas Enzyme sequence
MATRLGLDIGANSIGWCLYDGDSIRGIGARIFSDGRDPKSGASLAVDRRTARAARRSRDRYVRRRSALFEVLVETGLMPPDVAEARALADLDPYLLRKRGLDEPLSPFELGRAIFHLNQRRGFKSNRKADRAAGDEKESGKIASGAKALDLAMQEAGARTYGEFLFGRDTRRVRIPVGGEAYDFYPERRHLEHEFYALCAAQAQMQPEVIPPELQARLRRIIFFQRPLKTPEVGGCTFFNTEKRLPKAHPLFQERRLYEEVNHLQIVSPGAPARKLTLDQRDALVLKLRGAKSVTFKSLAKVLKLQPDEAFNKAGENRSDLAGDEVFAAFSHKSCLGDKWAHFDRETQWSIIEAVAEEEDPIRLYDWLISNHGVTQEAAEKIGRIRLPQGYGRLGETATQKILEALKAEVVTYSDAVQAALGASHSDFRTGEILDSLPYYGEILGREIPPGTLNPDDPDEVRYGRITNPTVHIGLNQLRRIMNAVIRTYGRPDEIVVELARELKLNEAEKAKRNKELKDNTRAAQARAARLEELKQPDTGANRMLLRLWEDLNPSDPLDRACPFCGGAIGISSLFSDETEVEHVLPYSMTLDDSPGNKVIAHRKCNREKGNRTPWQAWGDTPRWGVIEARIPKLHESRQWRFAPDAMDRFDKGGDFIARQLTDTQYLARMARSYLSSLYPEKAGVYVIPGRMTAMLRRLWGLNELLPDHNYVQNPHSNAPKNRLDHRHHAIDAAVVGATTRGLLNEVAKAAGRAENQHLDRLFEGLPTPWPEFRNDLRDALSGVIVSHKPDHGRRGHPPKGRDSTSARLHNDTAYGPTGRVSATGLPIVVHRIPLASLEPDDLRDPERIPDPVLRNALLRVTEGLVGKEFQKALLEFSASDPVFRGLRHVRVREGLKTIPIRDRNGRVYKGYKGDANALCNIWRLPDGSWRILVSSVFESHQRGFLAQKPHPAARKLMSLRQNDLIAVERVLGEREILRVVKFAANGQIMFAHHQESGSLKERDKTNKDSDPFKYISGSASGLKKMRARQIRVDPLGRVFDPGFRE

SEQ ID NO: 1494 - protein, 989 aa, unidentified
  REGION 1..989: note = Description of Unknown: Cas Enzyme sequence
MLRRKRRLLAALRDLGLFPTSTLKGEALKNLNPYALRHKGLSERLEPNQIGRAIIHLNQRRGFRSSRRTDRGEEASKEKGKIATAVTRLREKLAEAGVESLGSLLYARLLAGKGTRARRFGEGAKAFYEFYPDRKMLEAEFDLLWDRQSRHHPDLLTEDAKERIRGILLFQRPLRPVRPGRCSLDPTVDRAPLALPSAQRFRIWQEINNLRWRRPGEIVENALTDDQRRRTFDFLECAGRRTFSAIRRTAGLPKDAEFNLQGLKRDFLLGNAVTDALGGEGCFGRRWQSMSPEEQDAVVCQLVDDSLSDEALLGRLQAAYGLNAEQAEEVLRVKTPDGYGRLGLPTIQKLLPHLESGLTFDKAVAAAGFEGTNTQGDGSLAELPYYGKVLERHVAFGKGEGSDEERYGRIANPSVHIALNQLRYLVNALIRRYGKPREVVLELTRDIKLGWNKAREVEAEQARRQQENETLRNELESLGYAATGENLLRLRLHKELCGVDGLSAFCVYTGEQISIGKLLSPDVEVDHVLPYRRTLDDSIANKVLCAARANRLKGDSSPWEAFGHSPPGYSWEGILDRASRLRRNRYRRFAEDAMQKFDANDGFLARQLTDTAYMSRLAREYVSFICPPNKVWVTTGQLTGMLRAKWGLNKLLSHDDLKNRRDHRHHAIDATVIATIDRALVKRVSDASARASAAHTGRLLDNLDHPWPTFLHGLENALSQVVVSYRPDHNVAGPLHNDTAYGSAEDRESDVPGVAVKAAVHHFVPLATLISRKAADVRNSLGDTWLAQALAGLVEAHQDDRKALRAALDEFGQRHGIRRVRWTESQTVIPLANHQTRRVYKYVVGDGNHCYEIFRGKDGKWSGRVISRFVANGPAYRSFADSGSFRHSTFDGVPLVMRLMPGDSVRVGVDGLELVYRVQKISEGIITLAYHLGAGDQTRNPLLISGIKPVRYVAPSALQSLRGRRVFVDILGRVFDPGFKDVAPDTGSR

SEQ ID NO: 1495 - protein, 1099 aa, unidentified
  REGION 1..1099: note = Description of Unknown: Cas Enzyme sequence
MILGLDIGPNSIGWAVTETFEGGGRLLDAGVRVFPEGVANFDTSKEISRNEDRRTARGMRRQILRRRRRRTILGQALVRAGLLPGVQAELEPVLALDPYDLRRRALEAKLTPFQVGRILLHLNQRRGFLSNARKDRADKEVKGMLQEISELAREMDGRTLGQHLADLHDDPHFRIRGRHTRRQMLVDEFDHIWNAQASHYPALLTDALRYGKAGPQSQPQRPRRIERGTDWLTEFGIQGIIFFQRPLYWPKSMIGACELEPREKRCPRADRSAQRFRLLQEVNNVRVIDPDRREERALSPEERALLLDKLSLKDKLTFDEVRKHLGFLESIKFNLERGERSTLGGMKTDALLAAKYKGWHKLPEPKKNAAARVLIDPDLDESTARDRLQHELAFDQPTAEALLAADLPAGYSNLSRKAIEKLLPYLEKGMRYMAESNVEESALHAAGYLRRDELQRRLFDELPPLDRIRSGPLADLPNPVVAAAMYEIRKVVNAILREYGKPGEIHVEMARELKMSQKKRREYNTRIRGREAERDAAADYLREKQVRLSRDNITKYLLWKEQGEICPYTGNVIPFEQLFGGEVDIDHVLPYSRTLDDSQGNKVVCFRSANAEKRERTPHEWLAAEQPDQYEVVCQRARRLAYPKYRKFLQKELELDDFIARQLRDTAYIARLTVEYLKLLVQKEHQVLGLKGQHTAELRHHWGLETILSELPDSPAWAEDQAGRIRPGEKNRADHRHHAIDAIVVALTDGRRLQHLARIRGEGGTRATGEVLAEPWPGFRRDVVEKIKSIHVSHRPQRKIAGPLHKDTFYGTTAEPGWFVVRKRLTELSTNEIPMIRDPGIRRIVEAAMAETGLRSGRRKRGEVKDADAVGKIKACLADLTMPSGMPIRKVRIRIQDQTIQPIRTGTTNQTHVKPGSIHHACLFEWDAGGRNKRDAEYVTMLEAARRVRDGEELVRRRHSQFPQARFLMSLSTGDMVMANLDGREVLCVVSTLVSTQKRIHLVDATDARRSADKTDRGLKPNTFTGRKVTVDPLGRCRNADRFEPAAVAAAIDPRVMELARQRVAGTISTRAARRKLREPALRSLGAQFTAACHQLRQS

SEQ ID NO: 1496 - protein, 1013 aa, unidentified
  REGION 1..1013: note = Description of Unknown: Cas Enzyme sequence
MRKMRYRLALDLGSTSLGWAMVRLDSANDPCAVVKAGVRIFSDGRNPKDGSSLAVSRRAARAMRRRRDRLLKRKARMIKTLVAHGFFPQDEAARRDLVQLEPLTLRAKGLDQALKPSEFARALFHINQRRGFKSNRKTDKKQNDGSALKQAIGQLREAMQATGCRTVGEWLYARHQNGLPIRARYRENRITRDGGKTKVEKSYDLYIDRAMIEAEFDALWAKQAELNPVQFHETARAELKDCLLHQRPLKPVKPGRCTLMPEEERAPLALPSQQRFRIYQEVNNLRLVREGLTEEPLTTAQRDQITQALELKPKVTFAQMKKLLGFSCQFNLEDDKRTELKGNASSSTLSKKEHFGATWAGMDAALQDRIVMQLLTEENEAKLIQWLQDNTGVDEITAERIANAALPEGYGSLSAKALEKILPELLRGVITFDKAVIAAGFEHHSHISHASTGEVLPNLPYYGEYLQRHVGFGSGKPEDPPEKRFGKIANPTVHIGLNQIRVVVNVLIARYGHPSEVIVEVARDLKQSQEQRKEEQKRQTENQHRNESMREQIAGLLSVSPDQVKTADLQKMILWCELNRDNAADRRCPYSGVQISAAMLFSDQVEIEHILPFSQTLDDSLNNKTVAMRQANRIKGNRTPWQAKEDFATQGWSTADMLARAELMPKNKRYRFGENGYDQWLREDKGFLARALNDTRHLSRVAKEYLGLICPQDTRAIPGHMTSMLRAKFGLNDILGLDGKKNRNDHRHHAVDACVIAVTDQGMLQRFASASASARERQLNKLVDIMPLPWDNYREHVQRAINNIWVSHKPDHGHEGAMHNGTAYGLLGSDRVHFRKLIDGLRVREESTLKVIPFTSVKASARHGLLPDGQPRPYKGYKGDSNYCIEIVHNDKGIWEGEVISTFEAYQLVRHCGVKRLRHPTLSCSGKPLVMRLMRNDFVRLIEDHKLLTLRLCKISGNGSLAFALISEANVDARTRTKEISYIFKTAGTLQKANGRRISISPIGELRDPGFRS

SEQ ID NO: 1497 - protein, 1287 aa, unidentified
  REGION 1..1287: note = Description of Unknown: Cas Enzyme sequence
MITLGLDIGSNSVGSAWVNLDSREIHLAASVFPAGVDEQEDKRGAPKNQARRDARSQRRNIARRALRKRQLIRFLMERGLLPKDPGELQKAFDKNPWTLRRKAIKKDGEPLTSWDFGRILVHLGQRRGAVGVVIDPEEPEEGKVKEGMERLETLMKGTGASTVGEFMAGCFEQRVREHKGIKWNEPIRNRQYRMPEDQMLFAGRNLIQEEFHKIIAVQRSKESELAAMLTDDLVRQLDDATQTDAWRHRGLLFGQRRTYWDTGTLGRCDLEPTERCVPIADRHASYFRVLETVNNIQMEERGHPKRPLTRDEREKIIELLRGPLGVYKKGKYAGQPKASVSVTDIKRTLPKGVRLNIEADEDREINTDWFHREIVHGAFGTAKWEALTERAREAVNRAILRFDPDQADDAARLLEGSKSWWGLDATSAGKLIDAWKRRPKLEKRLNLSRRAILNFLPYMERFDEASNRWPTQQEARKAYAKTLPQGHARRRYETGAAGLTAADRRYMRLGKHQISRGIPELPPAPMLSNPVVRKAIYEVRRHLLAYLRKFGRKPDRVVIEMARITKQSEKQRNLALARNRNRDKEKKAIINEILPVAFGAQIAQRLSLNQQRAAVDRVVLARQQNFRCPYCGQDGLGDPVAARGDGLEIDHIVPYSRCGDNGLNNRVLVHKTCNQGKGNRTPREWWGTDFANRVRFAEESFKGREPAKGEYFTKRDFARKWENFNRELHEADEWKNSQLTDTAYAARQVAGYLADALFDGRGLPERGDGEAKQAIFFTTGRITSMLRKDWQLFETLKGDELSAAEEVQLAEKNRGDHRQHALDAATIALTDPRIKNSLANWATQAAEYKEKHGRWPRRTPVPPPQPWNDVRSFRRTVLSKVYGQFDDADGNSRRPNNNLVIISHRPVKRRLIGAFHEQDAYGPVIGQMPSHRPEPRAKVFSLRMPIFMHREKRLKPGHLRVSGAWDQVSAQLEKEGLSRIEKRAICRKLSAIVDPPAGKGGIVRDRTVRDRIRKCLLRESIDPDRFTVAEIQRIAKDGKLTMASGVPIKSVVLLRSNSDPVIIPRKKLDLESGKMVPDMDPTNLSEPNPRTKRVYIGGNNHHVEIVSDNKGRWSSRGGQVVSGFDAARRLCARLKALREAGVPPSKKLRRLPKKDRECFKPIVADVCRRFPIIDQSSGVEGQFVMSLAEGEMIYARRWDPSKKQAVGPADYFVVCKLDKARIHFAPHWDARKSGGTKGDDGKVIEGSEQDRWDVTPADLKHCGPEPTKPPIKVRVSPLGEVTPLSND

SEQ ID NO: 1498 - protein, 1134 aa, unidentified
  REGION 1..1134: note = Description of Unknown: Cas Enzyme sequence
  MOD_RES 792..798: note = Any amino acid
MENNPQIGKSPVASEGPFTFGLDIGIASVGWAVISDKRIIDLGVRAFDKAETPDKGESLNLQRRTARLLRRRLWRRAWRLTKLSRLLKRHGLIQSAEFLKSQPNFTDSTWTLRVAGLERLLTSVEWARVIYHLCKHRGFHWISRAEERKAEEDAKGEGGRVKTGLAHTKKLMEEKKYRTAAEMVLAEFPEAQRNKRGDYDKALSRVLLDEELQTLFVAQRALGNPNATIELEHALRGSDDKRGGLFWSQKPALSGKDLLKMLGHCTFEKDEHRAPKASFTAERHVWLTRLNNLRVIVDGVSRPLTDKERNFALPLPYQSGEKFTYKTLRNALVKANQLPESFRFGGLAYPSSKQREEEKAKDPEDQPLVKLTAWHEVRRTLARADLKSEWNQISIAALEGKPLLLDAIAWVLSVYKDDDEVRAELSKLALPGGQRTIDALLGIRFDKFHSLSLKALRQIVPLMELGYRYDEAVAMIPEYGHHSQRFVAAAGGHKFLPPLYEGRDAAGRMKFRQDVDVPRNPVVLRALNQARKVVNALIQEYGSPSSVHIEMARDLSRPMDERRDIKKLQDEYRDRNEKAREQFAGDFGRRPSGVEFEKWLLYREQHGKCAYSLEALDLNMVVHDASYVQVDHALPYSRSYDDSKNNKVLVLTRENQNKGNRTPYEYLDGASDSERWRSFIAWVEGNKAYRQAKRSRLLRKNFGVEESSSFKDRNLNDTRYICKFFKNYVEQFLQLSDGSDNKRCVVLNGQLTGFLRARWGLIKVRDESDRHHALDAVVVAACSHAMVKRLAXXXXXXXLADYARKKELEHMREGFADPETGEIINATAHQRLAEHFPDPWQQFRTEVMLRLKTDDIGVLREELTKLGSYTSLAIENVRTLFVSRAPQRRNGGAVHKETIYAQPRRLANQGGVTQKVPLSSLNLKDLDRLVDKHRNERLYAAIRARLEAHGGKGDKAFPADNPLRKPDREGNPTGPVVRTVTLEIDKLSGIPIRGGIAKNDSMLRVDFFAKAGKFHLVPVYVHHKAVGLPNKAINAYKDEDEWTDVRDDEFLFSVYPCDLLEITLKSETYLGYYAGCDRSTGAVSLWSHDRSQAVGKDGLIRGIGAKTAKSIKKLHVDALGRRHAAPKESRRGLA

SEQ ID NO: 1499 - protein, 1131 aa, unidentified
  REGION 1..1131: note = Description of Unknown: Cas Enzyme sequence
MAQYVLGLDIGIASVGWAVLDAQRIVDLGVRCFDKAETAKEGDPLNLTRRQARLLRRRLYRRAWRLTQLARLFKREGLIDDAKLFAKAPSWTENAWELRLRGLDHLLTPLEWARVIYHLCKHRGFHWTSKAEEAKAESDAEGGRVKQGLAHTKALMQVKNYRSAAEMVLAEFPGAQRNKRGQYDKALSRVLLGEELALLFATQRRLGNPHASENFEQLILGHGDRRSGLFWQQKPALSGADLLKMLGKCTFEKTEYRAPKASFSAERHVWLTRLNNLRIVVDGRSRPLNDAERQAALLLPYQTETFKYKTLKAAFVKVGQWGDGVRFGGLAYPSQAQAEAEKVKDPEDQFLVKLPAWHELRKAFKAAGHQALWQQISMPALEEDPTLLDQIATVLSVYKDGAEVVQQLRQLALPEPDASIAVLEKISFDKFSSLSLKALRRIVPLMQGGLRYDEAVAQIPEYGHHSQRIDPGATRHLYLPPFYEAQRKYAGKGDRIGSMQFREDADVPRNPVVLRALNQARKVVNALIREYGSPVAVNIEMARDLSRPLDERNKVKRAQEEFRDRNDKARSEFERDFGYKPKGAVFEKWMLYREQLGQCAYSQQPLDIQRVLDDPNYVEIDHALPRSRSFDFSKNNKVLVLTRENQNKGNRTPFEYLTSFPGGEDGERWRAFVAWVQGNKAYRMAKRNRLLRKNYGADESRGFIDRNLNDTRYICKFFKNYVEEHLQLAARTDGDTARRCVVVNGQLTAFLRARWGLAKVRGDSDRHHALDAAVVAACTHGMVKALADYSRRKEIAFLQEGFPDPETGEIINPAAFDRAHQHFPEPWAHFAHELKARLFTDDLAALREDMQRLGSYAQDDLDRLRTLFVSRAPQRRNGGAVHKETIYAQPENLKRQGSTIEKVLLTGLKLQDFDKLLNPESSDHFVEPHRNERLYAAIRRRLEEFGGKADKAFGPDKPFYKPDKNGQPTGPIVRSIKLVRGKQTGIPIRGGLAKNDSMLRVDVFTKAGKFHLVPVYVHHRVTGLPDRAIVAFKDEEEWTLIDKSFAFLFSVYPNDFVKVTLKKEAFQGYYSSTNRSTAAVNLWAHDRNIATGRDGLYQSIGVKTAQSLEKFNVDVLGRIYPAPPEMRRGLA

SEQ ID NO: 1500 - protein, 1156 aa, unidentified
  REGION 1..1156: note = Description of Unknown: Cas Enzyme sequence
MAQYVFGLDIGIASVGWAVLDGARIVDLGVRCFDKAETADKGLPLNLARRGARLLRRRLYRRAWRLTQLARLLKREGLIADAKLFARSPAFTEPDSTNTKQHVVSAWELRRQGLDRQLAPLEWARVIYHLCKHRGFHWISKAEEAAADSDAEGGRVKQGLKGTKALMESKGYRSAAEMVLAEFPTAQRNKQGQYDKALARVLLGQEFALLFATQRRLGNPHASEHFEALLLGTGDRKSGLFWQQKPALSGADLLKMLGKCTFEKSEHRAPKASFTAERHVWLTRLNNLRIVEDGRSRALNAAERTAALLLPYQTESFKYKSLKSALVKAGLWSADVRFGGLSYPSAAQAESSKTKDPEDQILVKLAAWHELRQTFKKAGQEPLWQRISTPALDGQPELLDQIAWVLSVFKDGAEVLQQLRLLNLPEPDVSIAVLEQLSFDKFSSLSLKALRRIVPLMQQGLRYDEAVAQIPEYGHHSQLIAPDADKRQYLPPFYEEAREYKGKNDRVGSMKFREDANIPRNPVVLRALNQARKVVNALIRRHGSPMAVHIEMARDLSRPLDERREVQKLQDEFKDRNHKLRDDFEALFGRKPNGKDFEKWLLYKEQGGQCAYSLKPLAPSGDCNEIFLDGSTQVDHALPYSRSYDDSKNNKVLVLTRENQNKGNRTAYEYLTSLPGGEDGERWRAYAAWVQGNKAYRMAKRTRLLRKNYGQDEAHGFIDRNLNDTRYICKFFKNYVEEHLQLAERPDGDHNRRCVVVSGQLTGFLRARWGLTKVRSESDRHHALDAAVVAACTHGMVKALADHARTKELEFLRESFPDPETGEILNPAAFDKARKHFPEPWPHFRHELQARLFTDDLAALREDMARLGSYSPQALEELRTVFVSRAPQRRNGGAVHKETIYAQPESLKIQGGVIEKVLLTALKPQDLERLVDPHRNERLYTAIRDRLTAHGGKADKAFGPGNPLRKPGKNGEPTGPVVRSVKLVREKQSGIPIRGGLAKNDSMLRVDVFTKAGKFHLVPVYVHHRVTGLPNRAIVQKKDEKDWTLIDESFQFLFSMHPNDLVCLAQRGNAPIQGYFRSCHSGAETINIALHDRAKLGLRTASLAAYQKDSTKDIPNDKLGLIESLGVKTALAFKKLHVDTLGHTYPAPPEVRRGLA

SEQ ID NO: 1501 - protein, 1438 aa, unidentified
  REGION 1..1438: note = Description of Unknown: Cas Enzyme sequence
MSGNLAETIEQSPEQIHRFLGLTREQIGVGNDSMPATATRYRGLTREQIVALGPLTIGLDIGIASCGWAVLSPQRIVDLGVRCFDAAEDPKKKISLNQARRTARVGRNRNASRRSRLKRLAELFVNIGLLTAPACAALFSKTQSKKAKDAPPTTDIWELRSSALKRILTHEEFARVVHHLVRWRGYGALRKAAEIATTEANDVRKSTSVDDEAKASSTADAYEAPPLAADTAFKALPFGDALEKSSARVQRLLETYQTVGNMAYALKHQKTQAVAADEQSDVALFKKAFRNHDDGYERSFNRSDLRKELITIFKRQTELNNPIATAHLGSDCHQMKYVQVGGNPIAPVDSTFLAQALALFDEQFPPIVQAQLEQMIGKCELEDGFDGRPIQPRAPRESFASERSAWLQRLNRMEVVQNNVSRKLEPDERSAVIDLPYLNDEVTFAQARDALCQKANWPRDWRLIRFKDLDYRATVNDGSDLIKCVESDVVTTLFDAALQSTVDKKERKAKKENLIRKLSAGDLTYAQLRTLINLPANARFRIQKKRNSPITRDQESETRLPLQYGEKVFFPAGFGLKTLDAKTGKTSLLKGARFIPIVKCAEGGLSLSLSELRAAVPAEAWPEGPWQFVIEEKTTSDIAVELEPETKVLLQYSDPQVVEKDRLFRLPGWHKLRKAVASRSPSLWDSLQAAWSYPLASEGLEAAERIDTIFHALTTNYTDTEIARSLESLGFSHEQTVALCNVVTTTFGHLSFVAQRNIRAGLEAGLVYSEACAKSTPPYNHSIRAPKERKRLLPELEHYLHRRIDVRTGRPTGHEERRYKDLANPIVARSFNQARKVLNAIIEVYGSPDRVHIEMARDLSKSGEERKKIERENKVRNESNQQRIAQFQRDYPQATATPRLMRKVRLYNEQNQHCIYSAKELQLDQILEDDNYAQEDHILPRSRTGDNSLDNVVLVLAGENQRKSDRSPFEWFGADAERWRKFEFDISACVTMSERKKARLLLRELNEDEFIARNLVDTRYATRLFARMVRERLLFAGGAIAENETILPDDAAKLKREYFERARVRTPQGGVTAMLRGLWGLSKNREESDLHHAIDACVIAAATPQLIKRVNDFHRSRERFIERDGKIISTETGVVVTRGEHDEYLTQRFPEPFATGHFHQEVMARLSPNGRTYRTKHGDVRAFDFANYDEVARDAVRPVFVSRAVKRRRGGEVHRAGIARVHKVDSQAVVTRVALIDLTEKKVEAIVERNGRNKPLVEALKRRLAIFGHDAKKAFGDPNNPFRKPSAVGKIAPIIRKVAILETQTTGLRVRNGIAALGEMASVLLYKTKGNSYILIPTYDAKNKNIVGVEIPPPGAIEIGQIHKNDYLIIDFEKQRFEGYFVMYESDGRVTLRPHDAPQPDKKFFRRSIASARLVELRHVDILGNRYAPKPEKRGDLA

SEQ ID NO: 1502 - protein, 1052 aa, unidentified
  REGION 1..1052: note = Description of Unknown: Cas Enzyme sequence
MRYRLGLDMGTASCGLIAWRLDDDEQPSELVYDSVNVWAEPLLPAKSGGVGQPKKAARRAARQMRRGIFRRARRLRRIAHLTSLLGLDASTIVADKHNSQNIHRLRAQAAEERIELTDLTHILLHLAKNRGPSGDWVYSEPEEPSKKGKGSKKNACPEAGEGAMVIADADKKSADEKKTIIGGVRKLESLMQEAAQALGKDRERFTLGQYIYYRHERGESVILGRPEVGIYPSRRIVEREFDRIWDKQAEFHSVLRDVSVRKQLRDAIFHQRPLKSPAPMVGRCPLEPSLPRSPAAQMAAQVFRIEKQIADLRWGISRHAKPLSEEQKRVIRDLLNTKGEAAFSTIVDELRKAGCPKPAGCGLNMDRSSREGLKGNTTLATFRKLGLENQWNVLDERAQIQVVNFLADLGSPDALDSDEWSSNFETMQKDPVTGHNKRREFQPVMVNFVNLLRKYPKFGRLAAMGFDGGRMAYSIKVLKKLSALMQEGWDERAALERAYPECFKRKPTNYELPLPKETGNAVVDVSLRQVYRAVRRTMDKLGGPPAQVIVELSRDMALGIKKRNEIETKINVNNKARRNAAKEISEHEEQVTDKKISRYLLWEQQMHYCPYCDKCIELGEALSGSETNFEHILPRTLTRVGGKRSQLVLAHKICNNEKGNRTPWQAFGNDEIRWRIIEERAAQLEKNKQLGKARLLLLKDWEGEVLDDDTIKGFTDRQFHESSWIAKLTAQWLRNVCNDVSVSRGGLTAHLRRIWKLDTVIPEVRYTAGLPVLDREGKPISHEDFDRHKTWWNGHNQSAGGNPTDRKPDKRIDHRHHLVDALVISLTDRKLFKKMAENYKLEREKERRGERGRLSLYETPPIPALRDLAIEVVTNVEIRHKPDRYPDGPFFDQTAYGISRKPNEEGKHKLALSKPIKALIDSKGNIDKTRRTLMNIESEVTQHTVLEAFDERIAADIDIKQVFDKPILHPQFHTPIRRVRLLGNSEDTAAVVLHTNRQQGKVLEKRYPHAGNAYLEIRVENGKLARCNAGKGIKTSVGCSEILEGRHSVLQE

SEQ ID NO: 1503 - protein, 1064 aa, unidentified
  REGION 1..1064: note = Description of Unknown: Cas Enzyme sequence
MITSKSTTKTDNRPYVLGLDLGTDSIGWAILEWNGKRPTAIRRLGVRRFEAGVIGNIEAGRDEAPGTARRTARQQRRQLWRRAQRMKQVFRVLTAAGLLPPSEDAPEQRDATIKKLDHDLSVEYLPVAGAANRVDWHLLAYHLRAEALHRELAPFALGRALYHLAARRGYQSNLKAKKDDKEEGIVKSAIGELDQLLAGRTLGQLFATLDPEDRRIRGRYTSRRMYLDEFERIWNAQSQFHPQLLTEELKAELHKAIFFQRALKSQRGLVGRCDREPTQRRAPLASLVAQNFRLLQRVNDIELVLNDGEIRRLDSDERTRLIRELNEKGDLTWHKVRSLLGLKSPRGEFRGDRFNFEEGGDKSLIGNRTYSKLLKLLGETWTKLTAAQQADFVDEILNFTNEDALARRLQKAWPLTPEQANSVAAISFEPGYAALSRRAMDKLAPFLARGVRLQTALKEAYNVNLDLPTLELLPPVEGSGDPARRNSHPAFTRLRNPTVARALTELRKVVNAIIRKYGKPAQIRLELARDLKKSRKDRQEIQQRNKLNERSRDDARQRLLAELGAKYDTPHNILKLRLADECHWICPYTGNPISMDELIGEHPQFDVEHIYPFSWSLDNSYLNKTLCHVDHNRQHKQNNTPFQASGHAAEWAEIVNRVRRFSGSAAREKLRRFLCEDVTPDFCNRQLSDTRYISQLAARYLELLYGGRNDADGKQRVQVRTGQSTAYLRAELKLNTLLGDPDDNAKTRADHRHHAIDALVVALTDQGTIKKLADSAEAAAHVGQRRLFVPIDPPWATFLEDARARLAEINVSSRVSRKLAGELHAATVFSKPHAARDAKGKSIQVHHVRKPLASMSEHEVERIVDDRVRALVKAKLDLIGLPPDKAFQGNQNLPYLTAHDGRLIPIKRARIRKADATIKVGKGLAARYVAPGSNHHMEVVAILDSAGIVKKWEGVIVSRFDAHQRTSAGQAVIVRDHGPGKQFLFSLAGGEYVLIHDGENQRLLRVTAISDGQIEFVTHSDARPITERKKIPGARVRYSPSALQRQNARKVVVDPLGAILTAND

SEQ ID NO: 1504 - protein, 1081 aa, unidentified
  REGION 1..1081: note = Description of Unknown: Cas Enzyme sequence
MNASQNPSRVEIALDIGHSSIGWCVLGTSETTTPSILGCGTVIFEKDSALANTRRGHRSQRRHVRATRQRIARMEKLVVHLGIFTADELAAKHRANGGSPTPWLLAARVLASDGAQTLSWSELWDVLRWYAHNRGYEEITGEARDETEDSDESKQDTEKVENAKAALARFGKNSMAETICAWLDQDPLTERRGTTVSYKGNKCAFERALVLTETVRILAAHRGKLPHFDESLIAALTLDARAIAVPAIKLPRRYQGSLLFGRLATRYHNRIIGLCPISGEKIPNKYCPEFLRYRWAMQLANIRVAESANGELRPMTATERKSVHQAMVASGYLGVKSLKESVRSLPGIARNNLEQFLLHPDAKEGLILDPVQKLITADSKLSAVWKHLPDRVQIRARGRWRRGKSTTLAALRAAAIELGHDCSTFDAAVEVLCAPLPTKSKKKTPPPSRDELLSAPVDIRRELAKLSGRAPYARPLLAKAFEEVMAGGDPKAKGGSLEETEEVRDRRKARPIQQQTNNHLVRHRLQILGRLINDLVADPAYGSADPARFDRITLEVNRDLRKMAGLTAQDIAKELGQRLKQHGDAVKWLEQDPQVAPKISAGLIRKARIALDLGKRCPFTGESFNPIDLVTKRVDLDHIIPRSQRTSDSLDSLVLTFSTVNRWKGQRTAWQFIQDEGGKPVPDAPNLSIMTSARFKATVDALDTKGHLDDYRRKHRRKEWLLLPAYEEKARTFTPGQLTQTSQLARLAAQVVLEPFKSLQNQPQIVALPGSVTGNVRKAWNVLGCLSTAAPAVLDSDGAVKTKTEIRNVTHLHHALDACVLAFAAYFIPNRGDVWRLLSERRLSPSEQAQLAALRLFDFDSRGQFRLRDLAPELKDQIRTRLAERRVVQHVPADMSGLRVEENTRGIIKRENGRVFLRQRSPRDPDGSRPPPKKTDEPESKVVGLPQVSGFGGKLAALNGVRVIDGNFGIAILDKPDLPEPDRVAVVRFFRVSQKLHELHTINGGKKPRLLRKGMLIYVPKGSRKGTWRILSTKETEAYGIAVDLGAPDGCKLIKGNAPVSVLIHDGVEILSGNLAGSLSV

SEQ ID NO: 1505 - protein, 1098 aa, unidentified
  REGION 1..1098: note = Description of Unknown: Cas Enzyme sequence
VGADVGLNSLGFSAIQLDANGNPTALLKTLSYIHDGGVDPTQNKSGTTRKAMAGIARRTRNMRKRRRHRLNQLDRQLYQLGYPVDDVPESEHGLYEYWNVRSALATAYVPDKDKRDRMMVMAIRHIARHRGWRNSYSRVETLFEDVEPSDQYKDLKQRVETRLGMKLDDDMTPAQLVALTLSDRDENFMRVRTSTKYGEGVLPSRLMQSDNARELRRIFTVQQVPEDVWKPILRTVFHCASPKGSAEKHVGTDPLDSTQKRALKASIAFQKYRILNVITNLRIRRKGEEPRPLTVSEKQDVYELLTTAKEDVEWLDVCAVLDIERNELKGVGTLTHDGEERIGNKPPVLDTVIRLHGIKNTKLRKMMDAWWDVATEGERAAMIRLLSNTIDLDKVRDLIEYASPIEFIDGLDEDLLTPLDSISLPVGRAAYSEKTLTRLSKRMLETEDDLHYAIRHEFNVPADWKPPVPPVQEPTGNPAVDRVLKAFNRFLSQCEQQYGIPESVSIETTKESFSSIAFGRTLDYERRQRRDKDNQMRAAIREDMKKQLSNGGSFKVHDYDIRRWEIVQSQNNTCLYCGATSPRFSFDKSELDHIVPRRGVGSDSKRTNMAAVCPECNASKSNVPFAVWVRSDYAREHGITMNDVIARVNQLMFPPSMNRKQVGQVKKSIISRLKQTEQDEPLDNRSIESVGWMADELHRRLDGRYANKTVKVSTFPGSITYEARRASGIDGQIHFIGAQWKTRLDRRHHAVDASVIAMMNQSVALRLAERHYLRESQRLCGTPFGQADWKQYPNKNTPGYVRYQQWIEQMKSLLHLLNKGLDEDTIPVVRSRRLRLGNSTAHDATVKPLQYVRLGDALSPTLIDHAITPQVWKALTRLPDYNPQTGLPANPNRVITALGEVCHAQDEIGFLPGNNAQLYVNGGAADIGGTIHHARIYRCEQVLKNGKRKTFYGMVRVFQCDLMKRRKNTDLFRTPLRPADVSLRYADGKVREAIALGNATCIAQLTVNDEIRLTPEVMEDTCPEYSRIFHTDSGVERRFTVLGFPTSTKIRLAPSVISEEGLDKLKEQGVEIPVKVEKMFKLHTYTPAISKIGPLLEC

SEQ ID NO: 1506 - protein, 1274 aa, unidentified
  REGION 1..1274: note = Description of Unknown: Cas Enzyme sequence
MEKLDYVLGLDLGVASIGWAVMEIDENNEPINLVDANSVIFESLDNDSGKLYNVDRRNARGARRTLNRRKERIRRTKNLLTSSGFLSDDELSKLYSGQIEDIFEIRKKGLTEQLNKNEIARLMIFYNKNRGFKSNRKTDDLELEEELKKLEKNNGKISEKASDNNANDEKKLKPLIALNTKRLQEENLMPIELIFKLKSEEDILGFKNKEGVYKFGFKRDQIEKEIEYILERQELVSKELLEKYMEILKSQRDFSEGPAKPSKYRIDWESNTGACKYTGEKRVVAGAPSYEIFCMLQKLTDLRYIYVSDDTKKGKFKLEKEQLNKIYDKAIKNKKVTYKDVLDCLNDENIRILNIPQLDVKDYKKIKKDFEGELTEDQIKELNNKLNTERQKKSIFELKQYKELISKFNKNDIKEDKIKELGGIDFLDKIAELLTYAKTDKKLDEYHTKERYKNIPEKIIEKIKTFKTLNKTGNLSLNLVRKLNEKMLEGNDYEKSLSSLGYSIKINDNWDKFPTVAQIEEAFNTKITNPNVKHVMVILRKLYNTLLEKYGKPKKVHLELARDMANDFSTRNNIKKEQNENRAYRELKSFEVYNRNSDLVGNKNRLSNDDILRFRLYDEQKGICIYSGEPIDKSKLLTSDYQVDHILPYSKSADNSFENKVLVYAKENQDKKERTPYQWLKGTQKWLQFKHRVELNNHMKDKKKNNLLFTDEVKIDEFLDRDLHATSYSSRLALQVFKYLISPDEKDIKDENALYIYHRNVVAFNGAMTSQLRNFYGLNRFTHSFESEDLKIGKNYRIDEIKYTKDGLTLVSKNEKRGLEISEERKIEYTDKSKKTFKIETDRIIFEEILRKENIDNISNELKGKYVEDITEKDFRDILDRNENIPTELISTIYHLNALLKQKINSKNRENHLHHALDATLLTIMNHSMQQRLIEFNKILQKMSNSPEKYIDEETGEIMTYKEAVEKLREYIDVKYIDLYNKKATQTYKIPGTNEKISLSLPYVNFIEDIKNIIFVKDENDSSFKLPYHVFKKKKSGQLHKATLFGESKGLVTKRISVFEIGKNLKDLFDKDGSQKEIYETLLKWLEEKSKDYPKLKNGHIIKKVKIVDENKDKLIKLGEKRYVQMGQTTVKILVLKKKDEDGYRMASIGRYNYNKIKKGEDFKLHVWKSADKADGFINYSEIDNQYCKLFELHPSELIELENQKGGKIKCKVVGFTGGKLEIKSIIGDSTDLIRNGVFVNHITRYILTISTIKNIRKVKYNILGDKVCHSGKY

SEQ ID NO: 1507 - protein, 1221 aa, unidentified
  REGION 1..1221: note = Description of Unknown: Cas Enzyme sequence
LKALSEHWLEHEFYRTAIVLGIDIGLEGIGLYLRRGPQEIYARSLILELPQAEALADRRAKRAWRHCRKNRKRRLHRLKLLFAKYGLPWLPAERMSRSNPFKERLRAVTTGVASREALSICLRSCVAHRGFDYGGTEEGQYPWGGSSKLSDATQWMHTAVVTNELKDIIEDKLDELEADKSPEERRAAFRELLRQRLDWSLQHNIEMILREHAKGGHDNLRPRARGVNFPRKQVWEHIEKIVRHPRHREFLPDPEAFLKELGIDPNRAGGASAKERLANAARARRKAIFFYNRKSRPEMERHWATKVNECPYAHRLDPGLAGTKITCGENGELPIRKWSALEFSATRRVEMETIFGKGKEKRIRRSLHSLSGRVVGKILETIERHDRALNSGDKAAAPSWDEVKAIIEDDLRTLADAKVKLATSKKGDWNETFLAQLRNLTLPSLANRKQRASLSALAAERLFALATHDASDIDPAQFAPRLKAIGFYDWRRAATVDFNPYRQVEVLLGRRIKRGKKRGQLAESCQGLLRRIFAEHSEALDSSAAPDYCVIEVIGDAPRTTKQAQEIKFAQDERGQKRRELFAARNLEDSGVASKRRRISLWDQQKGVCPYTGNELPKDPLDPSLELEHIFPAEMGGLSTDENLVLTSRTVNSDKGKHTPLQFANKLRVPFDQLVAHTQDMRWSAKKREIFAWGTLREDKDDQKSHYLPDGVSLRVPDFGNTTRTAQLARQLRAEVMRWMHVEDQPDEAARRIGTPSGWLVAQARKSWLAASDYQKVRNNLTHHLIDAAVLAHIPPREGMNSIICKGIFYDVRERVRDEATGITSHRFLTKALPELSPLPRLKQWLPDNGEYAVCPVLKPRHQSKTQSLGDATFWRQVRQGEPALAQRTALNPENITDADELHATLQRMRVDWNKQKQQTENKIPSRDALQNWLDTATPATKADKHKPIPPLKLTDGTPIKSLWKFDSKGSLSSPVGWSGKRNLDGKLRELRSISLKYDRLELWLGYDHKQAERAHKSNTPDWEQSGWVYQKRLIPDARALRHLKQMGFSFGRDKRRKAPAFMQDKPDKPETHLSLRDLVLGGRLLPFSCNVGAIKKGDEFLLHLLPDGSVRKRTPAGQAEPAAAFATFYAVTALSHEGGNLRVELKSRLFKEKEGTPLERFPGDLTTRKVTVSADLAFLLGLPPAAVAAQHHGLRPPPPRIEHPKATTEMIPRDANPRLL

SEQ ID NO: 1508 - protein, 1225 aa, unidentified
  REGION 1..1225: note = Description of Unknown: Cas Enzyme sequence
MATMKYVLHSPLSKNASTPAAEIEKLSAKWLEHPFYKSDLVLGLDIGIEGIGIWLRKGATPLFAQTIVVELPEASPLAKRRANRAARRSRVSCKKREAMLKGWVVKYGLLTEERVNEIWENPSIFQRGFEHRYRAIQKSGALKSPEALVSCIRHCLQHRGFDYHLSNDAAFPWGDGMDDASQIIQWAKRAICPPGAVKIWKQLFSDASWSDKGEKWDKVMAALDETVHRYGSQPIETHLAKHFREKNHPNLREAARGENFPRELIKEHLRLICKNHESFFGSKEKLDAALTELLGESDQKLIPDSIIDFHRKTQSEIESLWKRKTNDCPFIPFLAPAGTPAKEKCSPNSSPEIRRFKLLQFLSERTFVAMDGNRIERTYANADLHAALMGLLETDISATSAAMPAPSRTKLGKRDLKKLVETAAKAKLAPDSVSHNADFFEQLADLLFPKLSVLKERAALSETAAKHLNDLGMENLSEFQADRVRGNWSETYYQWRRIATLGGPIYPQVELLLGNPRQYDNEGNTKDRNGSNPQHHGILRRLFAGQFKDAHGNTVDLSTHLGGKKVPDYIIIETLGDIPRNADQRRDLQKEQKERREAKGKIFEKYNLPKDATSDQIKRALLFDQQTGKDGRAVCPYTGADLGDSALATDLEIEHIYPRESGGISEMLNLVLTRRQTNGDKGKNTPFQIAGKTIGKTSFSSWTDMKKRVESAMKWKKAKRELFCREETTCPDWSNTTRVAQLARQLRDQVIRWIKLDRSLDENERANEIARRIGTPSGAMTAACRESWKDALPDFMSGKKDRLNFRHHLYDAAVISHIPPREGMNLASCGGIFVSDFASGRGWMTIALPGLLLDLNPFQEATQNVCLVFKPKSGKSKTSRYDSTIYSPTDSDGERWTRFKGDLAEWRVDPKMSLEKIKQCLRAARITADKLPDKLIEKWYHQEPPKDAPAHPLRFPSFKDGVPGQKIETVTRKITKPCAEPAYGPHFDGKGNIIGWKVAQESFIRCEIWMTEIPGKNGVPETKFYQRRTFHPRHLVNLQKRQLTDGRFLSLKLSLSESDLHEIGLVAEAEEVKELQERLASKVKKGSKKLQKNATGGDLFESGDVGLPAALPTTTSLQAIYCEPIPIPPMATKVGCFRKGQVLMVPLDSSGKFHKRGTLPKNVEPAGGWWAYAVTSIKSGGEIEMKLAEYKPAKPDEQTSRRKAPDSLRPTSSDDLAFLLELQGR

SEQ ID NO: 1509 - protein, 1084 aa, unidentified
  REGION 1..1084: note = Description of Unknown: Cas Enzyme sequence
MVASKNPARLELSFDIGHSSIGWAVLSIPTATPLPDILGCGVVTFEKDGALANQRRLHRSQRRHVRATRLRIARMEKLLAHLGVLTAEQLAAKHQASGGHPVPWLLAARVLASDGAQLLSWPELWDVLRWYAHNRGYEEIGSEASADDAPADDEKAKDAEKVANAKAAMSRLGKSTMAETICAWLGLDPLGERRPTHENYKAKNSAFERPVVIAEVRRILAAHRGKLPALDDAVITALLDDARVLSIPTIRFPKRYQGGLLFGRLATRYHNRIIGRCPISGEKIPSKNCPEFLRYRWGMQLANIRVGTDAKGDLRPLSIEERKTLHAAMTSAGHLSVKALKETVRSLPGVVRDNLENLLLHPDAKEAFIFDPAQKLITSHPHLSAIWPHLPERIQKRAKGRWRHGKSMTLAVLRSEAAALGHDLTAFDAALSALLSPDAKKPKGKKAATLTREGILSAPLDIRRDLSRLSGRAPYARPLLSKAFDEVMAGNDPKAKGGCLEETDEVRRRRETRPIPEQTNNHLVRHRLLILGRLLRDLIADKSYAAGDPARINRVTIEVNRDLREMSGLSAQDIAKELGARLSNHKKVSARLEKDLPEGTPITAGLIRKARIADDLGWRCPYTGVDFEPVDLIEKRVDKDHIIPRSQRPTDSLDALVITFNTINRWKGKRTAWQFIEDEGGKPVPGAPHLSIMPMNRFKEFVEKLDARNGHEEDRRRKKRRKEFLLLEKYEEKSGGFTPGQLTQTSQLARLAAQVVREPFTGIKEPPTIVALPGSVTGTVRRSWDLLGCLSAATPAVLDSDGSVKTKTEIREITHLHHALDACVIGLAAHFIPNRGDVWRLLSERRLRPEQQAQLVEALPTKLLDFDAQGGFRLRDLPDELKQQIRARLTERRVVQHISRDMNGLRVEENTRGVIRRENGRVFLRQQKRDADGKRIINETNEPEGKVIGLPPLGHTGGKLAKLNGVRVIADNFGVAILDDEKLPPEDRFVIIPFAHVWKRVAELKTRNGGKRPQIWRNGQIIELKKGKRAGLWRIFSIKNNTSGMALDLGPIDAVKPIWINCLLKSLLRDGARRLNTTFSGADI

SEQ ID NO: 1510 - protein, 1554 aa, unidentified
  REGION 1..1554: note = Description of Unknown: Cas Enzyme sequence
MSKILGLDLGTNSIGWAVVDDTADKILGTGVRIFPEGVENLGQGNKEKSKNAGRRESRQSRRQFFRKRLRKIKLLEILIDLEMCPLSKDELQQWKYYDKSKGKAGNEFPASKKFKQWLRLNPYELRVKALNEELTNKELGRVFYHMIQRRGFISNRKSKEEGKIYSGKDNIAGIDETKKQIKKNTLGSFLYTITPKENQPYKTIVDENGKELRARARYTLREMYVDEFEKIWAKQAGHLKLNSKNMSVKKIRLVGNPYRYGKKEKGLKKRLQFKINYLKNKEIKSELLIDKNNLKNTKLISETQIPLKDFLAGGEIIKQEDSLLFYQRPLRSQKALLAKCTFESRIYYDKKNKKWIFKGPAPCPVSHPDFELKRAFEFINNIEYGHKQKLNDQQREIVLNLINSQDKNFDFANIPKALHLTYEKFNFDDKHRVPGNYTHKHLKPLFPDDVWFREYKIWVNGEEKTEFGYERIWHCFYFYKDNDKLIVKLQNNFGLEEKNVEKVIGKLQEDGSRKGGIILKEGYRNLSLKAIRNILPFLQKGYQYSNAVLLGGVKNAFGNRWDYFKTSWEEIEKYIIRINSDKDNKEGEAIEKIKAFLANPNNDFGFKNDDKAFLDLYHHSQETSRKEELQNELGEVKNLRNPIVQQVLFDLKKLVYELSKEYLENGEHFGQIKVELARDLKQSRQNRIDQWFANTDRERENTEAREVLDEFGLAHSRENIHKYLLWKELKEQSGTAVCPYTGLTINITDLFGKENKFQIEHIIPYSKSLDDSFGNKTLCDAEENGKKGERTPFEFYGSDDKNWESISERAFRVLPYNKAKRFTSKTAHKTDFLSRQLNDTRYISKEAKDYLSQICKDVRVFPGQLTADLRHKWGLDTILAPPVEVNNENLSGSVWAKTAKNGKSIDYYPVFNKRPKNKKGEFVIVGEVKKEKFTSKFLNLKVDVEGIKDGKYFAKIKVRQIPLELVRIYKPMPGTVENEILLFGKVDKDKKFTSKFLTQKIDANAYEPDKNYWAKFKVDSEKTIYIHSTDKKGIPKPKKDNILLKGRVKDGVFSSKIYTCKTNVQDGWYYALLKVDTGNNFYYEIVNKRPDITDDTLIVSGNVINGGFLSEIDRTHLYEVDTKEEGPHWAVFKIQSNPFGFVLMKNAEPKYNKNIEELIKGSILLTEIIEVGKETGEIVNEEQKNMFFPAKNRSDNRHHAIDALVVAMTETSFLQKLSTYNANKKAKYRGKQFNKASLSFDMPWDTFRNDAEIEVNKILISHKKVNRIINVKTTRIKKNGKLTISKGIAARGQLHKEFVYGKRKSPDSEQGYHIRKSLESLQTKKHIYKIVDPVIRKLIFQRVDELGGFTGNKEDKIPKNTFFKVDDNNVKQPQIFLPNKKGEPVPIKKVRMREEISNAEKLKDHINQYVNPRNNHHVLIYKNKDGIMKEDVVTFWTAVERRKQKQAVVQIPPEDSDGTIVTTLQINDMFLLGLNEEDVNWGNPDTELLRKHLYRVQKLSSMFFEFRLNMESTLNRDFYPYYIRIQSFGDGKTGWITHKPIKVKISITDKIEKF

SEQ ID NO: 1511 - protein, 1263 aa, unidentified
  REGION 1..1263: note = Description of Unknown: Cas Enzyme sequence
MKKILGLDLGVASIGWALINCDEYDQPNRIIDLGSFCFQELEDGKTGKLDNVERRNKRGTRRLRRRKVYRLKELRNLFNEYKLIKSDEDFYQKVKSNKKSILELKVKGLHQSLTHDELILVLYNYMKYRGFKSNRKSDEKAKEGVMLKEINKTNAKLTNEYTISEYLQDELNKLDNKSKKYHNHEKEYKLTVERKNYEFEIRKLFDTQISFNNITDDFACKYIELFKKQRSFDEGPDGRYSKYGIDRKTHETLISKMTGKCKFRGHEKEARAPTNSFSAKSFILLSFLNNLRFYYDGESNYIILANNSKYYKLNKDAINLVYKDLIFKKEISYLNIFNLLKMDLNLLKVKGLILSKRAEKELFKSFVKNNENLKDAKYIEWPQEFKDKLLYEKNKKMYETKVIKIDPIGSKIFKALSNDYDFNEIGNIIDKVATVLFTYKSDQAVKEHLKDVPNNIINIAIEIDSVTGTMDQSIELCKELIPFLKEGLSYDEAMNKIGLDHALRNDRSVNKTGEIHYYLPEINSIIKETRITLKNPVVKNTLIKMIDLVNAIIKKYGKIDSFSIEFARELKKSFKERNQIRQEQLDNMEFNNSIKLEMLENYPNLFKDLYSIKKEYFIKYKLYKEQNGYSPYTLKMIDNKKIFDNTCYQVDHIIPYSISFDDSLSNKVLVETKENQDKKNKTPLEYFKSINRDSEILHNFIKNNNVSEAKSNNLLRIDLDEDFRKQALESSAYIARLTKKIISFYLLVDKSGNAIDDSKIIVLNGSITDKLKEFYGLKGKTHSYACGKDYKNQKECKFIDCKIEDKEIYFKYKMFDLSKEDNNDYYEFETRKWKLKVAKKDKELSYEDKKFNDNFIIFKENINLLLNAIDKRKLSNDEILKVINGLNSSKIIKDSFEYFMIDAISDCLNKINEKNRDNDLHHALDAAVIATTTQKIINNIENHFSKEENNNENFTKPPLPYPEFKDELLIKVYERDINVLKEKLFNLNNYKKISNEKDIIETTHVLYPVRLPKKVGPTSISKETVYGEKSINGEDIITKRVSINDLKKEDIENIVDKNGGNKRIYEIVKLWFENKSKEKYPILIKHTKDGKDVSNYIKNVKINTNKNKEDLVKLGNKRYAENDAFLLTRLYKRKSDGKLFGTGISYYQIFKEKKNENVVYKLVGSKSWKDTIYVNKQEILENFVLFLQFNRYALIEIKFEDSLKSKLYYAGGLTNGLLELYSIIGDNYDIKENKFPKDGRIRKLISNIKSIKLRNISILGYIS

SEQ ID NO: 1512 - protein, 1292 aa, unidentified
  REGION 1..1292: note = Description of Unknown: Cas Enzyme sequence
MAKILGLDLGTNSIGWAIRDTENEGNQIVDSNVIVFPQGVGEEKGVEFSLASERTKHRASRKLYRRRKQRKTDLLNLLIDNGFCPLTTDELLLWSVCKKGQEMKYPTDNYDFSEWLKINPYEVRAKAVSSSISKLELGRALYHMCQRRGFKSGRKDADAGKDLIQFEKEKEILEKNGFKTLGEYCFDLLKRYEKVRKTKFSADDQEVNSSRISYVEEFNFLMKTQNVEKELADKFFEAIFFQRPLKSQKGSVGKCTLEKTKSRCAISHPLFEEFRMFQYLNSIKVKERNNDSFVFLSDYPDYYKIAQDKFYRVSAKNFKFIDISKSINNQAKKESLFFEFNYNDKYPVVGSPTISKLIEVFDGQNWKDCKEIIQSKYKKGDNKTVDELVDELWHVLFFSGDFVNDITSEKVKSFIRDRFSISEEKINYYESISLKQGYSSLSKKAIVKILPYLEEKIIYPYAVFFANVDAIIGKEKWNENKQFIQDTIIDIISRYKDQILKIDIVNGLVGDFIKEYDNSNYDYILDDTDKKNVLEKTKLFYGKYLWDKMPESEKEALQNEIENTFQKQLQKRRIGGYYLSKPRIDEIIKEFLIQEYKVSKEQADKLYHPSAMDAYPQSQDGFLGLPFTNSIKNPMAMRTLFYLRKLVNTLLKEKKIAPDTEVIIELARELNDKNKRLAIERWQRERENENKKFREKLEELAKDTNSIVTETDVIKYRLLQEQNGKCLYTNGTISCEKLLGSNPQFDIEHTFPRSKSFDNSLVNKTLADKKFNQIKGNQIPQNLDDKYKQNFINNTLHWKETIESLEEKIEQQKYFSKVASTVEQKNRAIQQRHYLKLELDYWKQKLYRFTATEIKPNFKNSQLVDTGIITKYSELFLKSLFQRVFPAKGSMVADVRKSWGLQEKDRNFHYHHAIDAVVLSCMDKNIRDGLAEAFRESEENRYSDKFKIKKPWNTFTEDVNELKNNIIVVHNHKNTIDKQTIKKLRKRNKIQYDKLGNVIYEKGQGIRASLHKDTFYGKIEREGENNEKEFWFVIRKPVTSAFSDAEVNTIVDEGIKVRIIKHGLKNIKTPEGWILLPSEKDANGKEIKEMLIKKIRVKTRNTNLPKIKAQSHFAQGKRKEHKESYYTTLENIFAMAVYESVNGKGKTEQAFKTVSAYDLAKHNQGKAQLEMPVEENIIKNKGKKNEILIPLSKVLKVNQMAIFYENNPEELKSISKLDLSKRLFKITVFEGDGRIRFRHHAQGGADKDLKEESSLDFEKSAQKLRISLSNIKAIYEGKDFIMHPSGKIDFLI

SEQ ID NO: 1513 - protein, 1467 aa, unidentified
  REGION 1..1467: note = Description of Unknown: Cas Enzyme sequence
MSSSNRILGLDLGTNSIGWAIVDKEGSEFSLIDKGARIFSEGVKSEKGVESSRAAERTDFRSARKIKFRRKLRKYETLKVLSENNMCPLSIEEVIAWRKSGFKNYPLNPQFINWLRTSEEDEINPYLFRDKASRKKVALFELGRAFYHIAQRRGFLSNRLDQSAEGIIELHKPALEDIIENALSFTELQIELTDYFQDRDLIEQKAADLDEGEKKLKTIYNSFLKTIKNNPKDFDKTKILLSERLNKKEDLGVVKQKIGEISQAMIVGNFKTLGQYFCSLYNKGKIRNQYTARDEHYLSEFEVICLAQGIEGIIATEKLPEKRYVGLAKELYKAIFFQRPLKSQKGLIGKCIFEKSKSRCAVSHPDFEEYRMWSFINTIKIKPPSDEGWRFLTSEEKVKIIPKFLRKKDNFNFEDIAKELVPSGGKYLFSKVSTTGISVDYLFNYHLNSSVSGCVVSTSFKNALGDDWKTKIYTYETLNKRGENVTRNVDYNDLWHLISVSTSDLYLQEFALTKLKLDNKKATLFSKIKLKKDFASLSLTAINKINPFLREGLLYSHAVFMANIENIVDADIWNNLDDRKYIQTKIAALIATNTFDNNLLEIINGLIKECKTGGHFYSKEAENIYKSDLDKKVSAFVILNKIEDQKESIMGLLFPIFIEQLKKHEFISIKRLDEKVFDFLDGQNDDGQVFCNSKNKLKKLYHPSDIEVFKKKIIKDEFGNEKVVLGSPLTSSIKNPMAMRALHQLRKVLNTLISEGQIDHKTIIHIEMARELNDANKRKGIQDYQKEIENNRKVYIEEIKSLYKAATSIDIEPTEDDILRYQLWMEQDKKTIYEEQCTNISISQIIGSNPDFDIEHTIPRSRSQDNSQMNKTLCSKYVNREIKKNKMPIELNNHSDILDRVAPWKIKADKLTSEIEQISKSIKAATTKEQKDRKIRLRHKLNLQKEYFKGKYERFTYKEPKVGFKNSQIPDTGIITKYSQAYLKSYFKKVESVKGGMVAEFRKAWGIQESYMKDGKKYYQVKDRSKHTHHSIDAITIACMTKEKYDVMAHAWDLEDDLDKSKYKLMKSVLEQSKPWLTFTEDLKKIEDEILVSHYTPDNVKKQSKKIVRIRGKKQFRDENVLDKKGNTIPIFGKRLNEVGISSKIEGKDYFKIIRNNETVYYEYLFDKTGNIIHKKIPIFNQGDTIRGTLHQDSIYGAIKSPLNQEEIRFVIRKDLESLKASDVENIVDEVVKDKVKEAISAKVLLLSSNPQQKNKLVGKVWMNEEKGIAINKVRLYANSVKNPLHVKEHALLSKSKHEHKQNVYAQNDENYAIAIYEGIDEKGKLKRGYESINNKDAGSYYKLSNKEFSQSYDIIMNPHDKTGLPLKYILKKGLMVIFYKNTPSEIFDLDLINLQKRLYKLSKFDAQGRLTFRTHIEAKQASELKENYSVDFENPFEQIRLQVSKLDIIVEGYDFKITPSGKISKM

SEQ ID NO: 1514 - protein, 1077 aa, unidentified
  REGION 1..1077: note = Description of Unknown: Cas Enzyme sequence
MNASPNSSRLETALDIGHSSIGWAVLSAPNDAPPAVLGCGTVIFEKDSALANTRRLHSSQRRHVRATRQRIARMEKLLVHLCVFSEAELKAKHVANGGSPTPWLLAARVLASDGAQTLTWPELWDVLRWYAHNRGYEEITGETRAPEAELTDTAKDDTEKVENAKAALEKFGKGTMAETICAWLGQDPLGPRTPTTENYKAKNCAFERPLVIAEVARILAAHRGKLPHVDEALIAALMLDARAIAVPAIRLPRRYQGSLLFGRLATRYHNRIIGRCPISGKKLPNKNCPEFLRYRWAMQLANLRIADSANGPLRPLTATERSGLHAAMLQGGALAPGELKKLVAALPGRVRDNLAQFLIHPDAKEGLVLDPIQKLIVGDARIAAVWPHLPERIRLRARGRWRRGKPTTLARLRAEAAALGHDCTAFDAAIEALCAPPKKPSKKNPPLAREELLAHSFDVRRELAKLSGRAPYARPLLVKAFEEAMAGRDPKATGGCLEETPEVRRRRESRPIAEQTNNHLLRHRLQILGRLLADLIADPAYSAGNVSRIAQVTIEVNRDLRDMAGLSAQDIAKELGQRLKQHGDAVQWLEEDPQVAPKISAGLIRKARVALDLGKRCPYTGEEFSPIDLVTKRVDLDHIIPRSQRTSDSLDSLALTFSAVNKWKGQRTAWQFVQDEGGNPVPDMPNLSIMTPARFRAQVESLDTKGHLDDYRRKKRRKKFFMLERYEEKERAFTPGQLTQTSQLARLGAQTVRQALPHLEPHDLVALPGSVTGAVRKAWDVLGCLATAAPGILEADGARKNKTAIRDITHLHHALDACVLALASYFIPNRGDVWRLLSERRLSPAQQAELAALGLFDFDSSGRFRLHDLAPELKEQIRLRLAERRVVQHVPADMSGLRVEENTRGVERYENGIVFLRQRKRDAGGKVVVNRTREPEVKTIGLPRDGRVTGKLAAINGVRVINANFGVAILNDSKLNPAERFLIVPHERVWHRLNELRAKNGGKQPLIWRNGQVILIPRGQRSGLWRIFSIKNNTSGLALDLGAVDAIRPDWINVLLKSLVRDGASVIRTVMTGGQMA

SEQ ID NO: 1515 - protein, 1062 aa, unidentified
  REGION 1..1062: note = Description of Unknown: Cas Enzyme sequence
MKYRIGIDLGTNSLGWAIVELKEADSGLRAGPLVDMGSRIFSDARNPKDKSSNAAQRRGPRGMRRNRDRKLMRQESMLRELTAAGLFPAREDQDARHALQNLDPWILRARALDDPLTPFEIGRALFHLQQRRGFKSNRKTDGAEDGAMFDAIQEVRDRLYLEDARTLGELLGRPRLQQQAKNDDPSQPSVPLPQARVKASMNGSKMTYDYHPDRAMILDEFEAIWRAQVASHPNILTDQAHSRIRYVIEHQRPLKPQRPGKCTFLPEEERAPKALPSAQYARILQEVNNLRIGAPGEGKRALTPEERVTVVNHLMKPSSKTAKRTFKAIRKKLTIPESQTFSHESRKRDHLVGDLTAAMMMQEKSWGPDWLGMDRAEQDEIITRLMASEQFHEFGPWLMTEHGLDEIRARSVFNTRLPDAHGRLSKSALDRLIPHMEAGRAYDEAATLEFRDHRAIGDGEIHEDALPYYGAILSRHTAFEKDDPENVEEQFGRVANPTVHVALNELRKVINDLIIRYGPPMQVVLELARDLPLSDRGLKELEKRQRDNQDANDARRAQLESLKITDSYDNRLKLRLYEEALSAFDGVALCVFSGRAISKTELFDSAVEVEHLLPLSKTLDDSFSNKVLSLRGANRLKGNRSPYDAFSASPSEYDWEMIGQRAARLPASKRWRFEPNAMDKWTERGGFLDRQLNDTRYIARLGKTFVEALFGGQGLKGQARQVWAVPGRLTSDLRHYAGFNSLLPGGNRKERTDHRHHAVDALIVALTDQAMIKRAADLEKRKDRVAHYEILSEMAEPLKRYRNAAKDRLSKLVVSHKPDHGFQNAMHNDTAYGLTDLPARKGQVIVVTRKALDGLQPKDLDRIADAALLAKLKSATDGLSGKAFTDALNAAGKKMKPPVYRVRLREPMSEKSLVTIRHGEDAQHIKAYKGDGNYCYDIWMGDKGRWTGEVITTFQAYEMSKADKNWWRNVTGRAGQPLIMRLRKGDMVEMDWEDKKVSTIVYKFSDGKINLALHNEANASARVRAGDLPNIQKAPSSLQKANACALTISPAGRVKRHNPRAA

SEQ ID NO: 1516 - protein, 1105 aa, unidentified
  REGION 1..1105: note = Description of Unknown: Cas Enzyme sequence
MSINLGLDLGPNSIGWALVDDCFHRIVAAGVRIFPEGVDNFDSAKEASRNETRRIARGMRRQIRRRSMRKKILRQALIEAGLWPKDTAAQRALESQDPYALRARAIDVNQPKLTKHELGRLLLHLNRRRGFLSNRKEKKADKEAQGMKAEIGTLAHELEQRNQTLGQYLYEKTLIPHDQRQPEDRIRRRHTARAMFEQELLAIAARHSDILTDKLLFGRHGRQPLQGRKPLRCMKGESLLQAAGLHGIIFFQRALYWPKSMIGLCELEPKEKRCPRFDRRAQRFRLLQEVNNLRYINDATHQEEFLKPEARTLLLDKLAKTEKLEFEKIADLLSKLPGMPAREQIKFNYQRGERAYLKGHITDARVAKAYKKWHELPEETKDQAVAILLDPSLGEDEVRRHLTESLGFKPDAAQALMEVDLPDGYIDLSLRALSQGREGKGLLYFMEQGMKYQAGKGTVDNGQPTDAIHAAGYLRSDELLRRALDHLPAPEKLKDTKIGDIPNPVVKRTLTELRKLVNAIIREYGKPDAIHIEMARNLKEGEKKRKAYSKHIAEIEKRRKEAAEEIEKFVKKSSRDDVTKYLLWLEQDRICVYSGRSISITQLFNGDTDVDHILPYSRCLDNSQMNKVLCFRDENALKGQQTPYQWLAHANPTKYEQVCQRAKKLPYPKYKRFLQKEVELDSFIARQLVDTAYIARATAQYLSCLFDQKTQGVLGLKGQLTAELRYQWGLHNLLTPEADEKVKVREDHRHHAIDAIVIALTNRSRLQGLSRIRKQGGTHATGEVLPEPWPTFRQDVQAYVNQIQVSHRPSRKVAGGLHEETMYGLHRNDAGQTVANEYVVRKPLEALSANEIPSIRDVAVRDAVIRRLAEHGYEIGRGKTIAAQDMKVLFGDPANPLRLIGKKTGTQGPPIRKVRVIKKEQTIRPIRSGDQTVYVKPGSTHHLSFFEYQEEGKTKYEAVWTTMLDAADRLKRQTHALSQVRQKLEAQGKGKKIRKNDPRLIQAMQQIARDIPLITRVHPQSPEAKFLFSLSRGEMVLAQVGGKPQLLVYNTSASTAGQMWFYHHTDARPAKDKKKFSFMVNTLLGKAQARKVSIDYLGRVRWARD

SEQ ID NO: 1517 - protein, 1429 aa, unidentified
  REGION 1..1429: note = Description of Unknown: Cas Enzyme sequence
MKRILGLDLGTNSIGWAVVNEATAEGEKSQIIKAGVRVIPLTVDEQINFEKGASFSVNQARTDKRSARRGLQRYKLRRKKLIKTLIDHKILAEDTVLAEHGKNSTYQLWELRAKAAEQQIPLEDFARVLLAINKKRGYKSNRKAKGQDEGQIIDGMEIAKILYEKNLTPGEYVASYLSESNKYVPDFYPSDLNHEFDKIWNFQQRFYPNQLTETLKEELKGKNKTQTWAILKSPLNLVGIPIKDTQGKVLKGFNFKLAEYNLRKLALTEQIEPESLAIVLQNINAQLKSTSGYLGDMSDRSKSLYFNNQTIGQQNYKLLQHNRHTKLKGKAFYRQDYLDEFDKIWSTQSQYYPEILTQDLKTQIGEITIFHQRPLRSQKGLISVCSLEGKLQELTSKRTQNPYKKLIGPKVIAKSNPLFQQFKYWQILNNLEIRNKQTREVLKINELDDDELTLRNILASELDIKGKLTAAQVLKVLVLKDSKKWELNYKEGIEGNRYNGALYEAYGKIIELTDQVVDFKKPAISIKEQLTQAFINLGINSEILTFDAYLEGQNIEQQPAWQLWHLLYSYEGDNSSSGNDALYQQLKAKFGIKREYAEILATVHLEDDYGSISARAIRKILPHLKAGDNYADACAKAGYNHSNFLTKEANKARELKDELELLPKNSLRNPVVEKILNQMINVVNQITETYGKPDEIRIELARELKKSAAERESLTKVINEATKKHDKIREKIAKLPQFTGGVRITRNDIIRYKLWEELITNGNKTLYSDTYIAEEELFSKRFDIEHIIPKALVFDDSFSNKTLELRNVNQEKSSQTAYDFVSEKSMSELKDIDSYEQTIISLYNKGVITKAKHDKLLKPAHKLEDGFIERDLRNTQYIAKKAQEILTEIVRDVIPTTGTVTDRLRDDWQLINVLKELNWNTYDQLGLTHEELTKEGQKIKQITDWTKRNDQRHHAMDAITIAFTKRAYIQYFNHLNARRGEFSKSNKQAKIYILNGKNLDAQQLHQHIFAIEQKYTYINDNGKRSIKPPMPIADLRHAFKTELESILVSYKAKNKVVTKNTNITKKKQGKNKQKTLTPRGQLHKETVYAKGKHYITKDEKIGVKFDTDKIALVANQRERQALSLRLQEYDNNPKLAFTGKNAPSKNPIYLDDAKTQLLADKVKLAWLETRYTIRKSIDKDLKIDKVIDKRIQSILQQRLEDNDSKADKAFANLEDNPIWLNEAQGIQIKKVTISGVSNAEPLHFKHDHHGELIVDSYGDPIPVDYVQTGNNHHVAIYVDEQGSWQERVVSHYHSVQRAADNKLAVDTNYKQAQGWSFLFSMKQNEMFVFANEQTGFNPHEIDLLDQANYAVISPNLYRVQKIAASGQYDFRHHLETVVQRKTKEGANVNEKPLRDIIWKRFQSLTSLEESLPVKLRTNHLGQIVHVGEY

SEQ ID NO: 1518 - protein, 1484 aa, unidentified
  REGION 1..1484: note = Description of Unknown: Cas Enzyme sequence
MKKILGLDIGTNSIGGALISINEFGKEGKIEWLGSRIIPLDGESLSKFESGGQVDTKAANRRQLRGSRRLKQRYKLRRSRLIKVFKCLGWVTQDFPENFKEAVKQDHYSFDINDYMPISDASKLQAYKEFGTDKISDDWLVYYLRKKALSQEITLQELARIIYMLNQRRGFKSSRKEIKTEEDSEEEKWPKYEKWVEILTIKSITEISKEKDKTVFQIEAGNYVSQTALRYRPDWEGKQMEFEITRKTTKTGEVSYTFKKPETSDWEKQKAALHKDIHEWFEKGLCKTIGEYFFIQLRKDKNYRIRQRIIERELYKQELSAIWETQKRFHAQLIHTPELQAIAETLYQHNTNKRREILSNDLFHVFANDIIYYQRGLKSQKHSIDVCRFETKSYTKEGEVFTIGVKVAPKSSPEFQEFRIWQDIHNLRIYQREGLIDGKKQVDIEVTNRLITPEVKAALYELFDGAGEITSNTILRSIDKTLRPHEYFINLFASRDKLKGNETKSLFRKVFKKHNFSEGELLLQDKYLFNKLWHILYSLNDEREIKSALQKLKDQEGKKIVIPAEVIHHLSRQPELPRKYAAYSSKAIKKLLPLMRCGKYWNADDLQPSVVKRIEKVINNETDEDIDERTANLISNFSEKNDNYYSGMPVWLATYVVYGRHSERSSDEKYTTAKQIDVKKLIPQNSLRNPFVEQIVRETLQVVKEIWEQYGQPDEIHVELARELKKTAEEKAKINEANNRNYQEKERIKRLLTEFKQGNPQSLSDIEKFRLWKDNGGLESSKRFDELFNKKNEFVSPAEVERYLLWADQNHLSPYTGKPIPLSKLFDKAAYEIEHIIPKSRFFDDSFSNKVICETGVNKEKDKSTARLFIQQYSGHTFERGGLKFTLLDEDSYIAHCKRIFKGKKLKNLLAETIPTDFVNRQLNDTRYISKRLAELLYPVAKEKEGLIFSIGSITNELKDKWGLNKVWKEILKPRFERLEKITGEPMIIHDTEDFNKFHFAKEYKRVDHRHHALDALIIAATTKEHIRYLNTLNAAEDSEKQTLKYKLVKSGIRNFIQPWPQFTSEAREKLNAIIVSHKATNRVVTKPFNRYLKWVEKEGVYKKEFVRQTQPSEYGKSWAAVRRSMFKEPQGIIYLKEIVLKKLSDAIAIQIEKEKHRNIKGNKPAAYIYDQEIRPHIKNLIQQYNSDITAIKTSLKKSPLKDKDGNIVDSVRVAIFKEYAAKRVTLDASFDEKKIAKIPYSNHQPANGRKQTLPQILKQHLQDFGKPEAAFVGEGLDQLHKKLGFPLKKVTIYEAKDPETKFKGKYYETDKGGNVFFVIKQNLEGKREMYTLPLLEAIERLANKLPLVDAEEGYTYFTISPNELVYVPEEGENINTIDWSDTRKIFHKIYKMVSCSGSECYFLPHNVASLLLPYSAQTKKGEFGSLNKTENTIEGISIKRNCIKLKVDRLGNVIFPKKVSLFDEPGSTFEELKTSKSDKPLID

SEQ ID NO: 1519 - protein, 939 aa, unidentified
  REGION 1..939: note = Description of Unknown: Cas Enzyme sequence
TLSLSAIKKLIPYLKKGFKYSHAVYLANMHKVLGKQQLNEEIASDLAEAFYEIEKEVSRRRKIDEIVNSLIADHQNAAQRWGMDPDYLLDKDDINDVEQKTISVIGEKTWEGMEQEEKKIILDAVAKAYQTYLQQRINTPLNKIFPRKERLHNAVFNYLKDTYSLTDKAIKYLWHPSEQETYTKAKEINGVKFLGDPQPISRGFKNPMALKTLHQLKKLMNYLLKTEKIDDDTRVVVEIARELNDANRRRAIERWQREREKQNDEYRKAIKEILDECGVTYEIDKELLDKYRLWIEQNRNCIYTGKQIGFCEWFNGNLYDFEHTVPASMSFDNELKNLTLANGIYNKQIKGNLLPTQLPNYYYDATINGKEFTAIKPRLKFIEEKVETLENLLDEWVKKTSDDKNVKDAIIQRRHMLKMDLDYWRRKLDTFTITEYKAGWRNSQLRDTQVITKYALPYLKTAFNKVDVQKGAVTAAFRKIYKIQPRAEKKDRTKHSHHALDAAVLTLIPPAAIRDKILLRYNQEKDINPHNTYHESVREWNNFKTENILGIENDVLINFQPKHRTLTPTYKNVRKRGRQQFVKERNGEGKWCFKLDSKGEEIPMKAKGDSIRGQLHNDSFFAAIKQPVYLEKDGKFIPQTDGIGNFLFQKNEKRGDEIFYAVKPLTKLTYIAKYEDLDLVIDPNLRSYLKAELSRRMDKGLSFIQAMAELIWAFGKKEDKHGKPLNPIRNLRCRIKGGGGGLVNFPAEVRQFHAYKSKKPYKQQYYALNGETAICAFYQAIVNNELERIIEPYSILDLAKINEGTNIEDRVKPNYEKIIKKQRHLIPLYTVLRIGQKVLFYENEIDELKALDRANLAKRLYIVVKFEDGRISFKHHLNSMSEEELKKEMKRLGLPDSGATSNNFLNPIPKLRLSKTAFNFAIEEKHFEVKPDGEIKWLF

SEQ ID NO: 1520 - protein, 1359 aa, unidentified
  REGION 1..1359: note = Description of Unknown: Cas Enzyme sequence
MQTILGIDLGSHSLGWAIREISTKENQFTDYGVLTFEKGVGEGKSGEFPLVKKRTESRSKRRNYQAEKYRKWALLETLITAGMCPLRIEELDEWRKYKKGSGRKYPQSERFIQWLRFDFDGDGKTDFEALGFDKHESHYLFRMLAASEKEDHKALFRRHPEMLGRVFYHLVQRRGFRGREEEEAKTIMEGTKDHATRGVNEIRSLIDQHKTLGSALYYLQKNTKERIRKRYNLRTDYEDELNVVCRQQGIKVDSALYKQLYKAIIWQRPLRSQKGLVGYCTFEAPVKNEHKLFIRAGKKRCPVSHPFYEEYRVWTFINNLKITLPESIEREEYLQDKIYPLFYNTSRDFKLSSIFKELRKVGGEVKSKFPADTKVVSCTFLNKLEKILGPDWKVRYGWQDCLHNRPKSCPYSIEDIWHVLFTSDSREKLREFATAKLGLPEDKAEEFSAIKLTQGYATLCLSAIRKIIPYLRKGFMYNQAVYLANMHTVLGIKELTPDIINAFSREFNRLKNEFDEESKLREITNSLIRDQIYSDTRFGMDPEYQLDDDDRNDILRRIVDVLGKKQWEDKTAQDQAAWLDYISRHYLHFLQKPRQAKLDSVFQKPSRFHDKLFEWLQETYSVPDKAKQSLWHPSEQETYENAPEVNGKKLLGGPQPIGNGLKNPMALKALYKLRSLINYLLETGKIDEDTKVVVEIARDLNDANMRKAIEKWQRTREKENGEIGVRIEQLCKECNLGISLVSKEMIDKYRLWQEQNQICLYTGNTINCCDLFNGNKYDFEHTIPASMSFDNELKNLTIADSVYNRNIKKKNIPFDLPNYDQDIEIDGVVYTKIKPRLRFMEEKVEQLTGLLNEWKNKSRFASTKEIKDACIQKRHLTWFELDYWRKKFDTFTCREYKAGWRNSQLKDTQIVTKYALPYLKTVFRKVEVQKGTVTADFRKIYKIQPKTEKKDRNSFSHHAMDAAVLTLIPPAVIRDQILLKYNQAEDQGLPYTYHEPVRNWAKFHINHILSIDKTVLINFQPQNRTLTPTYKHVRKRGNQQFVKEKKEDGYWQYKLDKDGGKIPLMAKGDSIRGQLHKESFFGAIRQGENICLVERYPISSFTSLNDCNHIVDKEVSRIVRSTLEERISDGKTFDEAKMEPVHFPSGKEVIRKVRCKVLAGAGYLKFEKALDVHRHDYASKYDYKQYSYAQNEENTLCLYYEGIAGGKLMRAFRIVGLYELSRLRLKTVEKIKDERYYQSIQAGRGKNKFEIPLRCILQSGMKVIVYEKNISELQALDKEQLHRRVFRIYKFNEPAPSTAYVYLQNHLEARKDDELGGGDKDLDFGKYQSRVFLGAAKFNCAIENLDFRIEIDGGIKWLF

SEQ ID NO: 1521 - protein, 1398 aa, unidentified
  REGION 1..1398: note = Description of Unknown: Cas Enzyme sequence
MKKILGLDLGTTSIGWALVNEKENDNEKSEIIRLGVRVNPLTVDEKTNFEKGKSITTNADRRMKRSMHRNLQRYKLRRKNLIECLLAHHIIKDDTPLFELGNNTTFQTYRARAKAVTEEISLEDFARVLLMINKKRGYKSSRKVKDGEEGELIDGMEIAKRLYDENLTPGQLLLDLHNKGKRNRPTFYRSDLQAEFDKIWDFQSTFYPNILTDEFKSSIHGFNKSQTSGAFYGVHQISTARNSGKEGYVQALMWRTEALKRQLGIEEVAYALADLNGAINNSSKRLAMISDRSKELYFNHLTIGQYLMQILNENPNHSLTNIIFYRQDYMDEFEAIWEKQAQYHPELTLELKKEIRDIIIFYQRDLKSCINLVSYCELEHSEREITIDGKTKTILTGCKVCPKSSFLFQDFKIWQMLNNLQVFVVGRQRKKIKKDKTQPSLFDDVETGALNRFLTQEEKDILYNELSIKEKMSKREVLKLLFDNSNSLDLNYKEIEGNRTMATLFKAYQDIISLTGNGEYDFAKMSSKEVLTITTEIFKGLGYKTDYLTFNPLLEGKALEQQPSFRLWHLLYSYTGDKSATGNEALMKKIQELCGFEKEYATILANISLALDYGSLSAKAIRKILPYMMKGYEYSEACSLAGYKHSARSLTKDELVNKEYKSHLDEIRRNSLRNPVVEKILNQMINVINEIIKTYGKPDEIRIEMARELKKSKEERELLDAAIRKNTAESEKLRKELEEEFGIQHVTKNDILRYKLYNELKMNGYKTLYSNTYIPREELFSKRFDIEHIIPQSRLFDDSFSNKTLEVRDINIEKGNKTAYDYVAEKYDEQGIVDYESRVEELFSNNAISRTKRNNLLMKEADIPSDFLNRDLRDSQYIARKAREILEELVPFVVTTTGSVTSRLREDWQMVNIMQELNWDKYDALGLTEHYTDKNGNIVKRIKDWTKRNDHRHHAMDALTIAFTKRGIVQYLSNMNARSDKSGSIYGIEQKELHRNEKDHKLVFNAPMPLDEFRAEAKKHLKSILVSIKAKNKVVTKNINRAKMKDGRQQKIQLTPRGALHNETVYGKIRNYEAEYRKVDGKFTEDVILRVCNQRQREALLSRLTEYDNDPKKAFTGKNSLEKNPIWLKADHSYAVPLKVKLYKIVDVFTIKKAVDKDLKIDKVIDFKIRSILQARLNEYNGDASKAFANLDENPIWLNQEKGIAIKRVKIRAKVSSETSVPLHVKKDLLGNILKSSDGIALPTDYVNTASNHHVAIFIDAEGNWHEHVVSFYEATASALLGLPIIDKNFKSEEGWKFLFSMKQNEYFVFPNEKTGFVPTEIDLTDPENYAQISPNLYRVQKFSSSFYVFRNHLETNVEEPTMLKDTTWKSIRSIRNLDGVVKVRVNHIGEIVEVGEY

SEQ ID NO: 1522 - protein, 1411 aa, unidentified
  REGION 1..1411: note = Description of Unknown: Cas Enzyme sequence
MSKKVIGIDLGTGSIGLSLRNPGLSDNIQDQLEWFSVTTFNSGTGTSQRGEYTLASDRRAHVQSRRLKEHSRWKRWSTLSLLVEYDMCPMSRESLERWQTYDKSKSLKREFPIDDTAFIQWLRMDFDGDGVSDCTAFQLRRQLVEEQLDFSLPINRYKFGRAIYHIAQHRGFKSSKGETLSGKDEENEKDTIEVDADNLENVMKKSEEKKSKDLSDYMAAHNFKTVGQAFASLEEEGVRVRNSRYQAVRSQNVDEINEYFKFQEGLAGYEDLHRRLISTKKGEGTLFYKLPLRSQKGHIGKCTFEKNKRRCPISHPEYEKYRAWAFINNIKYKESEEGCWFELPLALKQELYQEVFISKVRKDFAFETIRKFLEKRLGLTLKNADGTKTINYKDKALVAGCPVTTRLQNVANLFDATIDTLELQGVKTRPSKSNDDKHQVSYDALDLWHFCFEADEIEDVKRFASQSLKFDDKATDSLCKLWASIEQGYTTLSLKALRNINRFLECGLKTADAIFLAKVPDITGEVDTDKLICFYDEQVKAPAEATMRIARVANTLIANYKSLALDDRFADHNFEYQLQDDDKEEVIKCIQNTESSFELMDAGEQQTLIAEVTRLYQAFFADIHREYVKVPRFADVLVGELKKLYPEVKEERWQKLYHPSMVSDFPRDKNNANLLGSPQIGAIRNPTVLRALNVLRSNINKLLAEGLDPQETRIVVETTRVNNDINKRKAIEIYNDERTAENKCIEEILKKQYPKRTISEKDISAARYVLEQTGKDLLTDDNPDNRRYRHQTKKYKQWLEQGCHCLYTDNVINLENMYEENMFDLEHTIPRSISFDSYDRNLTICDAYYNRHVKQNRIPTELPNYETDVTIDGHLYTAIKPRLKMWQDKVDRLSQNVLFWKNKAKKAQIENIHNDCMREMLLWQMEYDYWRQKLDRFTMKSKDLTDGFRNSQLVDTGIITLYAVLYLKTLFAQVDVQNGQSTSAFRKIFGIPQKDRSSNFHHAVDATILTLIPSSAKRDRMLKLFYQIDEQRKGGHEVSGLEFQLNREITSCGLGKGLAGIEDFISQRVMVDFYKQDRVLQKDRRPVIRKGKPLMRKTQNGKSEPVTFTSDSIRGELHNQTFYGAIRRRSDDKEFYVVREPLKYKSSDRDKGFKDWKELNKRIVDLNHPADSEEFKPMVQMMMRQFPNGTTFKEACEQGIYMLDRNGRKVNKIRHIRCYGKNVANPVRVKRHTYPSEKEYKQHILAALGDGSVYALCEYTDGQTTEYKRYTYMEISENRKSGFEDIPTVYPGKKGQPLPLARKIMKGDMLLIYEKTPEELMHLNKSELSKRLYKVQYFEGERKVTLFHHLLSDSKTKEKLDGEEKKRNKGESIKDYKKLPPIIRCTINGFSYLQKDVDFEFTKEGIVLKHI

SEQ ID NO: 1523 - protein, 1409 aa, unidentified
  REGION 1..1409: note = Description of Unknown: Cas Enzyme sequence
MNKKVIGIDLGTGSIGLSLRNPELSDNIQDQLEWFSVTTFNSGTGSNQKGEYTLASDRRAHVQSRRLKEHSRWKRWSTLSLLIEYDMCPMSRESLERWQTYDKSKGLKREFPIDDTAFIQWLRMDFDGDGVSDCTVFQLRRQLVNEQLDFSLPINRYKFGRAIYHIAQHRGFKSSKGETLSGKDDESEMEAMVVDADNLENVMKKSEEKKQKDLSDYMASHNFRTVGQAFASLEEEGVRVRNSRYQAVRSQNVEEINEYFRFQKGLANYEDLHRRLISTKKGEGTLFYKLPLRSQKGHIGKCTFEKNKRRCPISHPEYEKYRAWAFINNIKYKESENGSWLELPLALKQELYKEVFASKVRKDFAFETIRNYLQKRLGFTFKNTDGVKTINYKDKALVAGCPVTARLQNVASLFDATIDTLKLQGVKTRTSKSDDDKHQVSYDALDLWHFCYEADEIEDVKRFASHSLKFDDKATDCLCKLWASIEQGYTTLSLKALRNINRFLENGLKTADAIFLAKIPDITGRGDTDKLIRFYNEQVKAPAEAKMLIARVANTLIANYKSLALDDRFADHDFEYKLQKDDKEDVIRCIQNTDSSFELMDADEQQALIAEVTRLYQAFFADIKREYVKVPRFADVLVGELKKLYPDVKEERWEKLYHPSMVSDFPRDKNNANQLGSPKIGAIRNPTVLRALNVLRCNINKLLAEGLDPQETRIVVETTRVNNDINKRRAIEKYNEERNAENREIEKILSDIYGAASEENINAARYVLEQSGEDLLTADDPDNRHYRHQIKRYKLWLEQGCQCLYTGRIINLTNLLADNMFDMEHTVPRSLSFDSSDKNLTICDAYYNRHIKQNRIPTELPNYEVDVTIDGHLYTAIKPRLKMWQEKVERLSQNVLFWKNKAKKAQTENSHNDSLREMLLWQMEYDYWHQKLDRFTMKSKDLTDGFRNSQLVDTGIITRYAVLYLKTLFAQVDVQNGQSTSAFRKIFGIPQKDRSSNFHHAVDATILTMIPSSAKRDRMLKLFYQIDEQRKGGHEVSGLEFQLGREIVSCGLGAGLVGIEDFISQRVMVDFYKQDRVLQKDLRPVIRKGKPLKRKTQNGKLEPVTFSSDSIRGELHNQTLYGAIRRRSDDKEFYVVREPLKYKSSDKDKGFKDWKELNKRIVDLNHPADSEDFKPMVRMMMSQFTEGTTFKDACEQGIYMLGRKGRKVNKIRHVRCYGKNVANPVRVKRHTYLSDKEYKQYVWAALGKGVVYALCEYSDGQTKEYKRYTFMEISENRKLGLEDIPTIYPGKKGQPLKLIRKIIKGDMLLIYEKTPEELLQIDKSELSKRLYKVQSFEGEKGVTLFHHLLSDSSIKAKQEGEEKKRNRGESIKDYKKLPPIIRCPISGFSFLQKDVDFEFSQDGIILKHI

SEQ ID NO: 1524 - protein, 1233 aa, unidentified
  REGION 1..1233: note = Description of Unknown: Cas Enzyme sequence
MKILGIDLGVSSIGWAIVEETQKDRKVLGLGSRIIPLSKEDNDEFSKGNTITKNQKRTQKRTQRKGYDRYQLRRKKLKEALEQQKMLPDDSVIKLSALELWGLRGKAVSEQISLPQLGRVLLHLNQKRGYKSSRADANLERKDTDYVQGVKDRHQVLKSLRKTIGQYFYENLLQDEHYRIKQQVYPREAYIEEFDAICAEQRKYYSTTLTPAFIDLLKNEIIYYQRKLKSQKDLVRVCDFEGFYVAKKESGKLKELFVGPRVAPRSSPLFQIAKIWETINNIAIKNKRNLVYLIPLEKKVEIFQYLDNNERLSESELFKILDLKKTNGWHGNKQTSKGLQGNVTKTALLRFLGQESHLLSFQLCIEQSDKETFIIDRKTGEITGSNTIKKISANVEKEPFYQLWHTIYSIDDPEECTRALIKRFGLGEETASKLASIDFKKFAFGSKSIKSIRKILPYLMEGYVYSDAASLAGYNHSNSLTTDERVKRKLLNALPNLPKNSLRQPVVEKILNQLINLVNSLIDENNGWVTKEEREKNQFEIRIELARELKQSKEERNETYSRLEKRERENDNIRKRIEAEYKQFGVRASRLNVIKWRLFHEINNHENKLNAICIYCGQPFSLSEALKGSSVDIEHIIPKSLFFDDSQSNKTLCHRKCNSDKNNTTAYDFMKSKSNEQFNDYIERVDSLYKKKIINKTKRDKLLMSVKNIPQDFIDRQLRETQYIAKKSKEILEQICRTVWSTSGSVTAYLRSKWGWDEVTMNLQLPKYRNLGLTEWKEWETNDGQKHKREVINNWSKRDDHRHHAIDALTIACTKQSFIQRMNTLSAQHTRDEMFAELQRQSAQFKERLALLDRYIISNRPFTTIEVEDEVDKVLVSFKAGKRVVTVNRGTLVPRGALSEESVYGKIKILEKGKPVKHLFENPKTILKKYIQTLVEGRLLLHGNDPKKALASLKKEPIYLDSEKTKLLEYGTVYREEIVYRYPINMIKAKDLPYIVDAQVQKVVKARLELYNNNEKEAFKNLDENPIWFNEEKRIPIKAVRMITGLTAVEPVKRNESGKNIGFVKPGNNHHIALYLDENGKKQEHVCTFWHAVERRKNNFPSIIKNPTSVWDIVLKNKDNYSKEFLEKLPNDKWTFIESLQQNEMFILGLSTTEANEAISTQDYKTISRHLYRVQKLTSCDYYFRSHLETQVDDSDDAKRSKRYFRFKSVSAFENMTPIKVIVNNVGKVIMRY

SEQ ID NO: 1525 - protein, 1392 aa, unidentified
  REGION 1..1392: note = Description of Unknown: Cas Enzyme sequence
MEQKTLGIDLGTNSLGLTLRNLENGGDIANQLEYYSVNIFKSGVGTDNRGEYSYAADRTKHRSSRRLYQSRKYRIWATLKLLIKYGCCPLRMEELEKWSRYDKTKGMKRQYPNGAIEFERWVRLDFDGNGIADYSSPYQLRAELMNRELNWNNQKDRYLFGRAMYHIAQRRGFKSSKGETLKDAGDDKDVDNILIDKAMKASEIKKSKGINDYMQQHGFKTVGCAFANLEKEGIRVRNHSEYQAVQSDLIKEVDKICKHQHIDSIEPELYKGLVSTKQGIGTIFYRRPLRSQKGNIGKCLLEPTKRRCPVSHPDYEEYRALAFINNIKYRLTSEDTWHSLTEDERMRLFNNRFTLARSTFKFEEIHSWIEKELTHSHIDYNEGTINYRDYTTVPGCPVISRLKKLLGDNWRTATIETTHEHINHKSGEVHNSTYNYEDLWHLAFCSDDYEELSEFVQKRLAFDTKQSGEIVRLWSAIQQGYTTLSIKAIRNILPFLRRGMSYSDAVAVAKIPDIIGHERWKANSDIIISALDDLTATTNHTRTVYSIVNKLISNYKSLPFEDQFAYKDINYQLTSNDEADIDHSLNDTLGTRRINKMSDNAKNALRKEISILYQQFFASSKRDYYKLPKQSDTLREYLSKLFPDIEISKWYQLYHHSQTNPFPHAKTDKNGVLQLGTPDIGSIKNPVALRALHVLRRNINAMLKEGMIDEDTRIVVETARKMHDANWRRAIDQYQKEREKENDAIIAVIKEFRPNYTDVDIEKGRLLFEQNIVQHASHEEIAKAEKFADYMKRYRLWKEQNFKCLYTGKTIGLTELFNENIVDIEHTIPRSISFDDSLSNKTVCISHFNRFEKSNRIPSELTNHEDILQRIKPWQERVEHIMSQIELWRGNARKATTKERKDECLQQMHQWELERDYWQAKVRTFTIQKDELDLGFRNSQLVDTRIITKYAFHYLKSLFSHVDVEKGAVTDAFRKILGVQSVNVKKDRSKHSHHAIDAAILTLIPPAAQRDKMLQLFYQIEEASDSDKEVLRATLQREIRNCHIGSVNGLRETIESNILINHISKDQTLAPAKKPLYKGQKRVEGQWATGDSIRGSLHKDTFYGAIKSGKDIMMVVRKSLNQGAINPLKENDIDSIIDPKVRDIIQKHRLRMKEKRVSFAKAMEEPIYMLNKDGEPITNDRNGRPIAPIRHVRCYAKAGRGFLKTDTALIIKQQTYQSKYKYKNFYYAQNDDNYLCLYYEGTLKGKQHREFRLINYLDVAHLNLKSTNFLFSEPEFAFLNGHNTMPLKAIIKKGTRIIPYSIYPEEVNDLDTIELSKRLFVVYKFNEIGTPSLYLKHHLEARKDTECNNTEKSTSFNPHIQLSYLTLKASNFKALIENYDFEVDSLGNIHFE

SEQ ID NO: 1526 - protein, 1358 aa, unidentified
  REGION 1..1358: note = Description of Unknown: Cas Enzyme sequence
MNGTNETIVGLDIGSNSVGWAVVSMKDNALVKLHGMGSRIIPSNDDTRNFEQGKAQTRNADRRRYRSMRRNNQRYKLRRANLVKVLKLIGAWPEGLGEPLTSASPMLTALELYGLRADAVTKSIGLPDLGRVLYHMNQRRGYKDIGDLMDELSGKEAQAEEKDSGTTTEVSKVRVVSWSVEDAKGKKEILRVVVDREGEEISGTTTHTSFKEVEGQEIYIQIKTKQTSKGPSVTFYRVNVSDWLKGKDELDQKLEESGLHPGQYFHRELLDNPLHPPRFRERVVLRERYRSEFDAIWKRQADAHPALKDPAVRDKVVEALIPRNQAMRKQWTTKELGTILRDFVIYYQRPLKSQASNKGECRFERKPVVPVSSPVYQLFRIWQQVNNVKLRDKYMREEPLTTEQRLEAVQLIIDQEKVSEGGLLQRLKLKKSGLETNLRADLPGHATLAKLRKVLKEHAIWPQLEAEAQTINGIESSTLFKLWHALYSIPEHEYRKGAVKKLLNLDEETTEALAKVRFERKHGAVSARAAARIAQLMVCGPAWSDDKWPVSLKKRVQHVIDHTGSEDMKQEMRDAVAGLTSIEQFQGLPYWLAASVAYGDHRAQGGERLADPDAIRSMPRGFLRNPTVEQVVNEALMVVRDIWKDLLQGERPTSFRIELARELRQSIGEREDATKRNRDREAARKKVVERLQKEFSKARPTGKDIERFELWEQQKHQCMYSGKAIEASQLFSREADVDHIIPKTLFYDDSLTNKVLCLRTENAAKDNELGALYMKGKGEAAYEQYVKRINDWGLPFGKRKKLLAMEVPESFIARQMNETRYIGTELRKLLERIAPVNTSVGQVTDALKNEWGLTTVYKEVLLPRFRRLEGIVGRELITELHRTNGATHTDYRIEGYDKRIDHRHHALDALVVALTRQKYIQKVAQLKQKGDPLTEEERAGRLTWWPLPHRDLRQMVKDQLERTIPSIKNRQRLVTKAMNRTAYLADPETGRVRNGSNGRLQKGRLTAVRGKLHEEQPMGEVRRQERMPIDKVMKRLLDVSGKEGPLYELRPLAKGERGYNTRFLAHERERVWLEERLAKHKGDTKAALKDWKKNPPRKWSKKKEEEVDVMALTVLVPYYVSTQAVGNMSKAMMSKVLDTGVARALDGHVAAHEGDYEKALTDDGLNKLNDGRKVPLKRVRIKKHDTPVWDTDGHRRLLRPSSPNERLHIKMGDNYALAVHVYEETGARAFDIVSFYDAVQRTRDGLPLYEPRPGHRTFLLRKKDPVYVPRPGEAFRDIPWHDAQAIWERVYGTVKFSGDRHYFSHASISAIAQGFEAKEFGSQNCSEFEDRDEPRTKISHAAIPIKVDRLGRVSPMWP

SEQ ID NO: 1527 - protein, 1529 aa, unidentified
  REGION 1..1529: note = Description of Unknown: Cas Enzyme sequence
MKKILGLDLGTNSIGWAVVNANETARDNDTTYLKPINISSAGSRIIPMSADILGDFDKGNSISQTAERTRLRMVRRIHERCILRRERMLRTLNTMGFLPAHFAEKIDPFGKFIDDSEPQIAWLKKEDENRDFLFQSSFKEMLADFAQHQPQLVADDKKVPYDWTIYYLRKKALTQRITKEELAWILLQFNQKRGYYQLRGEEEEEKSNETIEIISAKILSVERKEKDKKYEKYWYEMNLDNGMVYRATFYNDVSGWKGETKDFVLKTTILKDGSEKNELSFLPTTDEIERMEPQRKAKMYAKIKLRTEKDIENSHKTVGSYIYDTLLQKPNQKIIGKLVRTVERKFYKDELIRILQVQQELIPELKNDELYKKCIEGLYPSNEAHRNNISKPDFVNLFVNDILFYQRPLKSKKSLIDNCPYEFHLGKDGNSYPVKCISKSNPLFQEFRLWQFVQNLRIYQRERTVSDGQLDLFSTAPTGKLQTDVDVTAELLKSEEDYVNLYEWLNDRSTIKQDTLLNSYFKMKKGKGKDKYPFRWNYVEDKEYPCNETRASMLAGLSKCGVNADFLTHEKEMALWHILYSVEDKIEIGKAMKGFAEKNNLSETFSETFSKLKPFKKEYGSYSEKAIRKLLPLMRMGKYWNEDNIDTKTQERIEKIITGEYDENTKNRVREKAINLTDISHFKGLPVWLACYIVYDRHSEAREIDKWEKPEDIDRYLSNFKQHSLRNPIVEQVITETLRTVRDIWRKEGQIDEIHVELGREMKNPADKRRQMTERIQQNENTNLRIKALLMEFMNPDMGIENVRPFSPSQQDILRIYEENALDNLKKEDEEYEFVTKMSKMAQPSKSDIIRYKCWLEQKYRSPYTGRMIPLAKLFTPAYEIEHIIPQSRYFDNSFSNKVICEAEVNKLKDRQLGYEFIKNYAGQIVQLSQGDSVEILSVANYEKLVKDHYANNRTKMKKLLMDDIPEGFIERQLNDSRYISKLVKGLLSNIVREKTENGEYEPEAVSKNLISCNGSITDRLKKDWGMNEVWNNIILPRFQRLNQITGKDCFTTRNREGHEIPNMPFELQRGFNKKRIDHRHHAMDAIVIACTTRDHVNLLNNEASLPKHQEMKHALSRKLRRCEEVIINGKKRNIYKVFLSPWPSFATDALQTLQNIIVSFKQNLRVINKTTNAYMHYDENGKKKPRKQVNGDSWAVRKSMHKDTVFGEVNLRKKKTVSINEAVKKPTCIVNKDFKKKIMELLSEGRDAKFIKKYVEEHKDVWSDINAAKIEVYYFTKDEKKRNGEPKERYFATRKSLDVSFDKKKIVESVTDTGIQKILLAHLEAKGNNPEQAFSPDGIDEMNRNIVELNKGKFHQPILKVRVYEKADKFAVGQTGNKTKKFVEAAKGTNLYFATYLNDEGCRSFTTIPLNTVIERLKKNLLPVPEFNENGDRILFYLSPGDLVYLPDGTNNNETHSNLSRIYKFVSCTSNEAHFVPVHIASPIIPTTELGANNKSQRAWTGEMIKETCIPIKVDRLGNIIELNGVKQ

SEQ ID NO: 1528 - protein, 1552 aa, unidentified
  REGION 1..1552: note = Description of Unknown: Cas Enzyme sequence
MKKILGLDLGTNSIGWAVVNADTITRENDTTYLKPCSISHAGSRIIPMSADILGDFDKGNSISQTAERTRLRMIRRLLERNHLRRERLLRVLMILDFLPEHYRTKVSRYGKFTDNSEPKLPWYKSEEGKMEFLFQDSFHEMLADFEEYHPQLLADGKKVPYDWTIYYLRKKALTKRITKEELAWILLQFNQKRGYYQLRGEEEEEKTNETIEIISAKILSVEKKEKDKKYEKFWYEMLLDNGMTYRATFYNNVASWKGETKDFVLKRTTLKNGSTKDELSFLPSTEEIDRMDAQRKARMYAKIKLRTEKEIENSHKTVGSYIYDCLLHNPNQKIIGKLVRTVERKFYKNELIKILEVQQELIPELKDEALYKRCIEELYAANDAHKKSLSKPDFINLFVNDILFYQRPLKSKKSLIDNCPYEYHVSKDGKQYPIKCIAKSNPLFQEFRLWQFVQNLRIYQRERTITNGQLDMFSSNPVGKLQTDVDVTSEILRTEDDYVKLFNWLNDRNSIKQDTLLSSYFKVKKEKGKDKFPYRWNYVEDKEYPCNETRATILAGLAKCNINADFLTHENEMSLWHILYSIEDKAELYKALKKFAQKHQLEEIFAEILSKTKPFKKDYGSYSEKAIKKLLPLMRMGSYWDEEQIDANTRERIEKVITGEFDETIKNRVREKAINLTDIRHFSGLPVWLACYIVYDRHSEAKDIDKWEKPEDIDHYLSNFKQHSLRNPIVEQVVTETLRTVRDIWIQEGHIDEIHVELGREMKNPADKRRQMTERIQQNENTNLRIKAMLMEFMNPDMGVENVRPYSPSQQDILRIYEENALDNLSKEDKDYDFVSKISKMAQPSKSDIIRYKCWLEQKYQSPYTGKMIPLSKLFTPAYEIEHVIPQSRYFDDSFSNKVICEAEVNKLKDRQLGFEFIKSHAGEIVQLSQGGTVKILSVEAYEKFVKDYYSNNRTKMKKLLMDDIPDGFIERQMNDSRYISKVVKGLLSNIVREKQENGEYEQESVSKNVISCSGSITDRLKKDWGMNDVWNNIVLPRFKRLNTITGRDYFTTYNREGHEIPNMPLELQRGFNKKRIDHRHHAMDAIVIACATRDHINLLNNEAAHSKHNANRYQLQRKLRRFVTITINGKEREIAQEFLKPWDTFTNDAWQVLNNIIVSFKQNLRIINKTTNHYQHFGDGGKKEFEKQEKGDSWAVRKSMHKDTVFGEVNLRLKKTVSLNEAIKKPESIVNKDFKNKVMELLSNGRDAKFIKKYIEDNKDIWSDINPAKIEIYYFSKDEKKRNGEPKERYFATRKSLDTSFDEKKIKESVTDTGIQKILIAHLASKDNNPEQAFSPDGIEEMNRNITTLNNGKFHQPILKVRVYEKADKFAVGQTGNKTKKFVEADDGTNLFFAVYEEDNNKRVYATISLQLAMECQKDGGNDWIRLLDERLRDKTNTIKLQKYQKLDIPEHAKLLFILSPNSLVYVPSSNESEHNITQINKDRVYKTVSFNKKQCFCIKYCVASPIVNKVEYTPSNKMERATTGEMIKETCIPIKVDRLGNVIEIDGKPL

SEQ ID NO: 1529 - protein, 1255 aa, unidentified
  REGION 1..1255: note = Description of Unknown: Cas Enzyme sequence
MKNILGLDLGTASVGWALIKVDDNNTPIDIQDIGVRIVPLAENEGDKFTKGQNITVNADRTRARGARRNIDRFQLRRQALTEELRSLDMLPDEKLIKLPVMELWQLRANAATQKVSLKELGRILYHLNQKRGYKHSITDQNDSKQRAYVKEINNRYRELKETGLTIGQFFAQKLSETAVSNDCKCFYVFRIKDQIYPRKAYEEEYDRIMKCQQEFYPEILTDNKINKIRNEIIYYQRDLRSCKHLVSICEFEKKCFYDANGEVKRNKKGEIVYDGPKVAPRTSPLFQVFKIWQSINNIRFRNRQNEYLYITKEQKQNIAEIMDKQDVLKLKDVQITLGITSKSGWYSDQAIKNGIKGNTTKHEILSSLSSLQQSQIDKITRFHLETVDTNMIDEETGEILVRIKGSYQKEPLYRLWHIIYSIKNDKERLNAIEKFLYEFDIIDKDVAEKLNNIDFVTPGYANLSSKAICKILPYLMDGIDYSDSCEYVGYNHSGSLTKVENENRELLDQIPAIKKNELRQPTVEKILNQTINVFNQINVELNKKGERIDEVRMELARALKQSKEEREETDRGIRKQQKLNEEYAEILKSDNIRPTRNRILKYRLWRESNETCFYCGQPVKFNEFLKFTEIEREHIIPKRLIFDDSFANQVCSCRKCNAEKGGRTALDYMRNKPNLQAYLDKVNQMFQDKKINSKKHSHLLASYDDYLVRKAEGKETKDDVRIWEEPIDRQLRLSQYISKKAQEILRTACRDVIATSGSITEFLRNTWGYGTILHDLNFNCFKDAGLTDTIIEEDTGRTREVIKNWTKRLDHRHHAIDALTVACTSRSIVQRINTLHASREDLRKEIKASRKDWQDNNLLLQWTKEKKPFDRHFVLEKIASILVSMKAGKKATVPGKRKIYKNGKPITVQTGLRIPRGQLHEQTIYGAITQFLKDKKGNVSQTKEYVVRYKMGVGSMGYVFNGKETCDVVYNKKKDCYEIKDGIEEAINYIVDKHIRDVVRKRMNEAFPEGESYRTGAEKALAEGRVYNGKERSQKALEQLKSLSENPLYTDKEHKIVVNSVRCFTGLHAVQPLRRNSKNEAISYVLTKNNHHVAIYTDENGDYKEMIYTFWQAVERSKYKLPLIIKDVNALWNEIRQREKDGEHFPDELIQSLPMPNWIFIESLQLNDMFVMDTDDETFENYIATNNYEEIGKSLYRVQSISTSDYFFRLHSDTTSITTQEAALSKRFIRIKSFKSYKNHNPHKVHISLLGKIIN

SEQ ID NO: 1530 - protein, 1864 aa, unidentified
  REGION 1..1864: note = Description of Unknown: Cas Enzyme sequence
MVNKKILGLDIGTTSIGWAIVEASSEKPFKYNEYFNDGSPETKTDTNNQRIGIHKGKDGLPAAGVRIIPQGDIGQRFDSGKKLNEGKKHTPTAERRIQRSARKTKSRYKLRRDKLCSVLEILGMLPDDSYQKVLRNGKKIWKPIEEKNNKWYTNKREYEHDEFGIKKKKREMDIGEQLYKLRTDALNKDNEIGLKDWGRILLHLNQWRGYSSDRFSSNEEETKGIKSGDVEVYTTTVSKVFPSEIYDEKNILFKIVFENGQQGYEVRNNDKEKSNFIEGGLVSYYFEKKEDERDGYKKIKFREIDKTSWAYRKKEINDSIESYLNENQQQSVGSYFYQKHYSEKSLTRIRTNTINRGWYEDEFDKIWKVQFEKYAHLFTEDLINSCINSAFKDEQIKKEIHNLKINGISATAEQKLKHLIKDKIIYFQRSWQQTKNKGECRFEKIPDIKKDKDGKVIPHKDGKDHWKGRTVIPKSHPLHQEFKIWQQINNVRLWYHCPEGKFELFTEKEIFNAHSPIILNPVEVKEKLYEHLQIAKTSTWRTFAKEKLELPFDVLIDEEKKKKTTKGRGKNKGNDKVEILTQFYSVNFSRKTKKGEIQDNPLKGNFTKYQIQDVLHKEDESWYNRNAITGEDKHNAEKLKDKLVSTKSKGAIPFNYQTKEYEVKNLQLLWEIVYDITNFQAGNEKANIENITKKIRKYFTIEIISDEQCVLLAKIKFDDGGMGNLSAKAIRKLLPLMADGKYALQYPFNEKVKSQIDGLIKLNQEEQNETNDDLKLYSLKDFITDKKARIKLSQKKSNKEFRGLNYWEAAAVVYGNHSKAGITNRSINEIEEAIKNLQPVKPSSMNNPVVEKIVNETLKMVQLLYQTYQFDELRIELSRELKNSREEREAIWEAQNNNKQRNDFAKKMLREMFNGEDTSQLDLSTSSNNIDKIKIIEDVVSNLKSKEHIEKKKEYKISEPTKADVIKYRLWLDQEFKCPYTNRNIPFSDVFAKEKKVQREHIIPKERYRDNSFSNIVLTWVEVNSAKAENGNRTAFEFIDSKRDREKVIVAGKGELPLVSKEQWESHVKSMFKGRKAKNLLRKTIPEDPINRELKETQYINKKLREKLGEIFGFDKVWTTTGQITDMLRNAWHLNDKVMQELVRERFEKFKPPMGKGTTMESIPEYDIIYDNTIIDKNTNEEKVEKEFPNFSKRLDHRHHALDAIIVACTRQQHIQYINNLNAANSVDINNDDALKAKYTALKTEICEGNSSNKYKTPWQTNDFIPAVIDALQNIIISHKNSNVLISPSKNKQIDANNYTSISIRQKLHQETLVGKRKIYDKTLISIEEIVEMIFEKRKTANKSFTEIIASVVFKEKFQKQLFHLFEKYNLVKDLDDLKSKVIHEISESKSEYFEAATILKEIPVKRDSKSISSVSYKDVIDKRTQRHLKYRQDWMEELEEEWKKYKNERDSEERKIAEQRKKWVNNLTDFPIYYNALYDVRIKDGNWLSLFEFNKSMIDHIEYIKYRKGEKKIDNSRTEQIKNLIKNYQHEFNRENTLLKHPLFTNENKKIVIKKTTVENWVGNESLIEIRPKTFVATEGKFRVIVTESNEAKKEKHFKFIDHLTALNFIKDLKEHPEKEFIKAEFNIPKEKILNGDRFLFTLSKQDLIYIPNEVDIVPDWNNIKSLSDNLYIVSSFDEKNEYIILEKHSIAEPIKLDDINDAHGLKIKLLELQEYLKKENEEYLSEADRLKPIQNEIEQLKKANNKDDVDVNREDKKQNKEKIKELQGKIKPDELLLKEHKNEITLKEKEISKLQSSIAFKMKDDNPAPPIEETTEIKYDGKKQNIIKVFTYKLGKKVVPYWEFPNGCWDKEKAMELGLINS

SEQ ID NO: 1531 - protein, 1078 aa, unidentified
  REGION 1..1078: note = Description of Unknown: Cas Enzyme sequence
ITGEYLHSEEDYVKLYEWLNDRKEIEQKSLLKQYFKLKKNDDFRWNYVEDKTYPCNETRALINIRLNKVENVPDDFLSKENEEALWHILYSVEDKDDIKKALKTFANKHNLGEDFVENFQKFPSFKKEYGSYSSKAIKKFLPLMRLGKYWNDEEIIRNIDIYQKNISQLTETLNKKDEKIIVADKEKGKTINSKFLNKLEMLADDISAYKGLEHFLVSYIVYGRHSEDGEALKWNRPTDIEHYLKDIFKQHSLRNPIVEQVITETLRVVKDIWQYHGKEGEKLFDEIHIELGREMKNDKSERERMTKQISENENTNLRIKALLAELLNDNAYENVRPYSPMQQEILKIYEEGALNAANEIPEEILKISKQAQPTQSELTRYKLWLQQGYRSPYTGSIIPLNKLFTRAYDIEHIIPQSRFFDDSFSNKVICETEINTDKDNNTAFEYIKNNRGKKIELSNGKIATLFTIEAYEDFVKANYSKSRGKMKKLLMEEIPEAFIQRQMNDSRYISKVVKNLMSNIVREADEQEVISKNVIASNGSITSILKQDWGLNNVWNEIITPRFERLNELTNSNNFGEWTNKDGKKVFQTQVPLELQKGFSKKRVDHRHHALDAIIIACATRSHINYLNNDNANGKDKNKPLRFDLRNKLRRLEEVQVERFENGQKIKKTIKVGKEFLKPWATFTQDSKETLHNIIVSFKQNLRVINKTVNHYQLLKKDNEGKPDKQSIRQTKGENWAIRKPMHKDTVSGLVQLKFKKTVSLSTALDNWEMIVDKDFKIEVNRLMTLKYDKKKIIQYFKEKENKWQDEDISRVEVFYWDIDEYGNGKNVASRVKIDENFTSDKIESITDTGIQKIMQNHLKKYNEDKNGKIIEHPELAFSPDGIDEMNKNIKELNDGKHHHSIYKARTFEPKGNKFNVGQTGNKKDKFVEAAKGTNLFFAIYQDEKGKRNYDTVPLNIIIERQKQGLSPVAELNESGHKLLFYLSPNDLVYVPFELENENIEPYNHKKKQIQQIYKVVSFTGNQCFFVRNDIATTIVNKFEFSPLNKMEKTIDSVMIKEICSKLEVDRLGKIREKIKYN

SEQ ID NO: 1532 - protein, 1425 aa, unidentified
  REGION 1..1425: note = Description of Unknown: Cas Enzyme sequence
MAKKILGLDLGTTSIGWAFTKEKESNLEQSSIEEIGVRVNPLTTDEQRNFEKGKPVSLTADRTLKRSARRNLQRYKLRRENLIEALTNVKIISNETALTESGKNTTHTTYQLRAKAVTERIEKDELARVFFAINKKRGYKSSRKAKNKDEGQAIDGMAVAKKLYEENLTPGQFAFQVLKDGKKYIPDFYRSDLQAEFDKVWNCQKQFYPEIFTDEFYKELQGKGQRATAASFWGNYKFNTAENKGTREEKKLKAYKWRSKAVSEKLEKDEAAYVITEINNNLNNSSGYLGAISDRSKELFFNKQTVGQYLYLQLQKNPHTRLKNQVFYRQDYLDEFEAIWNCQKQFHSELTDELKTEIRDITIFYQRNLKSQKNLINFCEFESKEIEVEKNGQKIKRIIGLKVAPKSSPLFQEFKIWQILHNVAVRNKIDKTETPLEQEEKEFLFDELNLKGNLKASKIIELLALNAKENELNYTELEGNRTNKSLYEAYLKILEIEGYDEDLLKLSNKDEINVSELSTSAFEIKQMIKSIFETLNINTSILDFDAELDGKAFEQQASYQLWHLLHSYEGDNSNSGNEKLYELLEKKFGFKKEHAQILANISLSDDYGNLSAKAIRKIYPYLKAGHPFAKNGKDDKAASATALAGYRHSATSLTKEEIKNRELKPRLELLKKNSLRNPVVEKILNQMVNVVNALIDSENKKLKAQGLPEDFHFDEIRIELARELKKNAKERAEMTTNINAAKLLHEKIFKILQDEFGVRNPTRNDIIRYKLYEELKNNGYKDIYTNTYISREILFSKQVDIDHIIPQARLFDDSFSNKTVIYRRTNLDKGNQTAYDYIESKFGVEKLQEYKDRVEMLYKQKEGPISKAKYQKLLKKESEIGEGFIERDLRDSQYIARKAKDMLYEITRSVVSTTGEITNRLRKDWNLVNVMQELNFNKFKKLGLTEQVEKKDGTFKERIVDWSKRNDHRHHAMDALTIAFTKRSFIQYLNHLNARKNEADKFHPAINGIEEKETYLITDDDGNRKRVFKEPIPNFRHVAKEHLETVLVSHKAKNKVVTKNKNKIKTAKGDKVKTELTPRGQLHKETIYGKIKLPIVTEEKIGVKFDEATINYVANPKFKLLLLGRLKENDYDPKKAFSGKNSLAKNPIYLDDTKTEVLPEKIKLVRYENDFTIRKDVTPDLKIDKVIDAGVRKILEERLKEYEGNVKDAFSDLNKNPIWLNKAKGISIKRVTISGVKNAEALHYKKDHFGKEILDENGIRIPVDFVSTGNNHHVAIYKDAEGNLQENVIPFFEAVERVNQGIPIIDKTLNAHLGWQFLFTMKQNEYFVFPNEQTGFNPHDIDLLDAKNYKLISPNLFRVQTISVVKYGNNTIRDFKFRHHIETLLEDKKELQGITYQQIKSLAPLESIVKVRISHIGEIVKVGEY

SEQ ID NO: 1533 - protein, 1439 aa, unidentified
  REGION 1..1439: note = Description of Unknown: Cas Enzyme sequence
MNKTLGLDLGTNSIGWALRNPDLKSNQIEKFGVVTFNKGVGVGKTGEYSYAAERTKKRSIRRLYQSRKYRLWATLEDLINEGYCPLSIEDLNKWRHYNKEEAAKNNNSGRIYPINNLAFDAWIKLDFNNDGKPDYTSPYQLRKELIEKKLEFTNEIDRFKLGRALYHIAQRRGFKSSRKGSDDLRVKEDSDDDEVVDLQYSERKRNKIITDLFDKYPQAKTIGSLFAILENANIRIRENVAQYAIRENYKDEIKNVFQFQGLGFEHPLYTKLVETGKNKNDGSIFYKRPLRSQKGLVGKCTLEPQKYRIPISHPSFEAFRAWSFLNNIKYKPFNEKDAHWQSLPLNLKQNIYHDKFFRKSKSYFPFSEIADFIKAKGNNWELNYKLKTTVSGCPISARLKDIFGEDYLQIRIAKKKAPKSEKAYYDIDDIWHVLFSYEDQEFVSEFAEQKLNLSTEKVKQFVIAWNTLPVGYGMLSLHAINKINKFLEKGLPYTEAVLLANIPKIIGVKLWAANEEIFLSSISGLINENRQQKAILNVVNSLVSKHKNLEANEKFGYKDSNYNLVDSDMKDISLAVQEQFGIKRWEQKSKDEKQEIYSSVRDCYQAYFITSGLTRRNINGERHFIIQSSNKRYYKTDSGYFRLPRLIDTMGEFLQVNFNVPEKLLQKIYHPSEINIYPPAQPDNNGILKLSSPKTGSFKNPMAMRALHELRKLINHMIETSQIDNDTRIVVEVARELNDANRRWAIETWQRHREAENQEFEYAINQVIAKVSNVKTDYTSENDIDKMRLWYEQNDEETLPPIAEEKKEIKGIKWSENIKNSYRQILTQKSLIDKYRLWQEQECQCIYTGRVINITNLFDGNIIDFEHTIPRSKSFDNSLSNLTVCYSDYNRSIKKNQLPTQLANYSEDFGEYSAILPRLKKWQERVERIKQQIDFWKTKSKKAADKSWKDDAIRQRHLWQMELDYWQNKLDRFTITEITSGFKNSQKVDTQLISKYAFHYLKTYFDKVDVQKGSITAEFRKIYGLQAFDEKKDRSKHSHHAKDAAVLTLIPVAAKRDAILEKYYEAKENKTTFNAEPPFKGFKREFVFGIDDNVLINNISNNQALTPAKRKVRKRGKEVFIEKADGSKVNKIATGDAIRGELHGDTFYGAIKPAKKGDKGNLLKDEKGKFIQEEKVKYVVRVPFQYKKDANTKGIKEISQIVDEGIKRQIQKIMDTKKCSFKDVFNNDIYLLDKTGKPHGNRIRHIRVWASVSEPLKIKKQTNLSDKEYKQHYWAGNATNSYFALYQGEGKKYFEFRNLFDTAKSLAFSTLRYPTELFEPAITISKGKKSTQIPLFYILENGAKVIFKKEMEEDLKVLSRSELLKRLYVYTNFEKNGNSARLNFKYHLEARNKISEAYVESEIDFENPKPTLRFGFAKYDFLVEGYDFTVEMDGTLKWK

SEQ ID NO: 1534 - protein, 1538 aa, unidentified
  REGION 1..1538: note = Description of Unknown: Cas Enzyme sequence
MKKILGLDLGTNSIGWALVDIDEKRIEGMGSRIIPMTQDVLDTFSGGKPLETQTAARTAYRSTRRLRERHLLRRERLHRVLNILGFLPEHYSNLIDFNKKLGQFSGETDAKLAYNNRDFLFKKSFEEMLIEFKQSQPQLFYTKPNGKETKIPYDWTIYYLRKKALIHKIEKQELAWIILNFNQKRGYYQLRGEDDTDATRTAQTRVYFDTQVIDNITDTGNVYKGLKIIQVTLANGDMGKYFSKDVPKWIGSQKNIIATIDLDKDGNDRLENDGTLKRRFSIPTEEDWEKKWKLIKIKTEKEIKDAGKTVGDYIYESLLKNPSQKIRGKLVRTIERKLYKEELVDILKKQLELQPEFFTDDLYNECLSELYRNNKAQQLVLSKRDFVHFFVEDIIFYQRPLRSQKSSIGNCSLEYRVYKDKDGNQIKEYLKVIPKSHPLYQEFRVWQWLSNLKISKKEDDIDVTAQLIKNLDDNVSLFEYLMLQKEIGHKDILKHLLSPILKEKYPNAKAAAFNKEVDKEISKYRWNFVFDDSKEKEEDKSKKYPCNTTGYEIRRRLEKVADVSDDFLEITDIEDVVIKKGENKGKKITVSLGTREIQLWHIIYSVTDKNEYKSALGKFAKKYLLDEDSFVANFEKFPPFKSEYGSYSEKAIKKILPLLRMGKYWNWIAIDNKSQVRIEKIVTGEYDENIKNRVREKTINLTDNNHFQGLPIWLSSYIIYDRHSEAKNSDQWQMSQDIQQYLYSFKQHELRNPIVEQIITETLRVVKDIWEIYANKSNIPYSMVYDLKKKKNVKSYNCFFDEIHVELGREMKNTADDRKWLTEQVSNNEATNLRIKALLMELKENSDGKLLVENVRPHSPMQQDALKIYEEYALQNNEKYDENKKEFIVYPIAEDILKISKTAQPSKAELQRYKLWLEQRYRSPYTGNMIPLGRLFTEDYQIEHVIPRSRYFDNSFNNKVICESAVNQLKDKFLGLEFIKEYFGQEVELGLGKRARIFTENEYKDFVKDHYSKNKTKRQNLLLEDIPEQMIARQMNDTRYISKYISSLLSNIVRADKEDDGINSKNLIPGNGKITTALKKDWGLDSVWNDLILPRFERMNQLTNSDDFTYWNEQYQKFLPVDYSPADSKRIEKKRIDHRHHAMDALAIACMTRDHVNLLNNQSAKSETSRYDLQNKLRCKSRETWFDKKINKQVERDVFKEFKKPWDTFSTDANNALKTIIISFKQNLRVINKATNNYEKWIEKDGKKVKEKVKQEGINWAIRKSLHEETVSGRIDLPWVNVSKGNFLTATRKNIDSSFTIEKTRKITDTGIQKILEEHLKQNQNNADLAFSPQGLEDLNRNIAELNDGKNHKPIFKVRLYEMGSSRFSLGLKNNKQSKFVQGAPNLYFARYSDSNNKKFYETIPLNIVIERLKQGLEAVPEKNTEGYSLQNFLSPLDLVYLPTVEEFDMPHLIDFSKLNKHQIERLYNVNDFSGVTAYFIQNSFAKNIYPKEMDLSWNDKKQKLSGSFDSKTASYNKRSIKEICIKLKVDRLGNISL

SEQ ID NO: 1535 - protein, 1710 aa, unidentified
  REGION 1..1710: note = Description of Unknown: Cas Enzyme sequence
MKKILGLDLGTNSIGWALIEIDHENKIVRIIGLGSRILSMDAGEISKFETGGKLESAAAQKTKDKTIRKLNERFLLRRDRLHCVLNLLKALPTHYKVAIDFENEKGYRSGQFKKGLEVKLAYAKDENGRSKFLFINAYREMEEEFKTDKPSLFYKKRNGNITKIPYDWTLYYLRKKALTKEITKEELAWITLSFNQKRGYEKTIGQDEKKQKEGELSETFIGKVKSVTELGVNDGLKLFEIVLVDVDIQANELYSYKEESLFQITGIDDLKEVEVISKYNENGEINRKDTVYTVKEIRKIRIEDVKYTNKKIKENLVFEVILETGWIKEQQSKYLPKWKNTQRDFIIKTNYDFKGDRVLKGSDKGRNINAPKEEDWTLQKLKTETALSSFNTKNKTVGVASYVYNELLKNPEQKIKGDLITVIERKYYREELEKIIECQKEFHSELEDVELYKKAINLLYPHNDNHRKKLETYLGSDNVLPFSKLISDDIILYQRDLKSKKSLITDCVYEKENYKKIDKKSGKEFQEPLKAIHKANPLYQEFRIWQFIKRLKIFQLETTEDEIVLLNQDVSKSIFTNEVKEKLFEFLNNREHITQSVLLKHLGLSEKEYKWNYEPEHKEPCNETRYNFILRLKRIKGFDWKSFLSPENEYRIWHFFYSVKKQEEFKKGINSLFEKLLMRSQFALDYKGDLVKNFIAFGGYTNDYGTYSEKALNKLLPFLRIGKYWNSEKIDVILKNRSQEIKDKDTTNLLKISKKEVINGEIADFQGLWISSACYLVYGRYSEVGDAQYWNTPDDIDNFLRNEFKQHSLNNPVVEKVLVETLQLVKDIWKYFGEQDGQNEDGKIIYQKLFDRIHIELGREMKKNAKEREKENKRNNENQKTNERIIELLKELKKENNDVRTKSPFQQEKMRILEADLLSSIEYDKDLTVYNFINSTKTITKKEIKEITSKDISKISRSDFARYKLWLDQRYQSPYTGRIIKLSDIFNREKYEIEHIFPQERITLNAMYNKVICETEVNKAKKALTGYQFILDSKGIRKIKCAAHNNEEIEILSPEAYEQNTKANFTDKRKQEILLSKEIPEEFTNSQLNNTRYISKMAMKLLSNLVREDEEDSFRSKNVLPVTGLITTRLKHDWQLNDAWNELIQSRFERLNKLTNSNLFGDFQKINGHDIFINRVPEELSNDFDKKRIDHRHHAMDALVIALATENHVNYLNNISSQDSKEDKLEHRIKIKSQLTHNKKNDEGEKTQLFLPPAQYKHDGKIVEYSYQFEGCINNTFKVIALESLKNTIVSFKQKKRIIKQRANKYQKWNPESNCFELISENALMNKGKYNVRQSLHKATYYGRVKLKLTKTFSLISAIDEVDNIFDKALRIEIKKMLKKGISKQEIEKYFDIPRVNFENLDITKVKVYYWDIDNKGNGKNVATRYDNFLESFATIDAEKIQAAIESVTDTGIQKILFNHLYQFNLTNEDSTYKYQPDIAFSFDGVKEMNENIKELNNGKSHKPIYKVRLSTQLGTKFSVSEEGLKSKKYVVTAAGSNLYCGVYENKTTKVRKFKIPTLRETIENLKQGYSPCNESIFDEETNEIYALLFVLSPNDLVYLPSKNEPLDAIYIRDFSKEQINRIYKFRDASINERGGLQINFTPSNWANMIFKKDKNTPKIFLKNGKELQGEIALTTDKDKSQNSIDDNLQIRATCWKLNVDRLGNIKMGK

SEQ ID NO: 1536 - protein, 1394 aa, unidentified
  REGION 1..1394: note = Description of Unknown: Cas Enzyme sequence
MKRILGLDLGTSSVGWAVVDQAENENESSQIIKMGVRVVPIDSNEKDDFEKGKSITTTADRNLKHGMRINLQRYKQRRAHLISILKRNGFINDESLIYEDGNHSTFETYRYRAKAATEEITLEQLARVLLMINKKRGYKSNRKADKKEDGQLIDGMSIARKLYDEHLTPGQFVYETMKGGKKYIPTFYQSDLRAEFNAIWNYQAQFYPDILDDELRTKINGRRKNDTAKVIFAVKHVSIAENKDRKTRQLIAYRWRSEAVNKLLPIEQVAAVLCDINDDISKSSGYLGKISDHSKELYFQKLTVGQYLMQQLERDPHYRIKGKVFYRQDYLNEFNTIWETQSQFHPELTEELKEEVRDTIIFYQRKLKSKKGLISYCELEGKEIMVTVDGKPKKVMTGPRVCPKSSPLFQEFKIWQELNNVLIENKRIKISKKKELSLFPEPDKFVPLTKEQKELLHNELTVNIELSKKEVLKLLGLNEKDYSLNYKALHGNTTQVQLISAYKQILEWTGHDVERFDKLDYETKMQFITSVFEANGAKTDYLIFNPNQLDNYLDQPAYRLWHLLYSYEGDGSETGDVKLKEHLEELTGLNDEFVSALASIQFEQDYGALSAKAIRRILPHLVDGKVYSDACEAAGYRHSAQSLNREELDTRTLAKNLEILPKNSLRNPVVEKILNQMIHVVNAAMEEYGVNIDGVKRFDEIHVEMARTLKQTREQREKASSSLDLRTRENASMASELRQNFGITHPSRNDILRYRLYMELKDKGFHTLYSNTYIPKEELFTKRFEIEHIIPQAKLFDDSQSNKTLETSEVNKEKGDKTAMDYVLDKYGEVGAEQYRQRIAFLYDKNNKNGTNKKFKNLTTTEAEIPSDFLNRDLADTQYIARKAREILMQVTRTVVPTIGAITARLRKDWQLVDVMKELNMPKYKKLGLVEKYVNRDGQEIHIIQNWTKRNDHRHHAMDALTVAFTRHEHVQYLNNVNAHRDEDNLHTNAIALRSKLIKDRLFLPPMPLDQLRATALEHMRSILVSIKAKNKVATRHVNRISGSDVRQVTFTPRTQLHKEKFYGLRQRYVTTVKKVDGKFDAQTISMVARKDYREALMSRLDEFGGNSKKAFTNKNTLAKVPLYTDALHVHKVPESVKLVWLETYYTIRTTIDPSINIDKVVDHHVREILQQRYEEYGKDAKLAFSNLDENPIWLNKEKGIAVKRVTIQARLTEPISLHNKLNRDGSLMVDCEGKTMPVDFVNPSNNHHVAIYEDADGNWHERIVSYFEAIAHINNGMSVVDKYYKAAEGWRFKFTMKQNEYFVFPDESSGFNPQEIDLMDESNYAFIAPHLFRVQKLASKDYFFRQQFETSVTAGNSLPQGVAFIRINSLNNLKGIVKVRINHIGKIVHVGEY

SEQ ID NO: 1537 - protein, 1399 aa, unidentified
  REGION 1..1399: note = Description of Unknown: Cas Enzyme sequence
IMKKILGLDLGTTSIGWALVNEKENDNEKSEIIRLGVRVNPLTVDEKSNFERGKSITTNADRRMKRSIHRNLQRYKLRRKNLIECLLEHHIISDETPLFEQGNHTTFQTYRARAKAVTEEITLEEFARVLLMINKKRGYKSSRKVKDGEEGELIDGMEIAKRLYEENLTPGQLLLDLYNKGKKNKPTFYRSDLQAEFDKIWDVQSVFYPNILTDEFKSSINGFNKTQTSGAFYGVHQIYTAKNSGKEGYAQSLIWRTEALKHQLDIEEVAYALADINGAINNSSKRLAMISDRSKELYFNHLTIGQYLMQRLDENPNNSLTNIIFYRQDYMDEFETIWEKQAQYHPELTSGLKKEIRDIIIFYQRDLKSCKNLINYCELEHTEREITIDGKKKTILTGCKVCPKSSPLFQDFKIWQILNNIQVSVVGHQRKRIKKDKPQLSLFDDVETGALNRFLTQEEKDILYNELSVKDKMSKRDVLMLLFDNPKNLDLNYKEVEGNRTMATLFKAYQDIISLTGNGDYDFSKMPADKVKSITTEIFNGLGYKTDFLSFNPLLEGKALEQQPAYRLWHLLYSYTGDKSVTGNEALLAKIQELCGFEKEYATILSNVSLALDYGSLSAKAIRKILPHMMKGYEYSEACKMAGYNHSARSLTKEELANKEYKSRLDIIKRNSLRNPVVEKILNQMINVINEIIKTYGKPDEIRIEMARELKKSQEERELLDAAIRKNTAESEKLRKELEEEFGIQHVTRNDILRYKLYNELKLNGYKTLYSNTYIPREEIFSKRFDIEHIIPQSRLFDDSFSNKTLEVRDINIEKGNMTAYDYVAGKYDEKYLVDYESRVEELFAQKVISRTKRNNLLMKEEDIPSDFLERDLRDSQYIARKAREILEELVPFVVTTTGAVTSRLREDWQLVNLMQELNWNKYNALGLTERYTDKNGNIVKRIKEWTKRNDHRHHAMDALTIAFTKRSIVQYLSNMNARTDKSSSIYGIEQKELHRDAKDHKLVFNAPMPLNEFRVEAKKHLESILVSIKAKNKVVTKNINRGKTKDGHQQKVQLTPRGALHNETVYGKIRNYEAEYRKVDGKFTEDVILRVSNQKCREALMKRLAEYNDDPKKAFTGKNSLEKNPIWLNSDHSYAVPLKVKLYKIVDVFTIKKAVDKDLKIDKVIDCKIRTILQQRLDEFGGDAAKAFSNLDENPIWLNKEKGIAIKRVKIRAKVSSDTSVPLHEKRDLLGNLLKDTDGNVLPTDYVNTANNHHVAIFVDSEGNWHEHVVSFYEATASALLGLPIVDKNYKSEEGWKFLFSMKQNEYFVFPNEKTGFIPSEIDLMDPKNYTLISPNLYRVQKFSSSFYVFRHHLETNVDESNELKETTWKRIQTIKYLDGIVKVRLNHIGAIVTVGEY

SEQ ID NO: 1538 - protein, 1391 aa, unidentified
  REGION 1..1391: note = Description of Unknown: Cas Enzyme sequence
MKKILGLDLGTTSIGWAYVNEAEKPNEKSSITRLGVRVVPLSVDEKNNFEKGKDITTNADRTRARGMRRNLQRFKLRREALVECLKRNGLITDDSALYEESNNSTFRTYRMRAAAATEEISLEDLGRVLLMINKKRGYKSSRKVNKEEAGDGVLINGMDVAKELYRRQITPGEYMFSLLSKGKKVKPEFYRSDLLAELKAIWVKQQSFYPDVLTNEMFEEIQGKSRTQTSTIFYKQKLQNTALNKGKDKRLQAFSWRADAVNKQLPLDEVLSAICDVNGSINGSSEKLGMISDRSKLLYFNELTIGQYLMQRLENNPNASLTNIIFYRQDYMDEFDRIWATQSKYHTELTQQLGAELRGIIFYQRGLKSCKGLVDYCELEHQEKEIVTSEGKQKTVTISSKVCPRSSPFFQEFKIWQKVNDIVVSPKNGRRKPKKNQQPSLFEEDTPLGPRYLNAEERNILFRELSIKAKLSKREILELLFENPKALELNCKEIEGNKTGEALFHAYQDIISETGNGDYDFRFMPAEDVYTTVEGIFKGLDYKTDFLYFDSSLEGKEAERQPYYRLWHLLYSYAGDNSKTGDDSLIEKISDLIGMEKDYARILSKVTFIPEYGNLSAKAIRKILPFMMQGDGYSVACLKAGSRHSSRSLTKEEKASKTYSDHINALKRNSLRNPVVEKILNQMINVINAVAIEYGKPDEIRIELARELKKSKEEREEMTASIDKMTKESELVRVILQKDFKIAHVTRNDILRYRLYEELKGNGYRTLYSNTYIPREEIFDGKFDIEHIIPKAKAFDDSFSNKTLELSSINKEKSDATAYDYILAKYDEEGVCQYEQRVNDLFKNHAIYHTKMCNLLRRTEDIPKDFLERDLRNTQYIAKKAIEILEDYVPTVTSTIGSITSLLRRDWQLVDVMKELNWEKYDALGMTETFEDHNGNRIGHILNWSKRNDNRHHAMDALTIAFTKPSIIQYLNNLNARSDKGGSIYGIQQKELHRDKNNHLVFNSPIPLDEFRAKAKEELQRILVSYKAKNKVVTQNVNKSKKNGGINRKIQLTPRGQLHKETVYGRIKQYATKMVPVNAKMTAEVIKTVAAKVYREALQKRIEEFGGDPKKAFKTLDKNPIWLHRGHTQCVTAKVKVVTLEPVFTIKKAIGPDLKLDKVIDPKIREILQRRLDEFGGEAADAFSNLDKNPIWLNKERGIAIRRVKLRDNSNATPLRDKRNVAGQLIRDVEGKSVPNDYVSTGNNHHAAIFMDSDGNLQEHVVSFYEATERAVQGLPVVDRDYNKEQGWKFLFTLKQNEYFVFSNEKTGFNPADIDLMDEKNYPVVSENLFRVQKMSKKNYYFRHHLETTVDVDYKLRGVTWISIRALNQLKRIVKVRINHLGKIVQIGEYQ

SEQ ID NO: 1539 - protein, 1528 aa, unidentified
  REGION 1..1528: note = Description of Unknown: Cas Enzyme sequence
MIKKQILGLDLGTNSIGWAVVNKTQESDGVYHLDSIIDAGSRIIPMDAAMQSDFARGNTISQTADRTHFRGVRRLRERCLLRRERLHRVLYLMGFLPKHYSDSLTRYGKFKDCTECKLPWTTDEEGHFTFLFKKSYDEMLQIFWQVHPELMKQGMKVPYDWTIYYLRKKALVEAISGAELAWILLNFNQKRGYYQTRGEEQEENKTEKKEYYALKVVDVVDTNEKRGKDTWFDIYLENNMIYRRTAKEAPDWIGKVKEFIVTTQLNEDGTPKLDKEGKIRRSFRMPSENDWGLVKIKTQADIIDSHLTVGAYIFNALLANPKQKIKGKLVRTIERDFYKDELKAILDSQKRFIPQLQDNELYKECIKELYQQNDAYRNSISGHDFTYLFVDNIIFYQRPLKSKKSLIDECPYESHLYIDKEGKQVEKHVKCIAKSHPLFQEFRLWQFVANIRIFEHRKDENGRLLNDEDVTSQFLPDENSRVVLFEYLNDLSSITQKTLFEKYFGIKKTKGKNAEIPYRWNYVEDKQYPCNETRGEILSRLAKSEIDSSFLNNEAEESLWHILYSVNDRNELHKALVKFAQCHSIDSSFADVMVKFPPFGSDYGAYSAKAIKKLLSVMRMGKYWNQANIDASTLARINKIVDGEVDESISKRVREKTISLNDINSFRGLPLWLACYVVYNRHSETQDTDRWEKPEDIDAYLKTFKQHSLRNPVVEQVVTETLRVVGDIWKTHGHIDEIHVEMGREMKNPADKRKKMTERAVENENANLRVKALLTEFLNPEFEIENVRPYSPSQQELLRIYEDTALNSVDDLEDDISDIIRKFAQSEVSKRPSHSEVLRYKLWLDQHYVSPYTGQTIPLARLFTPDYEIEHVIPQSRYFDDSLSNKVICESAVNKLKDNCLGYEFIQKHHGEIVDLGGGRIVKILEMDSYCANIEKIYKNNRTKMKKLLMDDIPAEFIERQLNDSRYISKLIKGLLSKIVREDDEQEATSKNVVVCTGSVTDRLKREWGINDVWNHIILPRFERMNELTGTNKFTSISSSGHLIPDMPLELQKGFSKKRIDHRHHAMDAIVIACTTRDHVNLLSNEAASPKSNQNRYQLSRKLRRYEEVTIKRDGEIKTISVAKEFKMPWPSFASDVEKALNNIIVSFKQNLRVIVKTSNHSMRFVDGKKRMLKQTKGDSWAIRKSMHKETVFGEVNLRRVKTFPLKEAMKRPERILDSELKDRIKAMVKLGYSEKQVKAYFVENKDMWSDIDIKKIQMYYFTKETSDRFFATRKNIDTSFDENKITNKITDTGIQKIMQRHLANYGGDADLAFSPDGIDEMNRNIKELNGGTDHQPIYKVRVYEKANKFAVGQKYNKQSKFVEADDGTNLFFAICENEVQNKQTGEIKKKRSFRTIPLNEAISKMKLGQPLDENALFILSPNDLVYLPTEEEVGCEKIGNIDYSRLYKFVSAAGFRADFVPVNSANTIYDVKKDYAELFCNDAVVQNEFGVGSPKSKNERAITGEMIKETCIPIKVDRLGHILKIGV

SEQ ID NO: 1540 - protein, 1409 aa, unidentified
  REGION 1..1409: note = Description of Unknown: Cas Enzyme sequence
MNKKVIGIDLGTGSIGLSLRNPELSDNIQDQLEWFSVTTFNSGTGTSQRGEYTLASDRRAHVQSRRLKEHSRWKRWSTLSLLVEYDMCPMNRESLERWQTYDKSKGLKREFPIDDTAFIQWLRMDFNGDGVSDCTAFQLRRQLVEEQLDFTLPINRYKFGRAIYHIALHRGFKSSKGETLSGKDEDSEKDAMVVDADNLENVMKKSEEKKTKDLSDYMVAHNFKTVGQAFASLEEEGVRVRNSRYQAIRSQNLNEINEYFHFQKGLADYEDLHRRLISTKKGEGTLFYKLPLRSQKGHIGKCTFEKNKRRCPISHPEYEKYRAWAFINNIKYKENSEGCWLELPLALKQELYREVFTSKVRKDFAFETIRKYLEKRLGLTFMSTDGKKTINYKDKVLVAGCPVTARLQNIASLFDATIDTLILQGVKTRPSKIDGDKHQVTYDALDLWHFCFEADDIEDVKHFASQSLMFDDKAIDSFCKLWASIEQGYTTLSLKALRNINRFLEFGIKTADAIFLAKVPDIVGEVDTDNLIRFFNEQIKAPVESTMRIAKVANTLIANYKSLSLNDRFADHDFEYQLQKDDKEDVIRCIQNTDSSFELMDADEQQTIIKEVTRLYQAFFADINREYVKVPKFADVLVSKLKKLYPDVKEEHWQKLYHPSMVSDFPRDKDNANLLGSPKIGAIRNPTVLRALNVLRSNINKLLAEGLDPQETRIVVETTRVNNDINKRRAIERYNEERNAENREIEKILNEFYGSVIEENIDAARYVLEQSGEDLLTADDPDNRHYRHQIKRYKLWLEQGCQCLYTGRIINLTNLLADNLFDLEHTVPRSLSFDSSDKNLTICDAYYNRHIKQNRIPTELPNYEVDVTIGGHLYTAIKPRLKMWQDKVERMSQNVLFWRNKAKKAQTEQSHNDCMREMLLWQMEYDYWRQKLDRFTMKPKDLTDGFRNSQLVDTGIITRYAVLYLKTLFAQVDVQNGQSTSAFRKIFGIPQKDRSSNFHHAVDATILTMIPSSAKRDRMLKLFYQIDEQRKGGHEVSGLEFQLCREIASCGLGAGLADIENFISQRVMVDFYKQDRVLQKDRRPVMRKGKPLKRKTNDGKMELVTFSSDSIRGELHNQTFYGAIRRRNDDKEFYVVREPLKYKSSDKDKGFKDWKELNKRIVDLNHPADSEEFKPMVQMMMRQFPEGTSFKEACEQGIYMLGRDGRKVNRIRHIRCYGKNVANPVKVKRHTYPSDKEYKQHVLAALGDGSVYALCEYSDGLTTEYKRYTYMEISENRKSGLEDIPAIYPNKKGQPLQLARKIMKGDMLLIYEKTPDELLYLDKLELSKRLYKVQFFEGEKGITLFHHLLSDSKTKEKGNGGEKKRNKGESIKDYKKLPPIIRCSINGFLYLQKGVDFEFTKDGIILKHI

SEQ ID NO: 1541 - protein, 1353 aa, unidentified
  REGION 1..1353: note = Description of Unknown: Cas Enzyme sequence
  MOD_RES 1338..1353: note = Any amino acid
MKRLGLDLGSSSTGWALREDDKIIANGVITFKSGMVKGQGGGYSSPTKDRRVARSKRRLIQARKYRKWELLKILAEEYAPLTKAELEKWSKYKKGDLQKFPENIQFQRWLASDFSYEGGVKYLNPYQLRIKALDHKLSKHELGRALYHLVQRRGYKNIGESDWDEVNVELAKKDTETKTQIERRDKSGFQKALKNNRTIAEALQKEFLDKGERARNQYPYRKEYRDEFELICNAQGYDISKNSKGEFANTFVFKLWKAIIWQRPLRAQKGNIGKCTLEPTKTRCPVSHPVFEVFRAWSFINTIKYSDTDKDEKQFLSHETRKVLLTSFFLNQDKNFKFEEIRKFLDKHFKSKKIYNYHYNAKENIYDSSVSGMPICRGLIKIFGDTAIDAIDSIHKYNIGNAPKIVSKYSIYDLWHALFEFDENYLKKFSIENLSISNEQNKKGEEFNPFVRLKDVIDVSYSDLSLKAMCKIIPFLKDGYLYNEAVVLAKIPELLGNKWEIEKEKIYSCIKKSTKSYDRNKSIVAISNNLIDKYKGLENEVKFAHKDFNYRLTNDDKKEVEEFCENFFGEHSWQNRDDKEEIIQSVRKEYQAFFTDTKRAYRITPLLTNILNELFKTDNITINGKLYHHSNTENRYLKKHTNPETGEINLPEYVNRDTGVIYEILPEAKIDSIKNPMFNKSISILRKLVNELIKSNKIDKDTEVIIELARELNDNNMRVAIERYQRFREDNREKYRQFLNEFKENENVPINVEERIPQFELWTEQVLEKIKDENGKEINKNTAILKEKSALKRYELWMEQKGQCMYTGDMISITQLFSNEIDIMHTIPRSLLPDNTMANMTIGYSRYNRDLQKQRFPKECDNYDKDVKGWGTRIDTRLENWATIRDGFKEQYEKRIKPFGGEDEVTKNKRIQEKHYYKMHFDYWKDKIERFEATEIKDSWARRQLVDTQMISKYAREYLKTYFKKIIVQKGSVTADFRKMYGFQEQDKIKTRNRHTHHSIDAAVLTLIPTNSSYRERLLKKMYETYENKKKQFTALPYPGFNSQQLINDIENKTLIVNFEKDTILKQTSKIVRKRGRLQYIKNKKGEFVLDKDGKRIIKVAKGDTVRSELYAQTYLGKIRDIERHKDGQPMRDNGDWKYKTGKDEFTFVVRKSLKDVLSYIDDIVDPVIKEIVKKQKENAVDPQGKKIRHVRIKTKAGQIVKERVNYRSEKDYKNKFYSSAGSLPYAILLQNNINERIERELIPVASFEIAKYFKKEGKFDANGFIAEKYPQYNHWSDKKLLKTGQKVIVFNNDDEYKNKIDLNFLKNRLYKITQFGTSDNNIYLKYHLEAQADGDIXXXXXXXXXXXXXXXX

SEQ ID NO: 1542 - protein, 1505 aa, unidentified
  REGION 1..1505: note = Description of Unknown: Cas Enzyme sequence
LKKIRIFAFSKHSVTMSKIVGLDLGTNSIGWAVIDNEQKQIEAAGSRIIPMDAARLSDFEKGNSVSQTADRTKYRGMRRLRERYLLRRERLLRVLSVMGFLPEHYASQLNRYGHLPEDNEPRIAWREGKDGKPEFLFRTSFSEMVDEFRKAGIGQNIPYDWTIYYLRKKALTLPLTKEELAWVLMQFNQKRGYNQLRGKADESMGDDTDKGEEKEYHELKVIKVEETGDKDKKGVSWFNIVLENGWIYRRVFSIAPDWEGKVRGFIATFKLDKEGNRKEGEQPRLKSPDENDWGLRKIKTENDIKQSQCTVGEYIYKTLLNDPTRKILGETVRTVERELYQEELHRILEKQREFIPELNDKELYNRCIEELYPANEAYCNSIANRGFVYLLADDILFYQRPLKSKKSLIADCPYESRNGKPIKCIAKSHPAYQEFHLWQFLSNLQVYQDDTKITSTLLPDGNAYADLYDHLAKQKEIDQNGLLRYFKIGRKEVSKYRWNYVQDRKYPCGETRAVLLGGLHKAGIDEKFLTPEKELHLWHILYSIDDQRQYEKALNTFARKQGWDAHQCEAFVQSFKRLTLCKEKDYGAYSAKAISRLLPVMRRGRCWNAEEIDTQTRERIEHLITAEEDEGLTTSVREKLKHIRSIEDCQGLMTWQACYLVYGRHSEAAEAQKWTRPEDIDRYLEEFRHNSLNNPVVEQVVTESLRVVRDILRQTGRIDEIHIELGRELKKTKAERESLSRTILENETTNQRIRKLLTELMNPECQVENVRPNSPSQLELLKIYEDGAMNSVADVPEEIKEIQKRFSAAKNQPTHAEVMKYKAWLEQHYISPYTGKFIPLAKLFTPAYQIEHIIPQSRWFDDSMSNKVICEAEVNKLKDRELGHEFIVHHHGERVPLSMGRDVEILSVDAYEKLVKDTFANNRKKREKLLMDDIPEDFVNRQLNDSRYISRLMMHLLSNIVRAEDEDGNQEESTTSRNVIPCNGSITDRLKHDWGIDDVWNRIILPRFERLNNITNTPVYTATTERGHLIPQVPLHMRQGFNKKRIDHRHHAMDAIVIACATRDHVNLLNNEAARSSMRYDLNHKLRIMDYYLGADGQKHERFGEFYKPWETFTEDVQRSLEGIIVSFKQNLRVINKTSNHYTIIQDNKHVNVKQKKGDSWAIRKPLHKETVFGEVNLQLTKRVPIKKALEDINSIVDRELKEMIKAKKKLTHTNKQIEEFLVKNKDIWSEAADGKIEVYYYTADTNDRYFATRKPLLDVMKDIATEPAAQKAIDSITDSGIRSILRAHLGAENNNPAEAFSADGLERMNRNIKALNGGHDHLPIKKVRVYEQANKFSVGNKGQKATKFVEAAKGTNLFFVIYTNSNGTRGYATVPLNIIIELQKKYEKDWEAHLAERLQGEDLQLMPKGAKLLYVLSPGDLVYVPTEEEHKNGIENVDTTRIYKCISATERTCLFIPYSVASIILPGKEYEAKNKMERAITKEMIKEVCIPIQVDRLGNITKIG

SEQ ID NO: 1543 - protein, 1212 aa, unidentified
  REGION 1..1212: note = Description of Unknown: Cas Enzyme sequence
LPYQFINIQQSMKFILGLDPGIASIGWALILEAENDDEVSRIIDSNVVKVDFDNFAYVNAKGKISDGNPINMFKKGFSVSPNFVRRQKRGAHRNLQHFKLRRGDLIELLLKNGIIDKDTLLCEDGKGTTYETHLLRSKAASEEISLSELARVLLMINKKRGYKSSRKGDVDADVEDMGAYLAAITGRSKLLADNHQTVGQYLMSQLALHPLQGIKHQTFYRKDYEEEFEQIWKTQIRFHPELTRKLKKEIKNRIIFYQRPIASKKGEVSLCELESKEIEIEKDGKKKKIKTGSKVCPFSSPLFQEFRMWQRLNDIILTNTKTLEQRFLTQEEKERLASELSIRDRLSKRDAIKVLAGKQARIFDMNFDELLGNETQAKLVNAYLKILEQTGHDKLDVKKLTAQNVLVAIRQVFGGLGFHTETIDGEIKLHPDIYLQPFYRLWHLIYSFPGDNSRSGNDKLVERVKEFFGFDNVEYAKFIADITFPDGYASLSAKAIQKILPKLKEGYQYNKACELVGYRFSKRSLTKEENDERILQKYLNFIPHNSLRNPLVERILNHMISLVNSLVDEYGDTYGEFDEIRIELARDLSKNAESRKKMTQDIENNKNERDTCRKELIDILNENGYKVNYVSENDILKYRLYKELAPLGYQTLYSKTEVNIVDLIVHRKFDKEHIIPKAKSPSNAFSVLTIELSSINEEKGDMTALDYVKWKYGEEETQQYIARVNDLFKQKAISKAKRDNLLKTAADIPNEPLNRDLGLTQYINRKAYEILGTITRKVVPTTGSITSRLRDDWQLVDVLQELVWDKYNRLGLIDTYTDKDGKTVRKINEDAWSKRNDHRNHAMDAITVAFTKPAYIYYLNSLNSQGEQREQMLKMRQKNLYRDKQGNWRFNAPMPLGELRAEVKRQLENIIVYQKTAPNPVSPNLNITKTKKRKEGNRLVQLTPRGKLHDDTYYGSFREKIPGDGEVVVFTKRVEVNESLKVDDVVDKGVQNILRNRLHEYNNDSKKAFTNLDENPIWFNREKGICIKKVVVRVNKELRPIHKKKNHKGEILLDKHNKVQESEYVMTNNNHHVAIYEDERHELHEVVVSFFDAVERGIHGKPVVDREFNADKGWRFLFSLQQNDCFVFPDKGFDPLVIDLTSKDDYALISPHIFKVQTISKGDYRFRHHYDASKDFNSNLKNLTWKRIRTLNDLKGIVKIRITKIGRIEYVE

SEQ ID NO: 1544 - protein, 1568 aa, unidentified
  REGION 1..1568: note = Description of Unknown: Cas Enzyme sequence
MKKILGLDLGTNSIGWAVVDANETTRKDNTTYLEPNNICCAGSRIIPMSADILGDFDKGNSISQTAERTKLRMMRRLLERNHLRRERLLRVLKIMNFLPKHYDDKVSRYGKFIDDSEPKLPWRKNEGGKMEFLFQDSFYEMLSDFKQHQPQLLSDGKKVPYDWTIYYLRKKALTQRITKEELAWILLQFNQKRGYYQLRGEEEEEKANETVEIISAKILSVEKKEKDKKYEKYWYEMHLDNDMTYRATFYNDVTSWEGETKDFVLKRTTLKDGSTKDELSFLPTSEEIDRMDEQRKARMYAKIKLRTEKEIENSHKTIGSYIYDSLLQNPDQKIIGKLVRTVERKFYKEELIRILEVQQELIPELKDDALYQRCIEELYASNEAHRKSLAKPDYVNLFVNDILFYQRPLKSKKSLIDDCPYEYHVSKDGEQHPIKCIAKSNPYFQEFRLWQFVQNLRIYQRERTVTDGQLDLFTNTTTGKLQTDVDVTSEILRTEDDYVKLFNWLNDRGSIKQDSLLSSYFKVKKEKSKDKYPYRWNYVEDKEYPCNETRATILSGLTKCNISADFLTHDNEMSLWHILYSIEDKAELFKALKKFARKHQLEESFADVLSKTKPFKKEYGSYSEKAIKKLLPLMRMGSYWDEKKIDVHTRERIEKVINGVYDENIKNRVREKTINLTDMQHFRGLPLWLACYIVYDRHSEAKEVEKWEKPEDIDRYLRNFKQHSLRNPIVEQVITETLRTVRDIWKQEGQIDEIHVELGREMKNPADKRRQMTERIQQNENTNLRIKAMLTEFMNPDMGIENVRPHSPSQQDILRIYEENALDNLSKEDKDYDFVSKISKTAQPSKSDIIRYKCWLEQKYQSPYTGRMIPLSKLFTPAYEIEHVIPQSRYFDDSFSNKVICEAEVNKLKDRQLGFEFIKNHAGEIVQLSQGGTVTIMSVEAYEKFVKDYYGSNRTKMKKLLMDDIPDGFIERQMNDSRYISKVVKGLLSNIVREKDVNGELEPEAVSKNVISCTGTITDRLKKDWGLNDVWNHIVLPRFKRLNEVTGKDCFTTYSREGHEIPNMPLELQKGFNKKRIDHRHHAMDAIVIACATRDHINLLNNEAAHSKHNANRYQLQRKLRRFTTITINGKEREIAQEFLKPWETFTTDAWQVLSNIIVSFKQNLRIINKTTNHYQHFEDSGKKGFKKQQKGDSWAVRKSMHKDTVFGEVNLRLKKTVSLNEAIKKPENIVNKEFKKIVIELLSKGRDAKFIKKYIENNKDIWSDINPAKIEVFYFSKDEKKRNGEPRERYFATRKSLDTTFDEKKIKESVTDTGIQKILLAHLAAKDNNPEQAFSPDGIEEMNRNITTLNNGKFHQPILKVRVYEKADKFAVGQTGNKAKKFVEAAKGTNLFFAFFGTEKENKSNGKMEVVRSYMTIPLNVMIDCQKKYGVQWRNNIEEYLRGKDMISADAKLLFILSPNDLVYLPKEGDRKEYIMPLDGQRIYKFIDPAQDKGNFVHYSVAKAIFSTKFTDQKKQNISYPIQDEFGLGSQQTKSPRATTGEMIKETCIPVKVDRLGNVIEIDGKSI

SEQ ID NO: 1545 - protein, 1223 aa, unidentified
  REGION 1..1223: note = Description of Unknown: Cas Enzyme sequence
LKDVVKTDSTYTAKSGKDKGSELPIYNVIVLDEDEEIEGTTKLQTLSEKIGEEIELEIRIKKTKKGDSIAFALPQKTNWRKQMEETEHLLKAKNYYPCQLFADDLRNNKWTKIRNRVILREQYKREFDAVWDEQAKHYPILEKCSNDVLNEIVSYIFPGPSDSQKKLRELGLRNGLKYIIKEQIIYYQRPLKSQSDLIGTCQFEKEEKVIPVTHPLFQEFRCWDQINRLYIRSKQQIWNEKKGKFVLQYQNRYLTEEQKYSIYDRLQEQKQLAFKEVAKIVNIGDDKSEFLNGLHVKAKLSGCDTRISIKKILKGYCEPDTTLIENIWDAVYNNVHEGSEYDESSKRVLSIINVLPQTLGNERRTELALKIAQNIKFARKYASLSKKAIENILPIMRPYPEVIPEKVKKNFEDIKWLIDTGEVIDESILQDYIIDFVKDNPQALEHGGLMYAFASSLVYGRHTKEEVKPQLKDYHDIKYVERNLRNPIVEQIANETMQIVKSLWKQFHLNPNELEIRVELARDLKNSAQERENIFKAQNKNRNGNERIKERLKQENVPVTDLNILKYKLYEQQSYISPYTKNTIAFSKLFDDNFYNIDHIIPKSRYFDDSIANKVICESNINEEKDNRTAWEYISQQSSQYTILTPEDYLNHINGSFYGQKKKNLLAEKIPSNPVARQMKDTQYISIAVKNELAKIVGSERVKTTTGGVTDYLRSQWGLRKLFMELTEARFKQMELWNLNEDGTPKESWVKKGYDETTHKNVYEIKGWSKRYDHRHHSIDALVVALCNEKFIKRLNDLNKYFQEELAKHKSSIPIVDEDSIEIAFFNLPREKRNKIMQEIESSRKFDAPFDNLVAEAKRQLESMIVSQKPKDKLSIKEDLNGKKQLKIRAALHQETYYGKTNGRDTKTIAISMLKAKDIPQIVDEVLKKEIDAHRKKYESMKEAFTGEGLIAFNESRFQTKNKSALKPPVYKVRLWYSNKEKETGNLQPLYGKAAKRTVVTGDNYMFVVMEKSGKRVFDIASLFDSVALAKEYVKQGIIDIDSIKKKICDDLRIYNSSNGKESKADKVLFYLQQNDLVYMPKEDDEILRFNELEFKNWLSNTSNKIDFAKRIYKVVKFTGKDCFFIPNNVAKEISIPKDMSKEELEELKSRYKDKAIPKQEQNYIEFGTYSNCTPLEMNKLFTMSMREGKKYKGEKPRKIQDYCIKIKTDWLGNVIEFNGMKL

SEQ ID NO: 1546 - protein, 1398 aa, unidentified
  REGION 1..1398: note = Description of Unknown: Cas Enzyme sequence
MKRILGLDLGTTSIGWALVNEKENENESSSIIRLGVRVNPLTVDEKSNFERGKSITTNADRRMKRSMHRNLQRYKLRRKNLIECLLEHHIISDETPLFEQGNNTTFQTYRARAKAVTEEISLEDFARVLLMINKKRGYKSSRKVKDGEEGELIDGMEIAKRLYEENLTPGQLLLDLYNKGKRNRPTFYRSDLQAEFDKIWEVQSAFYPNILTDDFKSSIHGFNKTQTSGAFYGVHQIYTAKNSGKEGYAQSLIWRTEALKHQLDIEEVAYALADINGAINNSSKRLAMISDRSKELYFNHQTIGQYLMQRLDKDPNNSLTNIIFYRQDYMDEFEAIWEKQSQYHSELTPELKKEIRDIIIFYQRDLKSCKNLVSYCELEHTERDVTIDGKKKTIQTGCKVCPKSSPLFQDFKIWQILNNLQVSVVGHQRKRITKDKTQPSLFDDAETGALNRFLTQEEKDILYNELSIKDKMSKRDVLKLLFDNPKSLDLNYKEVEGNRTMATLFKAYQDIISLTGNGDYDFSKMPADDAKSIIIEIFNGLGYKTDFLSFNPLLEGKALEQQPTYRLWHLLYSYTGDKSVTGNEALLVKIQELCGFEKEYASVLANISLALDYGSLSAKAIRKILPHMMKGYEYSEACKMAGYNHSARSLTKEELANKEYKSRLDTIKRNSLRNPVVEKILNQMINVINEIIKTYGKPDEIRIEMARELKKSQEERELLDAAIRKNTAESEKLRKELEEEFGIQHVTRNDILRYKLYNELKMNGYKTLYSNTYIPREEIFSKRFDIEHIIPQSRLFDDSFSNKTLEVRDINIEKGNMTAYDYVAGKYDEKYLVDYESRIEELFAQKVISRTKRNNLLMKEEDIPSDFLERDLRDSQYIARKAREILEELVPFVVTTTGAVTSRLREDWQLVNIMQELNWNKYDALGLTESYTDKNGNIVRRIKDWTKRNDHRHHAMDALTIAFTKQSIVQYLSNMNARSDKSSSIYGIEQKELHRDEKDHKLVFNAPMPLNEFRAEAKKHLESILVSIKAKNKVVTKNINKGKTRDGHQQKVQLTPRGALHNETVYGKICSYEAEYRKVDGKFTEDVILRVSNQKCREALLKRLAEFNDDPKKAFAGKNSLEKNPIWLNEDHSYAVPLKVKLYKKVDVFTIKKAVDKDLKIDKVIDNKVRTILQQRLDEFGGDAAKAFSNLDENPIWLNKEKGIAIKRVKIKAKVSADTSVPLHVKRDLFGNLLKDTEGKALPTDFVNTANNHHVAIFVDTEGNWHEHVVSFFEATTSALLGLPIIDKNYKREEGWKFLFSMKQNEYFVFPDEKTGFIPSEIDLMDSKNYPLISPNLYRVQKFSSSFYVFRHHLETNVDESNELKETTWKRITSIKGLEGAIKVRINHIGVIIAIGEY

SEQ ID NO: 1547 - protein, 1435 aa, unidentified
  REGION 1..1435: note = Description of Unknown: Cas Enzyme sequence
MKKILGLDLGTNSIGWALVNEKENEDESSSIIRLGVRVNPLTVDEIANFEKGKSITTNANRTLKRSMRRNLQRYKLRRDHLIHILKDNGFIDDDTILSEHGNNSTFETYWLRAKAATEEISLVEFARVLLQINKKRGYKSSRKAKSTEEGQLIDGMEMAKTMYEEGITPGQFSLKLLERGKKYLPDFYRSDLSDEFNKIWDCQQFYYPEILTETIKEELKGKNKKQTWAICSKPFNIVGMKRETKGFEQKIENYRWRTQALTQKLGLEELAIVLQEINGQISNASGYLGNISDRSKILYFNHQTVGQYQMSELQKNPNYSLKNQVFYRQDYLNEFEAIWETQAKYHRELTAALKKEIRDVVIFYQRSLKSQKGLISFCEFESQQIEIETGGKTKKKTIGCKVCPKSSPLFQEFKIWQKLNDVVISGNVIPVEQLDLFGNVSSFKYGKRSLYQEEKERLFEELNYKEKLSKGGILKILFDNPKDYDLNFKELDGNTTQAELFKAYQTIIEMSGHGSYDFSKMESHDAIQIVKEIFNGLGFNTDILYFDSYLEGHLLEQQPMYRLWHLLYSFEGDESVMGNEKLINKISEQFGFEKEYATVLANVVFKPDYASLSAKAIRKILPHLKDGNDYSIACEYAGYRHSKRSLTKEEIKNKILKDHLELLPRNSLRNPVVEKILNQMINVVNGIIDTYGKPDEIRIELARELKKSAQEREELTRYINSTTKLHEEYVQILKAEPFNLSHVSRNDIIRYKLYLELKENGFKTLYSNTYIPKEKLFTKEFEIEHIIPKAKLFDDSLSNKTIEARQVNLDKRDMTAFDFVSSYYGDTYASQYTTRIENLFSDKVISKTKRDKLLMKETEIPSGFINRDLRDSQYIAKKAREILEEIVRVVVPTTGSVTDRLREDWQLVDIMQELNWEKYDRLGLTTTEIGRDGQRIRHIKDWTKRNDHRHHAMDALTIAFTKHCYIQYLNNLNARVQKGIDDYIDLDTVELSALDKDQRSSVMYAIEKKELLRDKHGRLRFIPPMPLDEFRSEAKQQLEHILISNKAKNKVVTHNINISRKKTGTNKKVQQTPRGQLHLETVYGSSKRPVTKEEKINAAFDYQKIQTVVKKSYRDALIIRLKQFGNDPKKAFTGKNSLEKNPLWINDSHTEKVPEKVKTVTYETIYTIRKEITPDLKIDKIIDERIKSVLQERLKEYGGDAKKAFSNLDENPIWLNREKGISIKRVTITGINNAVALHDKHDKDGKVILDKDGKTQPVDFVNTGNNHHVAIYRKPKLDKDGLQLYSDNGEPLFELDEKIVSFYEATSRAVLGYPVIDKEYKKDEGWKFLFTMKQNEYFVFPCYDEEGNILFNPLDYDEDWYCNPNNYAIISPNLFRVQKIATRNYFFRHHLETTVIEPKELKGITYKPQLGLNGITGIVKVRVNHIGQIVSVGEY

SEQ ID NO: 1548 - protein, 1567 aa, unidentified
  REGION 1..1567: note = Description of Unknown: Cas Enzyme sequence
MKKILGLDLGTNSIGWAVVSADEQTREDGSKFLKPTGLCSAGSRIIPMSADILGDFDKGNSISQTAERTRLRMVRRLRERNLLRRERMLRTLKVMGFLPDHFAVQINQEGKFTDDSEPKIPWRKEADGKTVFLFQDSFDEMLRDFAQHQPQIVANDKKVPYDWTIYYLRKKALTQKITKEELAWILLQFNQKRGYYQLRGEEEEEKGNETIEIISATILSVERKEKDKKYEKYWYEMGLDNGMTYRATFYNDVSNWLGESKDFVLKTTILKDGSTKNELSFLPTTDEIERMDPQRKAKMYAKIKLRTEKEIENSRKTVGCYIYDALLQKPDQKIIGKLVRTVERKFYKDELIKILQVQQELIPELKDTSLYNKCIKALYPSNEAHRNTIAKPDYVNLFVNDILFYQRPLKSKKSLIDNCPYEFHRDKDGNLYPIKCIAKSNPLFQEFRLWQFVQNLRIYQRERIVTDGQLDLFSDIAPGKLRTDVDVTSEFLKNEDDYVSLFEWLNGRSAIKQDTLLNSYFKIKKEKGKDKYPFRWNYVEDKEYPCNETRAAMLTGLVKCNISPNILTHDMEMALWHILYSVEDKEEIGKALKNFANKNNLGEGFSEIFSKMKPYKKEYGSYSEKAIRKLLPLMRMGRYWNEEAIDAKTLERIDKIVTGEFDETIKNRVREKAIKLTNISNFKGLPIWLACYVVYDRHSESKEIAKWGTPNDIDDYLRTFKQNSLRNPIVEQVITETLRTVRDIWKQEGNINEIHVELGREMKNPADKRRQMTERILQNENTNLRIKAMLMEFLNPEMGIENVRPYSPSQQDILRIYEENALDNLTKEDKEFEFVTKMSKTAQPSKSDIIRYKCWLEQKYRSPYTGKMIPLSKLFTPAYEIEHIIPQSRYFDDSFSNKVICEAEVNKLKDRQLGYEFIKNCAGQIVQLSQGGSVKILSVEEYEKLVKDFYASNRTKMKKLLMDDIPDGFIERQMNDSRYISKVVKGLLSNIVREKQSNGEYEQEAISKNLISCNGSITDRLKKDWGMNDVWNQIILPRFQRLNELTGTELFTTRNREGHTIPNMPLELQRGFNKKRIDHRHHAMDAIVIAYTTRDHVNLLNNEAAHSKHNANRYQLQRKLRRFVTMTSSINGKEREVAQDFLKPWDTFTTDAWQVLQNIIVSFKQNLRVINKTTNFYLHYDEEGKKKYQKQTHGDSWAVRKSMHKDTVFGEVNLRKKKSVSLNEALKKPECIVNKDFKKKVLELLREGRDAKFIKKHIENNKDVWSDINTAKIEIYYFTKDEKKRNGEPKERYFATRKPLDGSFDEKKIRESVTDTGIQKILLAHLETKGNNPEQAFSPDGIDEMNRNITALNNGKFHQPILKVRVYEKADKFAVGQTGNKGKKFVEAAKGTNLFFAILGSEVTNKDTGKTETARSYLTIPLTIMIDCQKKFGTKWSNNIEDYLKGKDLISSEEKLLFILSPNDLVYLPTRENMQEETITIDKSRIYKFIDPGMNTGNFIPFTAAKTIFSTKFTDQKKIGISYPIQDEFGMGSQASKSPRAFTGEMIKETCIPIKVDRLGNIIKIGY

SEQ ID NO: 1549 - protein, 1567 aa, unidentified
  REGION 1..1567: note = Description of Unknown: Cas Enzyme sequence
MKKILGLDLGTNSIGWAVVSADEQTREDGSKFLKPTGLCSAGSRIIPMSADILGDFDKGNSISQTAERTRLRMVRRLRERNLLRRERMLRTLKVMGFLPDHFAVQINQKGKFIDDSEPKIPWRKEADGKTVFLFQDSFDEMLRDFAQHQPQIVANGKKIPYDWTIYYLRKKALTQRISKEELAWILLQFNQKRGYYQLRGEEEEEKGNETIEIISATILSVERKEKDKKYEKYWYEMGLDNGMTYRATFYNDVSNWLGESKDFVLKTTILKDGSTKNELSFLPTTDEIERMDPQRKAKMYAKIKLRTEKDIENSQKTVGCYIYDTLLQKPDQKIIGKLVRTVERKFYKEELIKILQAQQELIPELKDTSLYNKCIEALYPSNEAHRSTIAKADFVNLFVNDILFYQRPLKSKKSLIDNCPYEFHRDKDGNQYPVKCIAKSNPLFQEFRLWQFVQNLRIYQREKFVNDSQLDLFSNTPSGKLQTDVDVTNEILTTEDDYVRLFEWLNGRSTIKQDTLLNSYFRIKKEKGKDKYPYRWNYVEEKEYPCNETRATILAGLEKCNISPSILTHEMEMALWHILYSVEDKTEIGKALKSFANKNNLGEGFAEVFSKMKPYKKEYGSYSEKAIRKLLPLMRMGKYWNEEAIDVKTLDRIDKIITGEFDETIKNRVREKAIRLTDINHFKGLPIWLACYIVYDRHSESKEIAKWETPNDIDDYLRTFKQHSLRNPIVEQVITETLRTVRDIWKQEGSIDEIHVELGREMKNPADKRRQMTERILQNENTNLRIKAMLMEFLNPEMGIENVRPYSPSQQDILRIYEENALDNLTKEDEEFEFVSKMSKTAQPSKSDIIRYKCWLEQKYRSPYTGKMIPLSKLFTPAYEIEHIIPQSRYFDDSFSNKVICEAEVNKLKDRQLGYEFIKNCAGQIVQLSQGDSVKILSVEEYEKLVKDFYASNRTKMKKLLMDDIPDGFIERQMNDSRYISKVVKGLLSNIVREKQSNGEYEQEAVSKNLISCNGSITDRLKKDWGMNDVWNHIILPRFQRLNELTGTNYFTTKNREGHIIPNMPLELQRGFNKKRIDHRHHAMDAIVIACATRDHVNLLNNEAAHSKHNGNRYQLQRKLRRFVTMTSSIDGKEREVAQEFLKPWETFTTDAWKVLQNIIVSFKQNLRVINKTTNSYLHYDADGKKKYQKQTHGDSWAVRKSMHKDTVFGEVNLRKKKNVSLNEALKKPENIVNKDFKKKVIELLGEGRDAKFIKKHIEDNKDVWSDINTAKIEVYYFTKDEKKRNGEPKERYFATRKPLDGSFDEKKIRESVTDTGIQKILLAHLETKGNNPEQAFSPDGIDEMNRNITALNNGKFHQPILKVRVYEKADKFAVGKTGNKEKKFVEAAKGTNLFFAILGSEVTNKDTGKTETARSYLTIPLTIMIDCQKKFGTKWSNNIEDYLKGKDLISSEEKLLFILSPNDLVYLPTRENMQEETITIDKSRIYKFIDPGMNTGNFIPFTAAKTIFSTKFTDQKKIGISYPIQDEFGMGSQASKSPRAFTGEMIKETCIPIKVDRLGNIVKIGY

SEQ ID NO: 1550 - protein, 1482 aa, unidentified
  REGION 1..1482: note = Description of Unknown: Cas Enzyme sequence
MSQKILGIDLGTSSIGISLRNPEIQGTLTEQLEYFSVDVFKSGVGLDKSGEYSFAANRTRNRQSRKLYDTRRRRLWETLKLLIEYKLCPLSEESLKSWMKYDKLRGGYSHQYPVDDSVFESWIKLDFNQDGKPDYKSPYHLRRFLVQDENQLNLNNQEDRYKLGRALYHIAQRRGFKSSKGNKSSNSEERDETTNISLSEELKASEIKKSRKLSEYMHQHNCATVACAFADLIDNSIRVRASEYEAVRSDYKQEINTIFEVQKQLSLDSDLYRRLISEKKGEGTIFYKKPLASQKGNVGKCTLEPNKPRCPISHPTYEEFRAFSFINNIRYRSEHCSQWQSLTPEQAIDIYKDLFTSRVKKSFKFQEVREYLEKKLNLALKKEKGTINYSDSVAVAGCPITARLINLMGENWADFYVVGKKQRQNQSKSEKSFHVVRYTTESIWNYCLNADEPEDVERFSVECLGWDDNQTKKLIKLWDDMQQGYAMLSQKAMKNINRLLRLGLRYSDAVLLAKIPDLLYKHGYNICEDDIQTIIDEYQNSIYPKNSSEKTYAIITNALISSYKALDYTERFADKDYEYVLKESDIADIRNKCENHFGEIVWGAMSDEEQQLVLKEVAENYQNFFFDERRDYIKIPKLSDDLLSYLYKRYNLLSEEERGKLYHPSMISVYRPFSSDSKADVLLGSPNMGSIKNPVALRAFNILRKKINMMLEKHLIAPDDTRIVIETTRRKGDVLDDANVRKAFSHYQAERQNERDEIRKIIAEYYPKRGSEEDIDKALYAIEQHEHDDWNEPYLRNGGKNKGMFDMTYSKYIQKYKLWLEQDCCCIYTGKTINIRNLFDDNNTDFEHTIPRSMSFDNSDTNLTVCDSYYNRRIKKNRIPTQLENYDKPAVIGGKTYTAIKPRLKKWEEKVEHLEDMVNYWKRRSTAAVTKEEKDFCIVNKHEWQMELDYWRNKLDRFTRTDIPDSFRNSQLVDTGIITRHSIAFLKSVFNNVVAEKGSVTADFRKILGLQSIEEKKDRSKHSHHAIDATILTLIPVAGLREDILRLYYKKEECVKLNHLSEAQYYEQQLKEKIEQLNLGKGISHINDFIEKNILINHRSNDRTLQNAKRKLRKQGRIVRFKDSKGISKERFVNGDCIRLEISAAGNLGAILLPDTDDDGRYIKVNGKYQYSQDDKGQKNYTMVQRVDIKSFKKVEELDKIIDPIVRQSIKTTIEQYAKFEPKKSFASILSEDIWVRDKKGFGNEIKIDKNGKKLLPIRHVRCKVAAGRGYLKYDSSIPLREQRYISNKPLFNLHDREHKKFVYAQSTGNYICLLYEGIFKGSIHREFVFLSNYEITKLKHYFKHEDGKEINSFAQLKALLMQEPNFHKKTFKKNGKAIECILTAIIRSGDKVLMWKNSPEELFDLSKVELLKRLYIVVKFNAPAPSTNYIFIQSHLNTESDKIEHYNSKQFQCLIEHRDFKISLTEKGDTIIFYDQKDPMF

SEQ ID NO: 1551 - protein, 1538 aa, unidentified
  REGION 1..1538: note = Description of Unknown: Cas Enzyme sequence
MKRILGLDLGTNSIGWAVVERNDSDGRIIKSGSRIIPMDAATLGDFSSGNTKSQTADRTAKRSARRMRERFLLRRESLHRILHLLGFLPKHYDEKIGWDLENDNKHYGTFIEGVEPKIAWKKGEGGKYEFVFQNSFHEMLDDFKKQYPNLISDEKKIPYDWTLYYLRQKALSHKINKEELAWIILNFNQKRGYTQLRDDDNFESTNDKKEEYMCLTVNSVTADDTSKGKDIWYEIKFENSDIIYRKKSKYPLDWVGKKLNLIITTKLDENGAPKQKKDGSIDYSVKNPNENEWALLKIKTEQDLKSSGHTVGQYIYAALLNNPSEKIRGGLVRTIERNFYKEELEQILKKQAEFHSELTNQSLYEECINELYRNNETHRNNISHNDFTYLILEDVIFYQRPLKSKKSLIDDCPYEYHEGVDKETGEIRTYPLKCIAKSNPFFQEYRIWKFLSDLRIIENTKEVNGHILSDVDVTSEFISNDVEWSNLFLWLNDKGCIEQGELLEHLGIKKKEHNKYRWNYVEDKKYPMNATRHVLLAKMQESETLSRELEQSLWHILYSTKSKAEIDKSLSKSSKGGTIYTKLVSSGISETSIEKLKNVKLPDEGYGAYSEKAIKKLLPLMRSGNQWNVNNIDSTTQHRIEQFSKGESMDDLSEKVKQKIASLTDINLYQRLPEWLACYIVYGRHSEGSDIVKWKNPNDINIYLNNFKQHSLRNPIVECVILETLRVVRDIWVRFGDMDEIHVEMGRDLKNPSDKRRRITQQVLENENTNIRIKTLLAEMIHPEFEVHNVRPYSPSQQDLLRIYEEDVLANNVPNEEIQDIITDLSNPTKQPSRSQVLRYKCWLDQKYCSPYTGQPIPLSRLFSSDYEIEHIIPQSRYFDDSFSNKVICESEVNKLKDNNLGYEFIKKYHGQTVQIGSGKMVRILEITDYERFVKDTYGGAKTASKRRKLLMDDIPAEFIQRQMNDSRYISKVIKGLLSNIVRTIDEDGNLEREAISKNLITCNGSVTTRLKRDWGLGEVWNYIVLPRFQRLNELTGNTCFTSFNTHGNEIPAMPLELQKGFNIKRIDHRHHAMDAIVIACTTREHVNLLNNESALPEHQEMKHALSRKLRRCEDVIINGKKRSIYKEFIMPWTTFKNDTLSSLLQIVVSFKQNLRVLNQATNLYSKYKDGQKTFVKQQGADHFAIRKSLHKDTIFGHVNLQRIRTTKLKDALKDVNRIVDVRLKKKIKELKAQHYNDKQLLVYFKDYAYEWKGYDFNKIDVFYFTDEKEKMVATRFLNDLVSIFKGKTKKEDVEKVISQITDTGIQKILTNYLNKNFDRIEFAFSAEGLEQMNENITIYNSGKQHKPIYKVRLFQPKGNKFQVGHTGNNSKKYVVADAGTNLFFAVYQTEEGQRKYQTIPLEEVIMRIKQKLHPVNETDEEGNRLLFYISPDDLVYIPTQDECSISNINTEHFVTNRVYRFIDSSGTTANFIPNTISNVIYHLKKEEADKFCKDSVIQDELGKGSPQSKNQKAITEEMIKDICIPLSVNRLGEIKRR

SEQ ID NO: 1552 - protein, 1340 aa, unidentified
  REGION 1..1340: note = Description of Unknown: Cas Enzyme sequence
RYEKFWYEMHLNNGMTYRATFYNDVTSWEGETKDFVLKRTKLKDGSPKEELSFLPTTEEIDRMDAQRKARMYAKIKLRTEKEIEDSHKTVGCYIYDSLLQNPNQKIIGKLVRTVERKFYKDELIRILETQQELIPELKDQALYQRCIDELYTTNEAHRKSLSKPDYINLFVNDILFYQRQLKSKKSLIDDCPYEYHVCKDGKQYPIKCVAKSNPFFQEFRLWQFVQNLRIYQRERTITDGQLDLFTNATIGKLQTDVDVTSEILQTEDDYVNLFNWLNDRSSIKQDTLLSSYFKVKKEKGKDKYPYRWNYVEDKEYPCNETRAAILSGLSKCGINADFLTHENEMSLWHILYSIEDKAELFKALKNFAKKHQLEEGFADILSKTKPFKKDYGSYSEKAIKKLLPLMRRGKYWVEEQIDSHTHERIEKIINGEYDENIKNRVREKAINLTDIRHFKGLPVWLACYIVYDRHSEAKEIEKWEKPEDIDHYLRNFKQHSLRNPIVEQVITEALRTVRDIWKQEGQIDEIHVELGREMKNPADKRRQMTERIQQNENTNLRIKAMLMEFMSPDMGIENVRPHSPSQQEILRIYEENALDNLSKEDKDYDFVSKISKVAQPSRSDIIRYRCWLEQKYQSPYTGRMIPLSKLFTPAYEIEHVIPQSRYFDDSFSNKVICEAEVNKLKDRQLGFEFIKNHAGEIVQLSQGGTVTIMSVEAYEKFVKDYYSSNRTKMKKLLMDDIPDGFIERQMNDNRHISKVVKGLLSNIVREKQENGEYEPEAVSKNVISCTGAITDRLKKDWGMNDVWNNIILPRFKRLNEITGKDCFTTLNREGHEIPSMPLELQKGFNRKRIDHRHHAMDAIVIACATRDHINLLNNEAAHSKHNANRYQLQRKLRKFVTITINGKDREFAQEFLKPWDTFTTDAWQVLSNIIVSFKQNLRVINKTSNHYKHYVDNGKKGFEKQKKGDCWAVRKSMHKDTVFGEVNLRLKKTVSLNEAIKKPEDIVNKEFKKKVIELLVHGRDAKFIKKYIDDNKDVWSDINPAKIEVYYFSKDEKKRNGESKERYFATRKSLDTTFDEKKIKESVTDTGIQKILLAHLVAKDNNPEQAFSPDGIEELNRNITALNNGKFHQPILKVRVYEKADKFAVGQTGNKVKKFVEAAKGTNLFFAFFGTEKENKQNGKKEVVRSYMTIPLNVMIDCQKKYGVQWRSCIEDYFREKDMIDTDAKLLFILSPNDLVYLPKEYEKNECIMPLDKQRIYKFIDPAQDKGNFVPYSVANVIFSTKFTDQKKRGISFPIQDEFGLGSQQSKSPRATTGEMIKETCIPIKVDRLGNVIEIDGTSL

SEQ ID NO: 1553 - protein, 1543 aa, unidentified
  REGION 1..1543: note = Description of Unknown: Cas Enzyme sequence
MKKILGLDLGTNSIGWAVVNANETARENDTVYLKPFGISSAGSRIIPMSADILGDFDKGNSISQTAERTRLRMTRRLRERNLLRRERLLRVLSVMDFLPEHFASRINRYGKFVDDCEPKLPWRTSKSGHAEFLFQDSFQEMLADFAQHQPQLLADGKKVPYDWTIYYLRKKALTHRITKEELAWILLQFNQKRGYYQLRGEDEEEDASKKVEYLSQKVIRVEATDEKKGEDTWYNVYLENGMIYRRTSRFPLDWEGKTKEFIVTTDLEKDGSPKANKYGEIKRSFRAPKEDDWTLLKKKTEYDIEQSHKTVGCYIYDALLTNPSQKIIGKLVRTVERKYYKEELKRILEIQQELIPELRDTSLYLRCVEELYPTNKAHRNSLGKPDFVRLFVDDILFYQRPLKSKKSLIDNCPYEYHLDKDGNIHPVKCVAKSNPLFQEFRLWQFVQNLRIYQREKTVYDRQLDLFSNTPAGKLQTDVDVTSCFLKSEEDYVMLFNWLNERSSIKQDTLLNTYFKIKKEKGKDKYPYRWNYVEDKEYPCNETRAAILAGLEKCNVCADFLTHENEMALWHILYSIEDKIEINKALNSFADKHQLGSNFAEVFSKIKPFKKDYGSYSEKAIKKLLSLMRMGSYWSDANIDAKTRERIEKIITGEYDERIKNRVREKAINLTDINYFKGLPVWLACYIVYDRHSEAQEIEKWNKPEDIDQYLNTFRQHSLRNPIVEQLVTETLRTVRDVWKQEGQIDEIHLELGREMKNPADKRRQMTERIQQNENTNLRIKAMLMEFMNPDLGIDNVRPHSPSQQEILRIYEENALDNLSKEDKEYDFISKVSKLAQPSKSDIIRYKCWLEQKYQSPYTGRMIPLSKLFTSAYEIEHVIPQSRYFDDSFSNKVICESEVNKLKDRQLGYEFIKNHAGEIVQLSQGGTVKILSVDAYEKFVKDYYANNRTKMKKLLMDDIPDGFIERQMNDSRYISKVVKGLLSNIVREKQANGEYEQEAVSKNLISCNGTITDRLKKDWGMNEVWNSIILPRFQRLNQLTGKNCFTTFNREGHEIPNMPLELQKGFNKKRIDHRHHAMDAIIIACATREHVNLLNNEAAHSKHNANRYQLQRKLRRFETVIINGKEREIAQEFIKPWDTFTTDSWQILDNIIVSFKQNLRVINKTTNHYQHFDQKGKKGLEKQNHGDSWAIRKSMHKDTVFGEVNLRMKKTVSLNDAVKKPENIVNKDFKKKVKELLYNGYDAKSIKKYVEENKDIWSDINLSKIEIYYFTKDEKKRNGEPKERYFATRKPLDTSFDQKRIKESVTDTGIQKILLAHLASKEDNPELAFSPDGIDEMNRNIVALNNGKFHQPILKVRVYEKAEKFAVGQTGNKNKKFVEAAKGTNLFFAFFETEKEDKESGNKEAIRSYTTIPLNVMIDCQKKYGAHWRSNIEVFLKDKDMVDAEAKLLFILTPNDLIYVPTNEDTSNGIMQIDKKRIYKTVSFNKYQCFCINSNVATPIINKVEYTASNKMERAITGEMIKETCIPIKVDRLGNIIELNGTKV

SEQ ID NO: 1554 - protein, 1394 aa, unidentified
  REGION 1..1394: note = Description of Unknown: Cas Enzyme sequence
MKRILGLDLGTTSIGWALVNEKESDNEQSSIVRLGVRVNPLTVDEKANFEKGKSITTNADRRMKRSMHRNLQRYKLRRKNLIECLIENGIISEDTPLFELGNKSTFNTYKARAKAVEEEISLEDFARVLLMINKKRGYKSSRKIKETEEGELVDGMEIAKKLYQEDITPGQLLLELYQQGKKNRPAFYRSDLQAEFDKIWDVQSKFYPAILSQEFKKTVTGLNKTQTSGTFYSIKSISTTKNSGKEAYAQALRWRTEALSKQLDIEEVAYVLADINGAINNSSKRLAMISDRSKELYFNHLTVGQYLMKSLELNPHTSLKNIIFYRQDYLDEFETIWEKQAQFHHELTPELKKDIRDIVIFYQRNLKSCKNLVSYCELEHQEKEVVIDGKKKVIFIGCKVCPKSSPLFQDFKIWQVLNNLEVSVAEHKPKKAKEQSQASLFGSAEMGSLRRFLEQEEKEKLFKELSVKDKMNKKEILKLLFDNPQSLDLNYKEVEGNRTNAAFIKAYQDIISFTGNGEYDFSKMKADDILALITEIFQGLGYRTDFLTFNSLLNGKDFEQQPYYRLWHLLYSYAGDNSTTGNEALIKKIGEICGFEKEYAAILASITLPLDYCSLSAKAIRNILPHMMDGYEYSKACEMAGYRHSARSMTKQELDAKAYKDHLDILKRNSLRNPIVEKILNQMINVVNEIIDTYGKPDEIRIELARELKKSQEERALLDEAIRKTTADSEKYRKELETEFGIQHVTKNDILRYRLYLELKPIGFKTPYSNTYIPREELFSKRFDIEHIIPKARLFDDSFSNKTLEVRDVNIEKGNMTAIDFVSGKYDEQGVAEYESRVEELYAHKAISRTKRNKLLMKEADIPANFLERDLRDSQYIAKKAREILEGIVPFVVTTTGTVTSRLREDWQLVNLMQELNWNKYAALGLTESYTDKNGNVVRHIKDWTKRNDHRHHAMDALTIAFTKRSIVQYLSNLNARSDKGSSIYGIEQKELHRDEKGHKLVFNAPMPLDEFRAEARKHLESILVSIKAKNKVVTKNINRAKKKNGHQEKVQLTPRGALHNETVYGKIKNYEAEYRKVDGKFSEETILRVCNLKYRNALLKRLSEFNNEPKKAFTGKNSLEKNPLWLNEDHSHCVPTKVKLYRIVDVFTIKKAVDKDLKIDKVIDKKIRERLQARLDEFNGDAAKAFANLDENPIWLNQEKGIAVKRVKIRGIANGEPIRIKRDVRGNSIKDANGNTIPNDYVNTANNHHVAVFRDAAGNLQEHVVSFYEATTRAIMGYPIVDKDYNSDEGWKFLFSMKQNEYFVFPNPKTGFNPQEIDLLDEKNMPLVSPNLYRVQKFTTGDYVFRHHLETNVESDNVLRDVTWKRIRSIKELESIVKVRVNHIGIIVAVGEY

SEQ ID NO: 1555 - protein, 1397 aa, unidentified
  REGION 1..1397: note = Description of Unknown: Cas Enzyme sequence
MKKILGLDLGTNSIGWAVVNEAETESEKSSIVKLGVRVNPLTVDEQQNFEKGKSITTNADRTLKRSMRRNLQRYKLRRENLFAVLKENGFIDDSTILAEKGNKSTFETYKLRAKAATEEISLSEFARVLLTINKKRGYKSSRKAKTSEDGALIDGMDIAKKMYEENLTPGQYCLQVLLQGKKNLPEFYRSDLMSEYDKIFDKQILFHPNFLTPELKEELRNKKSEAVWAICAKTFNENGFELVGMKRQGKTIEQKFENYQWRVKALTEKIELEQFVIVIQEINKQITNSSGYLGAISDRSKELYFTKQTVGQYQMEKLLENPNYSLKNQVFYRQDYLDEFEKVWETQSTFHKELTPELKKEIRDIVIFYQRPLKSQKGLISFCEFEHKKIKVYVEGKTKIKTIGLRVCPRSSPLFQEFKVWQILNNIQVLVKDTPEKRPLFQEEKEILFTELNIKEKLKKSDALKLVFENHKELDLNYENIEGNRTQAELFKVYEKIIFLSGHGEFDFSKMPTAKVLDIVEPVFGMLGINTEILYFDSSLEGPDFEKQAHYRLWHLLYSFEGDDSKSGNEKLIIKLNELFGFEKEYAIMLANVSFQPDYGSLSAKAIRKILPHLKDGLDYSESCEQAGYRHSQKSLTKEELASKTLVDKLEILPRNSLRNPVVEKILNQMIHVVNSVVDAYGKPDEIRIELARELKKSATERAELTKFISKSTKEHEEYRTILQNEFGLVQVSRNDIIRYKLYLELKENGFKTLYSNTYISQEKLFSKEFDIEHIIPQAKLFDDSFSNKTLELRTVNIEKANATAYDYVLEKYGEQGVEEYKARIEKMFNTGSISKTKQKKLLFKEAEIPSGFIERDLRDSQYIAKKAREILEDMVKFVVPTTGSITDRLREDWQLIDLMQELNWDKYDKLGLTEIIEDKDGRKIRRIKDWTKRNDHRHHAMDALTIAFTKRQFIQYINNLNARLQKNVDDYVYSGDYDLSNLHRSEVSKVVAYIEKKELYRDKHGKLKFLPPMPIDDFRAEAKKHLESTLISIKAKNKVVTQNINITKNKDGKFKKVQLTPRGQLHNETIYGCIKKYATKQEKIGAAFNYEKIQTVANKKHRQALLNRLLQFDNDPKKAFTGTNSLDKKPIFLNAAQTEKVPEKVITVWFENIYTIRKEISSDLKIDKVVDVKIRQILQNRLDEFGGNAKKAFSNLDENPIWLNKSKGIAIKRVTITGVSNATALHDKRDYTGNVITDENGKPQPADFVSTSNNHHVAIYRDADGNLQENVVSFFEATMRANQGLPIIDKNYRQEEGWTFLFTMKQNEYFVFPNEKAGFNPSETDLLNPDNYHMISPNLFRVQKIATKDYFFRHHLETNVNDISSLKGLTWLRFGLNGIIKIRINHVGQIISVGEY

SEQ ID NO: 1556 - protein, 1568 aa, unidentified
  REGION 1..1568: note = Description of Unknown: Cas Enzyme sequence
MKKILGLDLGTNSIGWAVVNANENTNENGSKHLKPNSICSAGSRILPMSADILGDFDKGNSISQTAERTRLRMMRRLLERSHLRRERLLRVLKVMDILPEHYDTKVSRYGKFLDDSEPKLPWRKSEDGKMVFLFQDSFDVMLAEFKQHQPQLLVDGKKIPYDWTIYYLRKKALTQRIKKEELAWILLQFNQKRGYYQLRGEEEEEKANETIEIISAKILSVEKKEKDKKYEKYWYEMHLDNGMTYRATFYNDVTSWEGEIKDFVLKRTTLKDGSIKDELSFLPTTEEIDRMDAQRKARMYAKIKLRTEKEIENSHKTVGSYIYDSLLQNPNQKIIGKLVRTVERKFYKDELMQILKVQQELIPELKDEALYQRCIEELYAANEAHRKSLSKPDYVNLFVNDILFYQRPLKSKKSLIDDCPYEYHVSKNGKQHPIKCIAKSNPYFQEFRLWQFVQNLRIYQRERTVTDGQLDLSTNTTTGKLQTDVDITSEILQTEEDYVNLFKWLNSRSSIKQDTLLSSYFKVKKEKGKDKYPYRWNYVEDKEYPCNETRATILSGLTKCNISADFLTHENEMSLWHILYSIEDKAELYKALRTFAQKHQLEENFAKELSKTKPFKKDYGSYSEKAIKKLLPLMRMGSYWDEEQIDAHTRERIEKIINGEYDENIKNRVREKAISLTDIQHFRGLPVWLVCYIVYDRHSEAKEIEKWEKPEDIDLYLRNFKQHSLRNPIVEQVITETLRTVRDIWKQEGQIDEIHVELGREMKNPADKRRQMTERIQQNENTNLRIKAMLMEFMNPDMGIENVRPHSPSQQDILRIYEENALDNLSKEDKDYDFISKISKAAQPSKSDIIRYKCWLEQKYQSPYTGRMIPLSKLFTPAYEIEHVIPQSRYFDDSFSNKVICEAEVNKLKDRQLGFEFIKNHAGEIVQLSQGGTVKILSVEAYEKFVKDYYSSNRTKMKKLLMDDIPDGFIERQMNDSRYISKVVKGLLSNIVREKDVNGELEPEAVSKNVISCTGTITDRLKKDWGMNDVWNHIILPRFKRLNEVTGKDCFTTYNREGHEIPNMPLELQKGFNKKRIDHRHHAMDAIVIACTTRDHVNLLNNEAAHSKHNANRYQLQRRLRRFATITINGKEREIAQEFLKPWDTFTTDAWQVLNNIIVSFKQNLRIINKTTNHYQHYEDSRKKGFEKQQKGDSWAVRKSMHKDTVFGEVNLRLKKTVSLTEAIKKPENIVNKEFKKKVIELLGNGRDTKFIKKYIEDNKDTWSDINPAKIEIYYFSKDEKKRNGEPKERYFATRKSLDTTFDEKKIKESVTDTGIQKILLAHLASKDYNPEQAFSPDGIEEMNRNITALNNGKFHQPILKVRVYEKADKFAVGQTGNKTKKFVEAAKGTNLFFAFFGTEKENKSNGKMEVVRSYMTIPLNVMIDCQKKFGVQWRHSIEDYLRGKNMIDADAKLLFILSPNDLVYLPRENDRKEDIMPLDKQRVYKFIDPGMNTGNFIPSTIAKTIFTIKFTDQKKMGISFQIQDEIGVGSQASKSPRAITGEMIKETCIPIKVDRLGNVIELNGKPL

SEQ ID NO: 1557 - protein, 1398 aa, unidentified
  REGION 1..1398: note = Description of Unknown: Cas Enzyme sequence
MKKILGLDLGTTSIGWALVNEKENESEQSSIIRLGVRVNPLTVDEKTNYEKGKSVTTNTDRRLKRSMHRNLQRYKLRRKNLIECLIEHHLINDDTPLFELGNGSTFNTYRARAKAVTEEISLEDFARVLLMINKKRGYKSSRKVKDGEEGELIDGMEIAKRLYDENLTPGQLLRELYEKGKKTRPAFYRSDLQAEFDKIWEIQSAFYPDILTDDFKASIRGFNKPQTSGAFYGVYKIYTAKNIGKEGYAQSLKWRTEALSRQLGIEEVAYILADINGAINNSSKRLAMISDRSKELYFSHQTIGQYLMQRLDENPNASLTNIIFYRQDYMDEFEAIWEKQAQYHPELTAELKKEIRDIIIFYQRELKSCKNLVSYCEFEHQEREVIIDGKKKMILTGCKVCPKSSPLYQDFKIWQILNNLQVSVVGYQKKKIRKESSQLSLFDDIETGSLNRFLSQEEKDILYHELSIKEKMNKKDVLKLLFDNPKNLDLNYKEVEGNRTVALLFKAFQDIISLTGNGEFDFSKMPTDDVLSTATEIFRGLGYKTDFLAFDSLLEGKALEQQPLYRLWHLLYSYTGDKSATGNVALLERIKDLCGFEKEYAIILANLPLPLDYGSLSAKAIRKILPHMMKGYEYSEACKMAGYNHSARSLTKEELATKEYKTRLDEIKRNSLRNPVVEKILNQMINVINEVVATYGKPDEIRIEMARELKKSQEERQLLEGAIRRNTTESEKLRHELETEFGIQHVTRNDILRYKLYNELKLNGYKTLYSNTYIPREELFSKRFDIEHIIPKARLFDDSFSNKTIEVRDINIEKGSMTAYDYVAGKYDEKYLSDYKSRIEELYSQKVLSRTKRNNLLMKESEIPSDFLERDLRDSQYIARKAREILEEMVPHVVTTTGAVTSRLREDWQLVNLMQELNWDKYDALGMTERYTDKNGNIVKHIKDWTKRNDHRHHAMDALTIAFTKRSIVQYLSNLNARSDKSGSIYGIEQKELHRDEKDHKLVFNAPMPLNEFRAEAKKHLGSILVSIKAKNKVVTKNINTFRSSEGQRKKVQLTPRGALHNETVYGKILNYEAEYKKVDGKFTEEVVLRVSNQRYRHALLARLNEYGNDPKKAFTGKNSLDKNPVWLSADHSHSVPQMVKLYKVVDVFTIKKPVDKDLKVDKVIDGRIRQILRERLAEFGGDASKAFSNLDENPIWLNRQKGISIKRVKVKAKVSSDTSVALHVKKDLFGNIMRNKDGQTIPVDYVNTANNHHVAIFVDEEGNWHEHVVSFYEATASALLGVPIVDKDYKREEGWKFLFSMKQNEYFVFPNEKTGFVPSEIDLTNPDNYHLISPNLYRVQKFSSSDYMFRHHLETNVDESNELKGFTWKRITSLKNLEGVVKVRVNHIGQIVNVGEY

SEQ ID NO: 1558 - protein, 1552 aa, unidentified
  REGION 1..1552: note = Description of Unknown: Cas Enzyme sequence
MKKILGLDLGTNSIGWAVVNANENTNENGSKHLKPNSICSAGSRILPMSADILGDFDKGNSISQTAERTRLRMMRRLLERSHLRRERLLRVLKVMDILPEHYDTKVSRYGKFLDDSEPKLPWRKSEDGKMVFLFQDSFDEMLAEFKQHQPQLLVDGKKIPYDWTIYYLRKKALTQRIKKEELAWILLQFNQKRGYYQLRGEEEEEKANETIEIISAKILSVEKKEKDQKYEKYWYEMHLDNGMTYRATFYNDVTSWEGEIKDFVLKRTTLKDGSIKDELSFLPTTEEIDRMDAQRKARMYAKIKLRTEKEIENSHKTVGSYIYDSLLHNPNQKIIGKLVRTVERKFYKDELIQILKVQQELIPELKDEALYQRCIEELYAANEAHRKSLSKPDYVNLFVNDILFYQRPLKSKKSLIDDCPYEYHVSKDGKQHPIKCIAKSNPYFQEFRLWQFVQNLRIYQRERTVTDGQLDLSANTTTGKLQTDVDITSEILQTEEDYVNLFKWLNSRSSIKQDTLLSSYFKVKKEKGKDKYPYRWNYVEDKEYPCNETRATILSGLTKCNISADFLTHENEMSLWHILYSIEDKAELYKALRTFAQKHQLEENFAKELSKTKPFKKDYGSYSEKAIKKLLPLMRMGSYWDEEQIDAHTRERIEKIINGEYDENIKNRVREKAISLTDIQHFRGLPVWLVCYIVYDRHSEAKEIEKWEKPEDIDLYLRNFKQHSLRNPIVEQVITETLRTVRDIWKQEGHIDEIHVELGREMKNPADKRRQMTERIQQNENTNLRIKAMLMEFMNPDMGIENVRPHSPSQQDILRIYEENALDNLSKEDKDYDFISKISKAAQPSKSDIIRYKCWLEQKYQSPYTGRMIPLSKLFTPAYEIEHVIPQSRYFDDSFSNKVICEAEVNKLKDRQLGFEFIKNHAGEIVQLSQGGTVKILSVEAYEKFVKDYYSSNRTKMKKLLMDDIPDGFIERQMNDSRYISKVVKGLLSNIVREKDVNGELEPEAVSKNVISCTGTITDRLKKDWGMNDVWNHIILPRFKRLNEVTGKDCFTTYNREGHEIPNMPLELQKGFNKKRIDHRHHAMDAIVIACTTRDHVNLLNNEAAHSKHNANRYQLQRRLRRFATITINGKEREIAQEFLKPWDTFTTDAWQVLNNIIVSFKQNLRIINKTTNHYQHYEDSRKKGFEKQQKGDSWAVRKSMHKDTVFGEVNLRLIKTVSLTEAIKKPENIVNKEFKKKVIELLGNRRDTKFIKKYIEDNKDTWSDINPAKIEIYYFSKDEKKRNGEPKERYFATRKSLDTTFDEKKIKESVTDTGIQKILLAHLASKDYNPEQAFSPDGIEEMNRNITALNNGKFHQPILKVRVYEKAEKFAVGQTGNKTKKFVEADDGTNLFYTVYENEDKKRVFATISLNLAMECQKEGGNNWIKLLDERLRDKTNSIKLQKYQKLEVPEHAKLLFILSPNDLVYVPSADESVHNISIINKDRIYKAVSFNKKQCFCIKSSVASPIINKVEYTPSNKMERAITGEMIKETCIPIKVDRLGNVIELNGKPL

SEQ ID NO: 1559 - protein, 1543 aa, unidentified
  REGION 1..1543: note = Description of Unknown: Cas Enzyme sequence
MKRILGLDLGPNSIGWALAIRRNDSDGSEVIEHIEAGGSRIIPMDAAIQGDFENGNSVSQTAERTGYRGIRRLRERCLLRRERLNRVLDVMGFLPDHYTAELTRYGKFKEPDGCKLAWRKKGDGKYEFLFKDSYAGMLDDFRQYQGQWLDDGGLVPYDWTIYYLRKKALTHAITKQELAWILLNFNQKRGYYQLRGEDTDGDKSKQEEFYALKVVDVVDTGERKGKDTWYDIILENGMVYHRPAPTPPDWIGKVKEFIVTTQLDNEGKPKTDKDGTVKRSFRMPKEDDWGLVKKRTEADIDRSGKTVGEYIYEALLVDPKQKIKGKLVRTVERKYYREELRRILDAQINFIPELRDDSLYEACLNELYGTNDAYRHSIEGRGFTYLFVDNIIFYQRPLKSKKSLIDDCPYESHTYVDKETGEQKTAPVKCIAKSNPLYQEFRLWQFVANLRIYQRQKEIDGILRVDVDVTDEFIATVDDQVKLFDWLSDCQNINQEALLVKYFKIKKPRGRDVPLPYRWNYVEDKTYPCNETRGKMLECLEKAGVDKGVLTKDVEKSLWHIFYSVEDKQELNRALITFAGKHDFGDRFVEVFSKFPPFKKEYGAYSEKAIKRLLPLMRVGRHWSEGDIDKNTRGRIENMINGEYDETIKDRVREKAINLTDITQFSGLPLWLACYVVYDRHSEAKDITKWTSPDDVDAYLRHFKQHSLRNPIVEQVVTETLRTVRDIWRRYGTIDEIHIEMGREMKQTADQRKKATQRITDNENANIRAKVLLTEFINPEFGIDNVRPYSPSQQELLRIYEDGVLGSVGEIEDDISAIMKKLSETDVKKQPTHNEVMRYKLWLDQKYLSPYTGRFIPLARLFTADYQIEHIIPQSRYFDDSFSNKVICESAVNALKDRMLGMEFIKEKHGQVVELGNGTTATVLSVEEYERLVANNYKNNQPKMRKLLMDDIPDNFIERQLNDSRYISKLVKTLMSNIVREEGEEQDISKNVIVTNGAITDRLKKDWGVKDVWNRIILPRFKRLNELTGTGRFTTTSASGHEIPDMPLDMQKGFNKKRIDHRHHAMDAMVIACTTREHVNLLNNEAAMSKNNANRYQLSRKLRRYEQTEVIRNGERKTISVAREFIKPWPAFTTDVETVLRDIVVSFKQNLRIINKTTNRYQHFDNGKKSMLHQVKGDNWAVRKPLHKETVFGEVSLRFVREVALKEALKCPKAIVDKDLKRKIAAMLELGYDDKGIKQYFESNKDIWHDFNPTKIKIYYFSKDILDKDGNVKDRYFATRKSLDTSFTRKRIESVTDTGIQKILLRHLESYDNNAEQAFSPDGIEAMNRNITSLNSGKFHQPIYKVRVYEKAEKYPVGKQGSKAVKFVEAAKGTNLFFAVYETEEFDKVTGDARKKRSYATIPLYEAVKRAKAGLPVAPANADGNEPAFVLSPNDLVYLPTKEDIERGTISMPLDKGRIYKMVDASGIKINFVPQSSANIIYSLPKEDALKFCNGILIQNEYGLGSPKSKNERAITGEMIKETCIPIKVDRIGNIIEINGKKP

SEQ ID NO: 1560 - protein, 1530 aa, unidentified
  REGION 1..1530: note = Description of Unknown: Cas Enzyme sequence
MKNILGLDLGTNSVGWALISVDENGNLVKDIRLGSRIIPMSQDVLGKFDSGVTVSQTAERTEYRSHRRLLERALLRRERLHRVLHLLGFLPEHYAACIGWDRNDNATYGKFLPETEPKLAWRKADDGEHRFIFMQSFDEMLEDFKESQPSLLANGKRIPLDWTLYYLRTKALSKPIAKEELAWILLNFNQKRGYYQLRGEEEEETPSKRVEYHELKVVKVEATDEGKGGNVWYNVLLENGWVYRRQSKYPLDKWLGQTLPFIVTTDLEADGVTPKRDKDGNEKRSFRSPKEDDWTLVKKRTEDHLEKSGLTVGAFIYQHLLANPSDKVRGQLVRTIDRKYYKRELQAIIAKQMEFHPELRDVELLKACAEELYRNNEAHRSQLMAKDFKHLLVEDVLFYQRPLKSKKSLIANCPYETRQYINKETGEIKDVNVKCIAKSNPYFQEFRLWQWISNLRLLRQADGQDVTASYIKGNEDKERLFDLLNNQGEIKQEHILRDFLKLKKPKGGEFPLRWNYVDDKVYPANETRHAMNKAIKAMSAAKEEKETIGQLLVQPAVEYMLWNLLYSITDRNELTSALRRFALAHGISSVDAFVEAFLKVKPFKKEYGAYSEKATKKLLQVMRVGKYWCGDELADPAKRTKGNKQAVYDEMANRGICKQTLQNISNIIEENIDERLMGALLNPERPLTELSHFQGLSVSDACYVVYGRHSEVAEIVKWKDAGELNTFINNFKQHSMRNPIVEQCVLETLRTVRDVWEQEGQIDEIHVELGRNMKRTAEQRAHDTQAIQRNENTNMRISLLLTELKNDPSISDVRPYSPSQRELLKIYEEGALENLTNQDEDIAKISRLAQPSASELRRYKLWLDQKYVSPYTGRPIPLAKLFTPAYEIEHIIPQSRYFDNSFSNKVICEAEVNKLKDNNLGMEFIKKFGGKTKGILDEEAYKLHVTTNYAHNPAKRSKLLMEDLPTDFNSRQLNDTRYISKTVMSLLSNVVREEGERETRSKHVVVCTGGVTDTLKKDWGLHDVWNNLVHPRFIRLNNLTGTQDFGYWRALDEEKRKQGEDSKKVFQITLPPECQRGFVKKRIDHRHHAMDALVIACASANIVNYLNNQSAANPNSREDLRRLVCDIKRRIRKPWPTFTQDAQAALEDLVVSFKNTVRVVNKASNTYLRYDKDGKKKRFKQEGEGLKAIRKPMHKETYYGEVNLIRKEMLPLKRALEDVNAIVDKELRACIKGLLRDGFNLQQVLANFKAKDFKFNKRDIKKVEVYVSSAKSTPMVATRKSLDTSFNAKRIADITDTGIQKILLNYLKANDNSPEQAFTPEGIAYLNEHIAEYNNGKPHQPILKVRVSEIRGAKFAVGQTGSKKTKFVEAQSGTNLYFAIYEDKEGKRHFETIALNVAAERLKMGQTPVPETNDAGLPLKFYLSPNDLVYVPTDEDRAAARPSIDKRRIYKMVSATDRECYFLPFEVASIIADKVEFEAKNKVGRVIAALEYKEKSEEENKTSAGSKVMIKDVCWKLEVDRLGNITKIVR

SEQ ID NO: 1561 - protein, 1573 aa, unidentified
  REGION 1..1573: note = Description of Unknown: Cas Enzyme sequence
MKNILGLDLGTNSIGWALVRSDKDSDNVERATGITAAGSRIIPMDAAVLGDFAKGNTKSQTADRTMARGIRRLAERHKLRRERLNRVLDVMGFLPDHYSSSLTRHGKFKDDVECKIAWRKDENGKWTFVFGDSFREMLADFAARQPEWLTRGKKVPYDWTIYYLRKKALSKPLTGQELAWLLLNFNQKRGYYQLRGEEEQTSEKGKLVEYYALKVVGVEDTGERKGKDTWFNILLENGMVYRRTASEAPDWIGKTKEFIVTTDLEKDGTPKKDKDGNVKRSFRMPKEDDWTLVKKKTESDIDKSGKTVGEYIYDTLLDNPTQKIRGKLVRTVERKYYKEELRRILETQKQFMPELTDKALYDRCIEELYQSNDAYRKSISSYDFTYLFVDDIIFYQRPLKSKKSLIDDCPYETRSYVDKQTGEVRQSPVKCVAKSNPLFQEFRLWQFVQNLRIFERQKKVGDSVKTDVDVTGEFIKSEDERVALFDFLNDRKDITQGVLLGTYFKVKKSKGKEGEYPYRWNYVEDKTYPCNETRALMLKGLRDAGVDAAFLTVAHEHRLWHVLYSVEDKQEIRKAMAGFARKYNRRADKVKDKSGHVIELNDKFVEVFSSLPPFKKDYGAYSEKAIKKLLALMRMGKYWSVAAIDKHTLARIDKIITGEYDEGIRTRVREKAISLTDVSHFRGLPLWLACYIVYDRHSEAKDITRWSSPADIDRYLKDFKQHSLRNPIVEQVVTETLRTVRDIWKQYGKIDEIHIEMGRDMKNPADVRAKISKRMAENENANLRVKALLTEFVNPDFDIANVRPYSPTQQELLRIYEEGVLDSVDEVPDDINEIMAKFNQSDVAKRPTHGEVMRYKLWLEQHYQSPYTGRIISLSRLFTDDYQIEHIIPQSRYFDDSLSNKVICEAAVNQLKDRMLGYEFIKNHHGEKVDLGMNVTATILTVEKYEELVQKNFRKNPVKMKKLLMDDIPDKFIERQLNDSRYISKKIKSLLSNMVREEGEQEDISKNVITCNGTITDRLKRDWGVNDVWNHMILPRFQRLDALTDSHRFTTTNTNGHTIPDMPLDLQKGFSKKRIDHRHHAMDAIVIACTTRNHVNLLNNEAAMSKNNAMRYQLSHKLRRYEDVTKTQDGRTRTISVAREFIKPWPGFCGDVEQTLQGIVVSFKQNLRVINKTVNKYQKIVYDEERHCKVKKMVRQEEHDGRHLLAIRKSMHKDTVYGEVNLRRIREVSLKEAVANPKAVVDKDLKKKLKAMIELGYDLKRIQQYFDDNKDAWQDINLKKIKVYYFTKDTRDRYFSTRSGNDLVALFNKTMKKEEVEKQIGKITDTGIQKILRRHLETNGGDYKKAFSPDGVDEMNRNIRQLNNGKAHQPIYKVRVFEKADKFAVGVRGNKAAKFVEAAKGTNLFFAVYQKEVKDSATGGTTMKRVFDTVPLKIVIDRLKQGLTPAPEEKEGAKLLFVLSPNDLVYLPTASERESGTIQQPLDRKRIYKMVDCWKGRTNFVPYSFAKAIYSVSEKIAKQYCKDENNLVVDELGVGSPKSKNERAITGEMIKESCIPIRVDRLGNIIEINNKKL

SEQ ID NO: 1562 - protein, 1206 aa, unidentified
  REGION 1..1206: note = Description of Unknown: Cas Enzyme sequence
MKFILGLVPGVGSIGWAIILEAEKENEKSRLIASGTVKVNFDNFAYINAKGKVSDKGNPVELFTKGNTVSPNLQRRQSRGARRRLYHYKQRRNDLIKLLCENGFINESTILYEEGKATTFETYKLRSKAVSEEISLEELAKVLLMINKKRGYKSGKDNNNEGEDNNTSEYLSSIIGRSKILTDKHLTVGQYLMEMLNEHPLKGIKNQIFYRQDYEDEFERIWKKQIQYHPELTRHLKKEIKNRIIFFQRPIESKKNELGFCEFESKQIEVEKGGRIQTVTTGSRVCPVSSPLFQEFRMWQRLNDVLVTNLRLFEKRPLLQEEKEKLAQELSVRKILKKNDVLKLLFGKDRKNYDLNFNELIGNDTQARLVEAYLSIVEQSGHDKCDIKKNNALKIYKNINEVFSALNFRTDVIDGSIVEDREIYKQPFYQLWHLVYSFPGDNSRTGKESLVRHIKDFFNFNSDEYANRIAEIKFADGYGRLSAKAIQKILPKLKEGYSFSKACELVGYKHSERSRTNIEKDTRPLQKYMDFIPHNSLRNPFVEKILNQMVLLVNSLIDEYSPVYGTFDEIRIEMARELRNGADARTKMFKEMESSRIEKEKCKKELMEKLNEEGYSLTYVSDNDILKYRLYKELEMNGYKTLYSGEYVRLVDLIINRVFDKEHIIPKAKSPSNSFSVLTIERNDINLEKGDLTAFDYISKKGENALHQYVSTINDLYEKGAFSKAKRDNLLRTASEIPNEPLNRDLGLTQYISRKAIEMLESITRKVTPTTGSVTKRLREDWLLVNVLQELVWDKYEKMNLIDYFTDKDGKSVSRIKKSVWTKRCDHRNHAMDAITIAFTKPVFIQYLNSLNAQGDERVRLFHLRNKYLHKDDNGNWRFNAPMPLSELRQEVKKQLESILVFHQSNQRLVVPNANNTKSKNGEAKIVQLTPRGKLHADTFYGNIKQYDSDSQSIQYIYTKRVVVDENLNVNNVVNERVKEILKKRLEQNNGEAKKAFSNLDENPIWFNEEKGICIKRVVVKATDVKDPIPLHKKRDRKGNIVSDQKNTDFVKPDNNHHAAIYVNAKGELKEDVVTFYDAVRRANRHLPVIDKNAFVKDGWSFLYSIQKNEFFIFPDVESGFNPLEIDLMKQDNFALISPHLYKVQKISSLNYLLRVHTDTSSKTPNELKDITWKSLRSLKGFIGSVKVKINHLGRIYDIEKIQLPG

SEQ ID NO: 1563 - protein, 1197 aa, unidentified
  REGION 1..1197: note = Description of Unknown: Cas Enzyme sequence
MSKHVLGLDLGVGSIGWCLIALDEQDQPAEILGMGSRIVPLTTDDLNEFSQGKAISKNQKRTTQRTIRKGLDRYQLRRKVLSERLAEHGMLPDKDLMQLSVLDLWELRARAASPGEKLSLPEIGRVLYHINQKRGYKHAKSDEAEEATKRGKEKGYVATVKGRYTELQQEGATIGQHFACKLKEHRQESPSGGFFYNYRIKDQVYPREAYIEEFDRIMEVQSVFYPEVLTPALIQELRDKVIFFQRPLKSCKGLVSFCEFEKQERVVQLKWVNKEGKEELQERKIAIGPKVAPKSSPIAQLCKLWESIHNIRIYYPEGEERPITLEEKRKLLAYLQTHDKLTFTALKKELKISDRERLWCDKLLKGGIKGDMTRVLLRKALAGYKRYEPLLRMDLKLRDFQEVDPETGLIRPIVDESYLSQPLYRLWHILYSIEEREAMRRALIDQLDFKREDLDGGLLDKLYQIDFAKQGYSNKSAKFICKLLPHLQEDHGYSEACELAGKRHSASSLTKEELEERPLLGHIPLLQRNELRQPVVEKILNQMINLVNALRQKYGSIDEVRVELARELKMSREEREETSKRIRSREKENKEIAERIKEYELYPTKSRIQKYRLWQEAGEQCLYCGRSIDVVQFLRGDGVEIEHIIPKSILYDDSSANKTCACSRCNKDKGNRTAYEYILAEGREAEYLDRLETLFHDGKLSYSKRRRLQWKKADIPVDFIERQLRLTQYIARQAQEILRQGIRRVGASEGSVTAKLRHLWGYDDILRELNFERYQSMGETEIVSQEEKDGSITKSERIKDWSKRKDHRHHAIDALVVACTRQGYIQRLNSLNSEEDSLQMQEDSKQMREKMGGQKRPTADKHSILENWLILQPHFSHQEVKSKVAEILVSFRPGKRTVSTGRNTYLRSGKKVTQSGVLIPRGPLSEESLYGQILRNGEPTYVKKVALESLSEAQIEQIVDPKLRREMVARTQPSEGAKLNPKLLLATPFYSDAAGTQRVRSVRVAIENGKNSIVPLRYNESGKAITFVNPGNNHHVGIYRTSEGKLVESCVTFWQAVDRVRYGIPTIIRKPREVLDQLLLRDDIPEALLAHLPASDWEFVEYLQANEMFLIGLTDEEIQTALAESDLLTLSNHLYRVQKMSSEYYVFRYHLETEVADNKNNTGIIPKFYRLRGPNDTYLKANPRKVKVNLLGEISLP

SEQ ID NO: 1564 - protein, 1365 aa, unidentified
  REGION 1..1365: note = Description of Unknown: Cas Enzyme sequence
MSKVIDFDKANNKSKSRDIRKNTEYFIGLDIGTSSVGWAVTNTKYEVIKFNGKKMWGSRLFAEASTAEDRRVHRTNRRRLQRRVDRINLLEEIFSEEMSKVDPEFFIRLKESKFHLEDKVIDEKNIIFKEKEDGDKKFYEKYPTIYHLRHALIEGCDDIDIRELYMAVHHIIKYRGHFLFKGDISDSGSSINDKIVEIIDLMSSVAGMKRLEYNDKLINEIRNIVSNRDKTINDKKKDINKVFGGNDYKAYKSIFALSVGAKVKPYDIFLEEEYKDLEDVKDILFKNTEYEEVRDTYEQAFEDRIILIDAAKSLYDMIVLLSIKPEGKGLSENKVDIYNKHHEDLEILKEVLRKDKDLYNRVLRDDKKDGTNYVNYIKKSKYGKGCSREDFYKLVKKALGELESNEKIEYILSEMELERFLSLQRLKENSVIPYQVHRDELKKILDNASSKFEFLNKESEGYSNIEKIIKLMEFRIPYYVGPLNNYHSVDNKEKQGFSWVVRKGQGRVKPWNFDQLVDKEASAEKFIENLTNKCTYLIGEDVLPKESLLYSEYCLLNELNNIMYDGKKLSLEAKNDLIEKVYKKEKRKMTKKGIKDFLKQNRYADGKGEVTGIDIDIKSDLKSYRDMVKIFGAGFNHKMAEDIIRWVTLFGESKELLLSKVKNSYGNMVDAKQLKMITKLRYKDWGKFSGKFLTEIRSDVLIDQSTGQGQSIIEAMRTRDHILMELLRNEYDFSKKVEYINREKQKNISEISHDLLDDLYCSPAVKRSLWQTICIVEEIKKIMGHEPKKIFVEVTRTNKAEKKRADSRKKRLLELYKNIQNDARSWIDEIEKTEDSKFNSKKLYLYYTQMGKCMYTGNSIDIESLFTDMYDIDHIFPRSKTKDNSFENLVLVTRKANEDKGDIYPVDSSIQNGRLSLWRSLHENKLIGDKKFERLTRNYGFTDEELSRFIARQLVETSQASKAAAEMLNMINEGSEIVYVKAENVSEFRHDNEFIKVREVNDHHHAKDAYLNIVVGNVYNEKFTKNPYNFIKDGGRKYSLNKVFDFAFSKGGKTIWDPAVSMDTVNRMMRSNNDVRVTKKVIEQKGALYDATVYKAGIAKEESYFPLKLGDERLRNVTKYGGYKSIKPAYFTIVSYDEVGSKKNKHIIRMVPIPIYVSISDNGLLDIEKYTYEYVTSRSKKSIENFKVIYNKLCKNALIEINGFKYYVGGKTDDGFYIYSGSSLILDEENNMLFGKVAKFCNADFKRGSEKFINFENNMKLYNCLIIKRDLPYYKNSKLYKLDKLRKQTTIDNFKNLSLEEQCGVLLKVLNILTNKSYINNKDLEKIKEKVSHPKTSMILSSYESFKVINQSITGLFENEIDILG

SEQ ID NO: 1565 - protein, 1009 aa, unidentified
  REGION 1..1009: note = Description of Unknown: Cas Enzyme sequence
MDKRNDFTLGLDIGTNSIGWAVIGCVDAQEQVGLIGCGARIFQEAVDVKTKTPKNQARRAARSARRLVSRRKMRRNKILNILLQNNLLPEDAIEREKLFTGNQLYDPYELRRRALDDKLKSYEFGRVLYHLSQRRGFQSNRKAASKEDGDVKKAITSLHQEMIDSKSRTLGEYLASQSVKRNRYTDRAMYQEEFEQIWQSQQKHYPDLLNPAFKVAIHNAIFFQRPLKIQKNLVGKCTFEPGRKRASRALLEYQRFRMLQDLNHLTIKNPITREYRPLEIDEREELLRLLEKQKTLSWSSARKKLKLHEGEDFNLEEGKKKELTGNRTSYTLRSILEKQWVEMTQEKQNGLVTDMLTIDNEQGFLNRMKSHWGFDNDTAEKLAKTELEQGYARLSHKAICKILPHLEDALNYFLASFAAYDPCPPDKKASIIRLVKDGVEFDKACKTVGYDKLTNPKPTDELGEPPYLRNPVVQKAMYETRKLINAIIRQYGKPASIRIEMARDMKLTKRQKEELQKRQNDNKRANERAEKILQDEFGIQNPTREDIQKYNMWLECKMICPYTGEKISREMLFSPEVDVEHILPYSRSLDDSYMNKTLCMAAENRAVKQNKTPYEAYHADTEKYLKILQQVKPLPWPKRKKFEQKEIDSDKCVTRQLNDTRYICVEVKKYLQQLGVGVEVSKGEATAALRHRWNLNRILARDGIIEKNREDHRHHAVDAVVIALTSRALFQKLSSLSAKSGVALSERGFHLDKPWPSFYEDVNEKVKNIIVSHAPSRKISGALHEETAYGYSEHEKCFVYRKPLSSLTVNEVEKIRDKKIKELAEERLAQSDGNLKKAFGDANNPLLHVDKKTPIRTVRLAINLNPVIVYGVKNRDGSAYKFFKYGNNHHVEIIENIKTGNRKGIFITALEAAKRARRDKTSIIQQDHGQEWKFIMFLAINDMIEIEKDGKRLYYRVQILDGSNKRITFRLHLAATLDEKNTQLVGYPNRLRCSKVTIDHLGNIYPCND

SEQ ID NO: 1566 - protein, 1097 aa, unidentified
  REGION 1..1097: note = Description of Unknown: Cas Enzyme sequence
MEGIRYSLGLDIGIASVGFAVIQNDLNGEPIKIERLGVRVFDRAEQPKTGASLALPRRQARGARRVIRRRRHRKERIKWLIEDSGLMSRPEQDALLGSGAFDKSVYELRVEALDRRLSDDEAVRLLIHFAQRRGYKSNSKAEEAKDAAESGKVKSAISANRQRMEENGYRTVGEMFWRDPLFKRTEPDGRQILVVHNQPGEYKVTVERSMLLEELGLIFAKQRELGAAWASEQFEAAYTDIWSSQRNFDEGPGGDSPYGGSQIGRMLGKCTFEKELDRAPKASYTAEYFRLLQTANNLKIVGRGQPAEFLDEEQRKIFIDMAFASASATYTQLRKKLDLPDDLYFNHLYYGEKSKEEIEKKKIGMMPFYHKLRSALNKVEKGAVEKLSVEQRDQIAMVLLLYKSDDNRTVHLREAAIPEKYIPAILELSTSKAGHLSALAMQKLLPYLEQGYTYDKACKEVYGSHDGKQDTERARKLRIDMAGEITNPVVRRAISQSIKVINAIVREYGPPETVRIELARELGKSFDERNKQEKRINENAAKNEQARALIREYKTGGDPTGLDIVKFKLFQEQNGVCLYSGKNLDISRLFEAGYVDVDHIIPYSISFDDSYANKVLVLSSENRQKGNRIPFAYLGGDAERWNRFETLVGTQIRSFKKRKNLLMRSVSEEQSEGFRQRNLVDTQYLSRAIFRLIDGNLEFAQTGNYKRKTQTVSGAITAQVRKRLGIDKIRENGDLHHAADAAVIACISPGMVHKVTNYAKRCELYRDGQGYIDYETGEVMTKEAFDEKYAPRFPEPWPMFRKELDARLSDDPRAEIEHLNLPGYDSDEELRPVFVSRMPRHKVTGAAHMETIRSGKVPGSTVTKTDLTNLKLDKNGEIAGYYRPEDDPLLYEALKARLREFGNDPKKAFAEPFHKPKHDGTPGPLVKKVKIVSVSPLNVQVNGGLAANAGMIRVDVFHVEDDGYYFVPIYISDTVKDQLPNRAPVAHKPYSEWKVMRDEDFLFSMYSGDMIRVSREKEIIIKAPRGSTGEPVRSVKDSLFYFCEFDRASAAFSVQLHDRSYEGRGLGKTLSLIEKYQVDVLGNYSPVRLPEKRMGFR

SEQ ID NO: 1567 - protein, 1042 aa, unidentified
  REGION 1..1042: note = Description of Unknown: Cas Enzyme sequence
MENLLHKNTKFKYILGLDIGIASIGYSVVNIDDNKIELMGVRGFERAEIPKTGESPAVTRRMARGTRRTIRRRAGRMRHIKELLVNNIINEDSFNLLFERYNHKLNPWDLRAKAIEEELKNEELSVVLYHMGKHRGFKSNRKVTPEDKKSDDGKAKAAIKQNKAYMQEKNYKTIGQMIANDSKFENRKRNSTDDYTNTIDREMLLEEINIILNKQKEFNSKITNDFIEEYKNILNQQLPYAKGEDILKMVGKCTLIPSEPRGAKMTHTSERFTLLQRVNNLKYFFDGNNISLTPKERNQIIELAYNNSKITYKQLRNLLNLEETARFSGLQYKRKKDDGSDELKSEDATFIELKGNNILKKAFGNNYNTISNDTKDTIVTALTFYKSDNDIKEYLIENNISNSIIEIALGIPEFKKVSNISIIAMKQLMPYLEEGKYYSKAVEICGFVDPNTEKHQKLPVIETEDLKNPVMIRAITQTRKVINSIIEIYGSPHRIHIELAREMGKTYKERQEIDKAIKDNTIENKNRVEFISNRYNKNPNSTDLLKYRLYKEQSSQCAYSQEPLDLDLIMSDDNYCQIDHILPYSRSFDNSISNKVLVLNIENQNKRNRTPHEYFGNDTKLWDNFEAWVNINIRNLAKRRKLLIKDYDKKDTEFLERNLKDTQYINRFLSNLLTKTLIFNNEDRKKTVVCLKGGIIHQVRNYWGIKKFRDEDDTHHAVDATIIACLTDKNIQAVTKYVQNREINSNHIVDHNTGEIIKERCPKPWTTFREDLSKEVNYYLQNTEIEDNQKSGRIFISRMPIRKHKGAFHKETIRSLRKNGDTEIRVFKKALQDLKKDDLTKIYNPESDTLLVKAIISQMEEFDYNGKEAFNEPFYKPKSDGTNGHLVKSIKLFEENKSGVEIRKGIADNDSIVRTDVFTDGKKFYLIPVYTWHVAQGTLPNKAIVANKNEEDWLEMTDKYTFKFSLYPYDLVHVKTNNQNFIGYYRTVHRGTGALYFSAINNNSEEITSGVGTAKLINKYTVDILGNFYLIKGETRQCLGEQ

SEQ ID NO: 1568 - protein, 1109 aa, unidentified
  REGION 1..1109: note = Description of Unknown: Cas Enzyme sequence
LKYRLGLDIGTNSIGWAVLELDDHGELLSIVATGVRIFADGREPTSKSTLKATRRDARSMRRRRDRYLQRRTFLLDELTKCELFPEGSNERLKLQKLNPLKLRAMALNTKLPLHHIGRALFHLNQRRGFKSNRKDKSEEVTTGKISQSSLNLLKQMDLIEVQDDSNTDQERSSAEKKAIGEKAAHDRLYALEQLKERRNLSYGSFLWERHQTGLPTRARPNSDSNLYDVYPTRELLEDEFYKIWNAQAKYYPHQLSDTVRDRLFHVIFHQRKLKPQPLGKCVYFPDEYRVHRAMPSFQRYRICHEVNNLEWRHGLDKVRLIDDRIDRDRLIEMLERPSKKKNPSDRNAQVSFNAIRKELKKREAMIGDCKFNLESERRKGIDGNQTSNVMQHDNYVGSKWHDWSLDKQDKFISIILDDQLDDQEVCDKLICEFGLTPISAEWCKNAKLVNGTAHISVRATRILTKFMFQDMLIESKAVQKACNLNPDFRNPNTSRLTGKLLNRLPYYGEAVQGHIISGTGDEDDYQARIGMVSNPTVHIAMNQLRLVVNELISRFGHPESISIELARDLPVGKDGRSEITKGQSKNQKRNEDFNKTLDELGQKKNRENRLRMRLWEEQGKRCVFTGKIIGLNNLFSAEIEIEHLIPFSKSQDVSVPNKVVCFRQANRDKANRTPFEAFSNSPSNYNWDEIYNRVAELPKSKRWRFDEDALEKWHKNSEGDFSARHLNDTRYIGRMAKEYLENICAFNKIDVVTGSLTSLLRTFWGLNSVLYEIRNEANTQKIKNRDDHRHHAIDAIVVGMTSRSIIQRVSTEANCAEELFDFSRLFPKRNHRSAIEPWDGFRRDVINAVNKIVVSHKVRRKDTQPRSAQRETRLVTDGQLHNETAYGIIDGPDKQGLNKVVVRKPIEYFTTKSRLEKIRDEYLKRKFLAVFARDSKQGVIDLARQKRIRSLRMTESQTVISINDHDGKPYKAYKGDSNWGIEIFSFPKGHGKFGKWEGVVISRFKANQRNFRPGFSCRPHPAAKLVMRLQIDECIEIEDKGQINIMRLQKLNKNGQMVFTPANEANVDARNRDKDDSFRYRSTSANVLQKQRARKIHISPTGLFSPPRV

SEQ ID NO: 1569 - protein, 1447 aa, unidentified
  REGION 1..1447: note = Description of Unknown: Cas Enzyme sequence
MSSVYTCSVGLDLGAKCTGAFIVARGKNEPVDARHTKALAIVTSDNITFDMKNRTLVRSRLRAGKRSKLARRLMMLIMKEQLQKAGIALSAEENRRLLEAVFGLMKRRGYYYIETESDLTALEGLNTSVFANVPALADFFPYEEDLAEVWLSAKEDIELLRGLQAALPSEDEFSAFLEAGYGGVLSEEKQESYKNALSVMAHDTKVILAFVATGDQHRTKYLKAIREDIDRDTRLIPLVKAFGGADRFWRFLGNLGNLHLRVFRWYFNNKAFQKEDRWIPKDFQAAVVRGFRYMHPAKDNTRKHLDLIRTFEEADDIVECFCSLDPVRTIPPYEDQNNRRPPVDQTLLLNPAALNRRFGNRWLIWAQRFELNDPAVAEELDEIVPIIDRKSRRQIAGNTVLSNNFYRSSYVLQRVLYRSRAFSDLDLRLLSVYAAGQRKELEKGNLRNDLLSQRARKAKARLSAVLGSQHVAEFLLFAADYYDEAELSRFGVWYENEGSLLEVSGIHPPAKRNILPRLVANILMVTEDAAERFMKEVWHSECDEHTVAWYCEKIWETLKEKRNEFNLLYQRALSEQRASGKKKLSAETKALLTVGKRVNLTASFIGKELGLSESHVAKFKNPYSLGQLYSLIETKRSGSTRISRAVHKEQAWRMRMTEVNGELAANCSRLPADSVRPFDGVVRRLLDRQAWELTKVLAELIRSKVSFRNGVVHVPLIVEKNIFRLMASIDDFKKRAEKKKVSERAEAKAEAAYEKHFHDKEARIKAASQGICPYTGNALGNEGEIDHILPKSTSLKIFQMVLNNEANLIYVSKAGNMRKGDKRYTLEDLHPNYLRKVFGTENRTRIQAEIRREVKAVLEDGDFYFYEFLTPRQQICLRHALFLSPGVGMNDDITLNLLQRLKTRNTAVVTGSHGWFVRQTITKLQKELSEWSANTGNKLIFKACALDAEEVSIMRQAVVRKNPKFKKTKNQSVISHTVDALCAYARASNDAFVGEFMGADPALASIASADRVASLHSGNCDVIRIERKAAEEKDNPASRPIFKEGLLGENFLPVTVKDGKIFIGFDGDRVDNGKPNRIELVLQKAQKPESFLQLLEAFFDKPVDYEMQKKTTYRIDKRKAFAFLGCGEKPKDKVGETLKNVLQSLMYLTVRKDIVDSIVPADEKKYASEESLLKRSSFEIIFDFWFFESKIKGSLELPAKRDWKKLLSSPEIASRLGQLKDDFDFAGYISDLRGIRQNSAFTHKRCRRVFSLPTVVTPSGVVHIQRKNIHNEEVGQAQSTYILYAGFHAVDGAVDWKRLVHLPVYHSKNLSIFAEKEDGYFEFIPMSEWRQVSDGDVRIWLCPATKGRRYVRVNISWPRFLAWTNADALGYKAPSDLPHEVKLPGYSEIVPEKFRRLFGTPRNRIFIERVGERIQFSYEDASRWLSLKEAYNAVGSSASSRWIKWSE

SEQ ID NO: 1570 - protein, 1330 aa, unidentified
  REGION 1..1330: note = Description of Unknown: Cas Enzyme sequence
MKQKFGNYYLGLDIGTDSVGWAVTDEKYEILDFNGKAMWGVHLFDSGKTAEERRLHRCSRRRLERRKQRINLLRELFASEISKIDPTFYERLDESRFFIEDRKHKQPNTLFNDPNFKDRDLHKKYPTIYHLRSEMMKTDVKPDIRLIYLAAHHIIKYRGHFLFEGISDGTVPDFEPLFRELLTTLNAECDTCLNADNNVEEVQKVLVDHNSGIKDKKITLIKLFSAETSAEKSFIDLMCGGTAKLGELFNHDALKTEKLSFKGSDFDERHDELEDLIGSDKIVLLDLMKQTYDWSVLSGLLEGHDTFSEVKIKQYNQHKKDLKTLKAAIKNTIPNKYKETFESENTENNYCSYTGVYKKKIATVKSCSQDDFCKYLRGLFKDVPLEGDEYTDMKRRIEDNTFMPKQTTKENSVIPNALHRNELSTMLNNVSKHYPFLKEKDDSGISIQEKIELLCTFRIPYYVGPLNEKSKEYWAVRKEGGKITPWNFENKIDLEKSSESFIENLTNMCTFLVGEKVVPKNSIIYSRYELYNELNTTMINRERIDNALKKEIVRDLFEDVESVKKVTVKSLEKYLRGRGLFKDGDVITGIDEDIKSNLKSEVLIKKILKDKFKDRHMVEDIIRSITIFGDDRSRLKKKLFIDYSNKLTKSEIDSLSKLQFSNWGRFSEKFLTGIYHTDRASGVCMNILTALEQTNLNLMELMKDNYSYNEQRIKMNNDIVGKSDGKITYDLVENEYMSPAVKRGIWRTMRIIQDIVKITGHFPKKIFLETTRENQEIKKRTTSRKQQLISLFKACKEQETEFLGLIEGTEEGRFRGKKLYSYYTQCGKCMYCGKKIELNDLENKELYDMDHIYPQSKKTDDSLHNNLVLVCKPCNQRKSDIYPLPEEWQRNMHGHWTYLLNNGLITKEKHARLVRISQFSEEELNDFVSRQLIETSQSVKAVAEIMKKVFGKDSDIVYVKGNNVSDFRNDRKFTKCRSVNDYHHAKDAYLNIVVGNVYDVKFTKNPINVIKSSEKYNLNRMYDYNVERNGVCAWIAGEDGTIKTVSKYMKRNNIRFTRFAYEEHGKLFDQNLVKACPGKFPAKSGEVSEKYGGYDNISSSYFVLIEHEIKGKKVRTIESVPVHVAIHTPTDKKLIEYFENVKDLVSPKLLINRIKMKSTFEIDGFRLNISGRTGKMIVYMCGEQLVLPYSTYDYCKKISKHREVCLKERRELPASDYGITSEENIHTYDVLLSKLKDSKYNTFLKAQVITLESKRATFASLPTNTQSKVINEILHVFQCNPVGMNLKDIGGPGQAGRIILNNNIMNFESAKLINQSPSGLFESTVDLNKI

SEQ ID NO: 1571 - protein, 1392 aa, unidentified
  REGION 1..1392: note = Description of Unknown: Cas Enzyme sequence
MFSANADAHKWANSAKPYLNLCCQAYIPAREYMNMPTKGKFGEYYLGLDIGTDSVGWAVTDRNYEILRFRGKAMWGTHLFESGKTAEKRRAHRTARRRLERRKRRLDLLRDLFEEEIARVDPLFFERLDESNFVSEDRRHKQHNSLFNDPSFDDKCLFKKYPTIYHLRKDMRVTKEKPDIRLVYLACHHIIKYRGHFLFENISNGEIPNFGPLLNNAMDTLNDICGTDVSVDNIFGEIKAILLDKNLGVKEKTTKLNEIISDGDGSKGVREFVNLISGGTCKLKEIFDPEGNNEDFEDEKLKFSETDWDVMRPELEDKVSEGIILLDLAKQIYDWAILKKLLGNSTDISSVKIDEYDQHKKDLKFLKGVIRKYLGDKRYDEVFKNKSLKSNYVSYSKRTKDGRTSNDKVSEDSESCAEAKSCTQDAFCKFLKKTLEATLANPIFESGDYKDMKVRILEGSFMPKQTSKENSVIPNILHLKELRDILTNCSKWYPFFEAVDESGRAVKEKIELLCNFRVPYYIGPLSPNAGHRWMVRKGEGRILPWNFEDLVDEEKSSEGFMNNLIGTCTYIPGERVLPKNSILYSRFALYNEINSISINNKRVSMELKKEIVKDLFESNNGSKKVTKKRLESYLKSKGLFHNEDEIKGIDDSVKSNLKSEYQLREILGSKYKTTLAEDIIRSTVVFGESRKRLKDKLRLDHSEALSKDEIEKLSMLQFSGWGRLSEKFLMGIKATVDGREMNILTALEQTNLNLNEILFRYDFMKQIDAIKEKVFGASNGKISYDLVKDLYVSPVVRRGIWRSLRIIDDILSVTGHPPAKVFIETTREKQQSKRTLSRKTKLAGLYKACKEEEWLNQINGEEEWKLRGDKLFSYYCQHGQCMYCGAKIELNDLGDANKYDLDHIIPKSKKADDSIHNNVVLVCKVCNERKSDIYPISPEIQQKMRPTWDSLLKLKFIEKEKYARLIRPSPLSEEELSGFIARQLVETSQSVKAVAETLKRVFGEKSEIVYVKGKSVSDFRNNNGFVKCRSVNDYHHAKDAYLNIIVGNVYNVRFTSNPINFVKSKEKYTLNIERIFENDVERSGERAWTAGEAGSIAVVRKHMRRNNILFTRFAYKARGQFFDVNPLKKGSGQHPLKTHGGKIGSGEMDINKYGGYNKVAGSYYSLTEHTLIKERVRSLESVQMMMGDNNVTDKELEESFVSDGLVDPKIVFRNVRMNSMLELDGFRVHIRGRTGDNIEYICAEQLILPIETYNYCKKLYNYSERSKGLKTPPLAEHFKLTAEDNLKTYDVLVEKFQSNKYKSLLGRFYPMLRNKRDSVFIGLTPENQAIVLNEILNGFQCAPTKMNLKLLGESGQTGMIRINKKISALGSVKLISQSPSGIFETEIDLKTI

SEQ ID NO: 1572 - protein, 1328 aa, unidentified
  REGION 1..1328: note = Description of Unknown: Cas Enzyme sequence
MKQVFGDYYLGLDIGTDSVGWAVTNENYEILDFNRKAMWGIHLFDSGKTAEERRLHRGSRRRLARRKQRIDLLQELFASEISKVDPSFFERLNESRYMIEDRNHKQHNTLFNDPNFEDRDLHKKYPTIFHLRHDLTKTNTSPDIRLVYLAVHHIIKYRGHFLFDGVSGGDIPEFESLFKELLSIFNNECGTSFSMDNVLGDIKNILLDRNAGITNRKNKLIDLISADGVIEKSFCNILAGGTVKLALLFEDESLESEKITLNGSEFEERTNELEDMLGSDRMNILNYMKQIFDWSILTDLLKECDSISEMMIKQYNQHRIDLKILKNLIKENLPEQYNDVFKSSNVPNNYCAYVGIYKKGVEQVKSCTQEEFCTYLKNLFKGASFDSKIYMAIKDRIENNTFMPKQTSKNNALIPNILHRKELTAILDNISKHHPFLNSKDDRGISVKEKIVLLCTFRIPYYVGPLNNNSERSWAVRKEGGMVTPWSFKDKIDLDLSAEAFIENLTNMCTYLIGEKVIPKESLMYSRFRLCNELNTLSINGERIEPKLKNEIISDLFLNVDTIKKVTMRGLEQYLKQRGLFKEGDVLEGADSEIKSNLKSEVQVRKILGDRIKDKDMVEGIIRCITIFKDDRFRLKKKLNDDYSDKLNKDEISELSKLKFSDWGRLSEKFLSGIYHTDRSTGESYNILSMLERTNMNLMELLKDEYSFKGQIEQINSLVTNLFDGNMSYEMLDDEPVSPTVRRSIWRTLCIIQEITKITGHGPKKIFLETTREDREKKRTTSRKQQLIERFKACKEQEIDWIGAIEGMDEGRLRGKKLYSYLSQHGKCMYCGKRIDLNDLGDRELCDMDHIYPKSKKFDDSIQNNLVLVCKPCNQTKSNAYPLPEEWQQRMSTYWKHLKDGNFITTEKYKRLIRVKPFSDEELGDFISRQLVETSQSVKAVANILKRIYKDDSDIIYVKGRIVSDFRNEYGFVKCRVVNDYHHAKDAYLNIVVGNIHDVKFTKNPLYVVRNKEGYNLGKMYEKNIERNGRVAWISGNKGTIATVSKYMQRNNILFTRFQYEGHGQLFDQNKVKANPGKFPAKRGEDSSRYGGYDNVSGSYFVLVEQCIKNKKKHTIEAIPIHIAITNPSDEIILDHLTSMGLESPKLILNKILMKSTFEINGFRLHISARTGNNIVYTCGEQLILPYDVYAYCKRISKYREICVKERRDPPISDYNLTIEENISMYDILALKLDESRYGTFLQAYKKHILTFRNDFISSRPELQIKVLNEMLHAFQCNSAYVNLKDLKGPGTVGRIILNKNISDFQTIFLIHQSPSGLFERKINLKEI

SEQ ID NO: 1573 - protein, 1366 aa, unidentified
  REGION 1..1366: note = Description of Unknown: Cas Enzyme sequence
MKNAKNKNYFLSLDIGTDSVGYAATDENYNLLKFHGEPVWGATVFDAASLNTDRRTFRTARRRLDRRQQRIDLLQQLFAKEIGKIDPRFFIRLEESTLWPEDKNEKYTLFNDNGFTDKEYHELYPTIHHLIDDLMKSTKPHDVRLVYLACAWLVAHRGHFLQNISVEKLSDIKDFDRIYGNFIAYFDSKGFDQPWSKNSVDTTKLAEILKKDCGVTQKYKELCELIYNGKPPKDVSEEFPFSKEGILKLLAGGTYDLAKLFDNEDYAELTNKSVSLSMDDDKLAEIAAEIGDDYDLIENLRSIYDWSILVNILAAKNTISEAKIKVYEQHQKDLAFLKHVVKIYIPEKYDEIFRRTDLPQKDIANYAAYSHHTDVKNPGAKWHKDKDKEKFSKFILGIIKEIEPNETDQVQFEDMKQRLETRKFMPKQKDGDNRVIPNQLYLFELKEILKNASRYLPFLNETDEDGISTKSKIESIFSFRIPYFVGPLNKNSDKAWLVRKAGKIYPWNFEKIVDIEATEAAFINELTNKCSYIPGEDVLPKDSLAYHKFEVLNEINNLKIDGEKISVELKQRIYNEIFMMNKKVTRKKIEQFLVKEGFIEKGREAALTGIDITIKSDLMPQHAFKRLLDSKTLTENEVEEIVKRSTYAEDKSRLSKWLEKEFSKINDEDRKYICNIKIKDFGRLSRKFLCELQGINKETEEPCTILGALWNTNCNLMEILANDRFTFTEEIEKLRKAYYAEHGDLKLEDRLDEMYISNAVKRPIYRSLDIIGDITKAFGKPAKIFIEMTRGGTKDQKDRKNSRKEQILELYDKFKNEDVLYLRKQLEDMGVSADNKLQGDKLFLYFMQMGKCMYTGKPIDLANLGSKLYDIDHIYPQSYVKDDSIINNKVLVLSQANSLKGDKYPIEESVRNQMRKFWEILKEKGFISEEKFKRLTRATPFTEDEKLGFINRQLTETSQSTKAVATLLKEKFPKTEIVYCKAGLTSEFRQEFDLFKSRLFNDLHHAVDAYLNIATGNVYSTKFTKNFNVNSKYSVKIETLFAPKEPFKFNGKEIWSQEMLAKVKETAVKNNAHFTKFAFFKKGGLFDQMPVPAASGLVPRKKDLPTEKYGGYNKAGSMFFIPVKYKIGKKQDIMIMSVELLHGKHFLADRDFAQKYSFSRLEQILNKKVDEVSFPLGMRPWKVNTMLSLDGFRICITGGGGGGTQLIAQPIMQFSADKSWQFYLKKLEKFNENYSKNKNYIYSEEHDKISAEKNIELYDLYIKKLKSSIYSKRINPPTETLEKGREKFIALGIKEQAKTLLNIHQVFGRMDRGCDLTSIGGLGRSAGIMLNSNISNWRKNYSDVRIIDASASGLWEKESENLLDLL

SEQ ID NO: 1574 - protein, 1332 aa, unidentified
  REGION 1..1332: note = Description of Unknown: Cas Enzyme sequence
MKEFEDYYLGLDIGTDSVGWAVTDEKYNILQFKNKAMWGIHLFESGQTAAERRTHRTARRRLERRKQRIKLLRGLFSEEISKVDMGFFDRLDESWCHLEDRNAEQMNTLFNDHGFTDKEYHKKYPTIYHLRMDMMNTKEKPDIRLVYLAIHHIIKYRGHFLFKGLSDEDLPGFDELLDDLLEVVNDECNFTLNADNTSKDVENTITDEKIGVRDKGRRLQELMGAEIQGEKELLALIAGSKVDMGKLFDDEIDLKFSFRDSNYEDSYDSYADTLGPERIHVIDLCKSIYDRSVLARILGNYNTVSEARVEDYERHKVDLKTLKWAVRTYVPKKYFEIFRSEKTADNYCAYVKEYGKRTPEKKSCTQEAFCKYLKKIFSGSLDIENDPLMKDMFLRLDNALFMPKQTVKENSVIPYSLHRKELKKILDNASKYYPFLNETDEWGSVLEKILKINEFRIPYYVGPLNSKSDKSWVVRRSKEKITPWNFDRVVDMDESAVEFIKNLTNTCEYLYGEKVLPKNSLLYSKYELYNELNIIQINGKKLEPELKRSIVKDMFENVDSVKKVTTKNLRDYLKIKGLVTDSDEITGIDKTIKASLRSYVQIKKIIDDKISDRMMTENIIKTITIFGDERSRVSRKLKLDHGDKLTDDEIKKLSGLQFKDWGKFSEKLLTGLYSKDRCTGTSWNIMTYLELTENNFMQILYKYDFLKQIDEENKELVQECDGIDYKLVDEMAVSPSVKRGTWRALDIIQDILKVTKKPPMKIFVETTRVDGEKGKRTESRKEQLEYLYKACKKDLLENEDEKRKWMEDLDKEDEGKLKGRSLFLYYLQQGKCMYCSKPLNISDLGNNEAVDRDHLFPQSKIKDDSVRNNMVLVCRECNQKKGDRYPLSPDVQKKQHVWWEHLKDCGFVTPEKYARLIRTTDLTEEELTKFLNRQLVETSQSVKGVITVLKRVFEDTDIVYVKGRNVSEFRSDKKFTKCRIVNDYHHAKDAYLNIVVGNVYDAKFTKDPKNFLEKGGSYNIKRLYDFDVSRDGKTAWIAGEEGTLSTVRRYMRRNNIRFTRFATESKGGLFDQNLLKAKETLFRPKEGLDPGKYGGYDNVRGAYFVLVEYEEHNKKVRMIRHVPVHLAKKVNENPNVLKEMIEKEGFLNPRIVIDRIKFNSLLQIGDFQSHISGRTGNNIILKCGMQLILPDELYEYCKKISKYIEDRKNREIYPISSYKFTTEENEKLYDALIEKAKGPAYKIMLETTLAKNMVKQKDPFMAAEIDVQARVLNEVLHSFQCKAVSTDLKEIGSGKTGIMLQNMKISDSKFDVMLIHQSPTGLFERKVDLKKI

SEQ ID NO: 1575 - protein, 1015 aa, unidentified
  REGION 1..1015: note = Description of Unknown: Cas Enzyme sequence
MTLGLDIGPDSIGWAIVTSNNGQPSGLLDAGVRVFPEGVDRDTQGHEKPKNAQRREARLRRRQLARRRARRIKLLGTLRRAGLLPDKDETLREVFAADPYELRARALDARLEPFELGRVLFHINQRRGFKSNRKTDRIREDGKVLAATKELAAKIEQSGCRTLGEYLHRIGRKGRERIRGRYTLRAMYEHEFEQIWSKQREFHPDLLTDELRCRLRDQIIFYQRPLKPMDDRIGRCECEPDEPRCPRADWHAQQFRLLKEVNNLRIQNPDGTERDLREEERDKLIQTLMTRKEMTFDRIRRLLGLLDSQMFNLEQTPTRRRGPGQAGRSKLQGNSIEAALIDAFGKKAWKAISEPQRAEIRQKVCEVEDPDELRRLTEEWGLKDDKADKLVHMDLPDGYMAYSLKAIQKMLPYLEQGCTEYEARDRCGYNQPRELPACDRLPPPETDDRQPLVRNPLVRRALHEVRKVVNAILREYGRPDKIVVEMVRDMKHPAWKREEIQRRIRQNQQERDQARQRLVEEFGLSSPTGRDILALRLWEQQRHQCIYTGRAISKDDLSAFFHGQGVLDIDHILPYGRSLDNSQNNKVLCFASANREKGDRTPREWLGEGTPEYEQMLQRVAACAESGMPYAKRRKFSQQNVELDEFVNRQLNDTSYIAREVRKYLQCLYEGDQVERARHVVCTRGQVTAALRHEWGLNTILSPDGSDEKNRADHRHHAIDAIVVALTTPSHLQQLARTKGPSRLALREPWPRFRADVEAKIRDINVSHRVARRVAGALHEETNYGPTAEPSVFVYRKRLEELTPAMVPNIRDAAIRKIVIERLKKHGFDPDAGGSKPYPAEVWREPLTMPSGVPIKKVRITTTLSPQSVILLKDRNTGRTYRAAKLGSNHHVEIFEYTDDKGHTRREGVVVSMFEAAQRIRRGEPIVKRDHGPGKRFVMSLAKNEMVMLKLDDESYQLHRVQKISPGLIALRPHYYAGKVSDYDKPPLIQRRTPSTLEGYKVTIDPLGRIHPAND

SEQ ID NO: 1576 - protein, 1084 aa, unidentified
  REGION 1..1084: note = Description of Unknown: Cas Enzyme sequence
MQQKPQRYILGLDLGIASVGWACVWADENEHPIGLLDCGVRMFERAEVPKTGDSLALARRQARSVRRLIRRRAHRLPRLRRLLKRGGGLLSADFDENGLVRGLPIDAWALRVAGLDRKLNNKEWAAVLLHLVKHRGYLSQRKNETQSKDKELGRLLAGVNGNREALQNRSDEYRTAAELAVKKFAAENNGSLCNKGGDYSHTFDRKDLQRELHLLFARQRALGNPFTSSEMEAAVDELLMKQRSALQGEAVLKMLGRCTFEPSEYKAAKNTYSAERFVWLTKLNNLRIQYNGEERALSEAERRLLLDEPYQKAKLTYKQVRTILELPESAVFKGLRYGHGEDGLKAESGTLMEMKAYHAVRKALKDAGLEGEWENRIRNPELLDAIGIAFSLYKTDEDIRANLAAFRLPENVLEALLAGLNFDKFVQLSLKSLAKILPLMEQGMRYDEACKAAYGDHYGAKEQENHRLLPPFVADDIRNPVVFRTLTQARKIVNEIVRRYGSPLRVHIETGREVGKSFSDRKEIEKRQEENRKERERAAAHFKELFPNFAGEPKAQDILKLRLYEQQHGKCLYSGKKIDLRRLPEKGYVEIDHALPFSRTWDDSFNNKVLVLGKENQDKRNHTPYEYLDGKGNSETWRAFAERVSGCRFPYAKKQRLLTQKLDEKTEQGFLERNLNDTRYVARFLCQFIEEKMHLEGAGKKRVFASNGQITALLRGFWGLKKVREENDRHHALDAVVVACSSVSMQQKITRHFRYREELEHIDRETGEVIHGFPQPWEFFRQEVMTRVFSDDPVSELAEKLDSRPEAVHEFVTPLFVSRAPHRKVTGQGHKATISSAKRWDEEKISVIKLVLKPTKPGKGLKTKDIERIVGYPNREPALYEALTARLAAFNDDPAKAFAEPFYKTGKDGKRGALVKAMRVENVQKSGLLVRKDESGKMQGVADNETMVRVDVFGKNGKNYLVPVYAWQVEKGEVPNRAVVAYADEEDWDEMDDSFEFKFSLYPNDLVEVVTKKDKFFGYYSGFNRATGAINIKEHDLSKSKVKNGVYEGIGVKTAQSFQKYQVDTLGKTIRLCKPEKRMGFKKK

SEQ ID NO: 1577 - protein, 1130 aa, unidentified
  REGION 1..1130: note = Description of Unknown: Cas Enzyme sequence
MSYVLGLDLGIASVGWSIVEPGKRIIDLGVRVFKKAETDKEGEPLNLIRRESRLSRRRLYRRAHRLNRLLNFLISSGLIHSKDEVLKNVYNENPWALRTLGLNSVLTNNQLARVIYHICKHRGFYWASSADDGEADKGKIKNSLSSNQKLMKEKCYKTVGQMIFSEYPNCQRNKSGEYSKSLPRTDLDIELREIFKAQQSFSNPIVTKDFISAILGSGDRKTGFLWEQRPALQGEDLLKMVGHCRFEKDELRAPAANFYAEQLVWLTRINNLRVYDENSQERPLTKEEHDLILNMPLEMKSDIKYSSLTSAFVKANLWKPGQFKYKSVDYEQKTQKKKKSAEPSDITKSSKKNPEDKVFYKCSHLHEIRKALGSSLSAEWDKIRTEVLAGKYERYNRIAYVLTVYKEDSDVIEHLSLYESRALIDALLTVRFNGFVALSEKALKKIIPYMVQGKRYDEACSESGYKHYKQNQNDVKKSKYLPPLFSGREPNGTLIFNEDLGDIPRNPVVLRVINQTRKVVNAIVKKYGSPESVHIELARDLAKSRAERNEIKKRNEEATSRRIKEREEFEKHYGAEKTNGTNLLKYRLYKEQDCKSVYSGKEIDHKRLFEKGYVQIDHILPYSRSYDDSQSNKVLVLTNENQDKGNRIPFEYFETKQQGFSWYEFEQWVKSCKNINQKKKRNLLRRSLSKDAKKDFLERNLNDTRYACRFVKNYIDRFLCLSENSDNSGCVVIAGQLTAYLRNCWGLNKVREENDRHHALDATVIACCTRKIVQKVGAWSKSREMNSYNSSYVDPDLPVDEDEMLLQKLYVNKRKPDFPKPWNCFRKEVESRVFESDLEKLKEELKQQCSYTESDLKNVRTLFVSRACEKIGKGALHGDTVYRQTSEMRKENVAVKKVSLKKLKYARIGAIVDADTRNKNLCDALKKRYEEYSSITGKDVSKIDKKDLSKIFSDDKPMHMPNSEGQEDPCNPIVKSVRVKEACSGVPIRNGVAENSTIVRVDIFKKKGQYYFVPIYSWNKSLPNRACQGKNKSDWVVVDDSYEWCFSVRTNDLLKIVIKGKTYFDYYITLDVHSDGRIRLLNHDRQEDDVHYEKGEFRILIKNADSINKYNVDVLGNYYLAKPEKRLELA

SEQ ID NO: 1578 - protein, 1140 aa, unidentified
  REGION 1..1140: note = Description of Unknown: Cas Enzyme sequence
MADKSLGPLTFGFDIGIASVGWCVLGENRIVDLGVRCFDKAETAKEGESLNLARRSARLMRRRLRRRAWRLTKLARLLKRTGLIADVNEIRQPPCASPWQLRAHGLDRLLSNDEWAHVVYHLCKHRGFHWISRAEEKKAEGDAKGEGGRVKKGLSDTQRRMTEKGYRSAAEMVLAEFPDAQRNKQGDYGKALSRVLLSEELGLLFRRQRELGNSHAGTELEAAILGSGDRKSGLFWEQKPPLAGADLLKMLGKCTFERREYRAPKASFTAERHVWLTRLNNLRIVVDGTTRALNEAERRIALPLPYKQAGDFTYKQLRAALTKAGLVPNSVKFAGLAYPTGRQLDEAKPKDPEAEKLVRLNAWQELRKTLKDKGLETEWEGMAGAATGGDPTLLDEVARVLSVFKDDDETIAELRKLPLPGGQPMIDALSEISFDKFHALSLKALRKIVPHMEVGLRYDEACAAAGYHHSQLHEVGGGEHKYLPPFYSRRDKDGRMVFNEELDVPRNPVVLRALNQARKVLNALVRTYGSPAAVHIEMARDLSRPLTGHWTDNGKYIEGRRDIEAKQREYRERNDKDKAAFATEYGIAAKSREFEKFQLYREQQGKCAYSLMPLDLHRVLHDIGYAEVDHALPYSRSYDDGKNNKVLVLTEENRNKGNRTAYEYLTSFPGGENGERWRNFVGYVESNKSYRLAKRTRLLRKDFGGKAAEEFRERNLNDTRYICRFFKNYIERFLLLDAKVGADDTATKRCVVLSGQTTSFLRARWGLLKVRSDSDRHHALDAGVVAACSHGMVKRLADYARTKELAKVRQGFPDPETGEIVDTAMFQQLHAHFPDPWPHFRAELEARLHIDDAEELRSRMAMYGTYPAEALEALRPLFVSRAPQRRNGGAAHKDTVYAQPEYLKDQGGVTQKVPVTSLKLADLGEVGKEEDTCRLVDWHRNKRLYEAIRARLETHAGKGDKAFPADNPLRKPDRDGNPTGPVVRTVTMVIDKLSGIPVRGGIAKNDSMLRVDVFRNTNDGKFHLVPVYVHHAVAPELPSRAVVGKKDESQWTLMDDSYAFQFSLYPNDLIQLHVGQESVLGYFSGVNINDAGVKYFPPDQRGIEQLRKKGVSSATVFQKFHVDVLGNIYPAPPEPRRGLA

SEQ ID NO: 1579 - protein, 1107 aa, unidentified
  REGION 1..1107: note = Description of Unknown: Cas Enzyme sequence
MTDKTLEPLTFGFDIGIASVGWCVLGENRIVDLGVRCFDKAETAKEGESLNLARRTARLMRRRLRRRAWRLTKLARLLKREGLIADTKTLQTASPKSPWCLRVAGLDCKLDADEWARVIYHLCKHRGFHWISKADKKKAEGDKKEGGRVTQGLSDTERYMEELGTRSVAKMVLTKFPDAQRNKQGNYDKALSRVLLADELSLLFKQQRELGNPHATAELEAAILGIGDRKTGLFWEQKPPLAGADLLKMLGKCTFEKDEYRAPKASFTAERHVWLTRINNLRIVADGVTRPLNPEERRIALPLPYGYANAKLDYKQLRTALAKKTGLDNFNFAGIAGDKEKDVLVKLPAWEILSKTLKAKGLETEWQGMAGAATGGNPTLLDEITRVLSVFKDGAEVEAELRKLNLPGGVKMIEALSEISFDKFHNLSLKALRKIVPHMETGLRYDEACQAAGYHHSQLHQAGAGEHKYLPPFYARRDKDGRMVFAEDMDVPRNPVVLRALNQARKVLNALVRTYGSPASIHIEMARDLSRPLTGHWTDNGKYIEGRRDIEKLQEEYRKRNEDDKAVFSQEHGVARNGKGFGRDFEKFQLYREQNSQCPYCQNALDLNNVLSDTSYAQVDHALPYSRSYDDSKNNKVLVHTTCNQNKGNRTPYEYLTTQGGEDGERWIRYKVWIEATYPGKTKQAKRQRLLRKDFTGKTAEEFKERNLNDTRYICKFFKNYVERYLKLTPKAGASETVETKAKRCVVLNGQTTAFLRARWGLLKIRGESDRHHALDAAVVAACSHGMVKRLADYSRTKELAKARDGFPDPETGEILDPAAFQKLTAHFPDPWPHFRQELEARLGIGDLRELRARLETFGTYPPEALSAVRPLFVSRAPQRRGGGPIHEETIRSTKHVSANVSHVTVPLHKLNLSKLPDIIGATYSRNAPLITVLRERLTAHNDDGKKAFAEPVFKPSKKGTKTPVKSVKLASTQNSGIHVRGGVAELGPMHHIEVFKIGPRYHLEPAYQARPDCRINPPNIPKDAEFLFSLSKNDFLQVTFGDQQYRGYFVMYESDGRLTLRAHDQPKPDKDYFRRGVTTATRVEKFHVDVLGNIYPAPPEVRRGLA

SEQ ID NO: 1580 - protein, 1118 aa, unidentified
  REGION 1..1118: note = Description of Unknown: Cas Enzyme sequence
MAIKHELGPLTFGFDIGIASVGWAVLCPTRIVDLGVRCFDKAETAKEGESLNLARRTARLMRRRLRRRAWRLTKLARLMKREGVIDDANEFQTVPTTSMSPWQLRVKALDRKLERDEWARVLYHVCKHRGFHWISRAEEKKAEADAKGEGGKVKQGLAATARLMSQKGYRSVAEMVLAEFPDAQRNKQGDYGKSLSRVSLANELALLFSKQRALGNPNTSTSLEQSILGQGDRKGGLFWSQKPALAGADLLKMLGKCTFEKSEYRAPKATFTAERHVWLTRLVNLRVIVDGRTRPLSEAERRLALPLPYLAGEKFEYKQLRAALEKNGLPDSFKFAGLPYPSKRQESEEKAKNPESASLMKMPAWHELRLTLKRAGLETEWQGMATAAIDGNPDLLDQIAWVLSVFKDDDEVVAELNKLSLPAKEKTIEALLGVRFDKFHSLSLKALRQIVPYMEAGLRYDEACEKAGYHHSQLFKIGEGVSKKLPSLYSGRDQSGRMVFNEELGDIPRNPVVLRALNQARKVLNALVEKYGSPYSVHIEMARDLSKPFDERNKIGKEQEAYRERNEKDRQTFLSEFDVIGAARGGDFDKWKLYREQQGKCAYSVEPIDIHRLLEPGYVEIDHALPYSRSFDDSKNNKVLVLAKENRDKGNRTPYEYLDGEHESARWRMFVAFVESNKAYRQAKRSRLLRKDFGNEQSEEFRERNLNDTRYICRFFKNQVERFLRLAEGSEDRRCVVVSGQLTAFLRARWGLLKVRDESDRHHALDAVVVAACSHSMVKRLSDYARRKELDQVKDGFVDIATGEIVNPSMQQRLAEHFPEPWPYFRDEVQVRLKLDDPALLRTELERLGTYSAAMLEEVKPIFVSRAPQRRNGGAAHKETIYSQPARLQAQGGVTQKVPLTSLTIKALDNLIDPHRNEKLYAAIRERLEQHGGKADKAFAAGNPLRKPDHNGAPTGPIVRTVTMVIDKLTGVPVRGGVAKNDSMLRVDVFAKSGKFHLVPIYVHHRVKGLPFKAIVAFKDETEWTLIDESFNWQFSLYPNDLVRVNLNGKEPITGYFASCDRSTGAISLWAHDRSKAIGKDGLIRSIGLKTAKTVEKFHVDVLGTAYPTTAVPRRGLA

SEQ ID NO: 1581 - protein, 1117 aa, unidentified
  REGION 1..1117: note = Description of Unknown: Cas Enzyme sequence
MQQEKLRYTLGLDIGIASVGWCVLGENRIIDLGVRCFDKAETAKEGDSLNLVRRSARLMRRRLRRRAWRLTKLARLLKRLGVIDDLQFFQPQHPFQHSLWQLRAEGLVRLLNTEEWARVIYHLCKHRGFHWISRAEERQAEADSKGEGGKVKKGLADTKRRMEEKGYRSAAEMVLAEFPDAQRNKQGDYGKALSRILLADELALLFRQQRELGNPHATVQLETAILGSGDRKSGLFWEQKPPLAGSDLLKMLGKCTFEKEEYRAPKASFTAERHVWLTRLNNLRIVVDGVTRCLNETERRTALPLPYKQVGDFTYKQLRAALVKTGLLPDSIKFAGLSYPTAAQQAEGKAKDPESEKLVRLPAWQEMRKTLKDKGLETEWESMAGAATGGNPDVLDSIAWVLSVFKDDEEVAAELRRLTLPGGEKMIDALLDIRFDKFHALSLKALRKIVPYMETGLRYDEACAAAGYHHSQLSKPGEGKHKALPPLYAGRDKDGRMVFNENLDVPRNPVVLRALNQARKVLNALVRKYGSPSAVHIEMARDLSRPLDERNKIKKAQDEYRDKNEKAKSNFAAEHGIAAKGREFERFLLYNEQQCKCAYSLKPLDLNRVLHDIGYAEVDHVLPYSRSYDDGKNNKVLVLAEENRNKGNRTPYEYLDGANDSPRWRAFMAYVESNKAYRLAKRSRLLRKDFAGKAAEEFRERNLNDTRYICRFFKNYVEDYLKLAEGSEAKRCVVLSGQMTAFLRARWGLVKLRGESDRHHALDAAVVAACSHGMVKRLSDYARRKELEKVREGFVDVETGEIVNPAMFQQLHEHFPDPWPHFRNELDARLHLDDPAELRARITALATYPQETLESLRPLFVSRAPQRRNSGAAHKDTIYAQPKRLKAEGSVTQKVPLASLTLNDLGKLIDPHRNEKLYAAIRARLEAHGGKGEKAFPPSDPLRKPDRDGNATGPVVRAVTMVIDKLFGIPVRGGIAKNDSMLRVDVFRHKKDGKHHLVPIYVHHTVAKELPNQAVVAFKDEKDWTLIDDDFDFCYSLHPNDLVRITLKKETHLGYYASCNRSTGAINLWAHDRNRRVGKEGFIEGIGVKTAVAVEKYHVDTLGNIYPAPPEKRGGLA

SEQ ID NO: 1582 - protein, 1114 aa, unidentified
  REGION 1..1114: note = Description of Unknown: Cas Enzyme sequence
MQSGIPSYTLGLDIGIASVGWCVLGQDRIIDLGVRAFDKAETAKEGDSLNLVRRSARLMRRRLRRRAWRLTKLARLLKRHGVIDDTRIFQPQHPFPHSLWQLRRDGLDRLLSDEEWARVVYHLCKHRGFHWISRAEQRQADEDSKGEGGKVKQGLAGTAKLMQDKGYRSAAEMVLAEFPEAQRNKQGSYDKALARTLLGKELALLFKRQRELGNPHAGTALELAILGNGDRKGGLFWAQQPALAGNDLLKMLGKCTFEKSEYRAPKASFTAERHVWLTRLNNLRIVVDGSTRPLNAQERQIALPLPYTYDSDFTYKRLRSALLKAGCLPESFRFTALPYPSAAQQLDGKAKDPEAATLVKLPAWQEMRLILKKAGLETEWQGMAGAAIDGRPELLDQITWVLSVFKDDEEVSAELRRLPLPSSEQMIDALLDIRFDKFHALSLKALRRIVPHMEVGLRYDEACAQAGYHHSQLHKTGEGEHKYLPPLYAGRDKSGRMVFSEEMDVPRNPVVLRALNQARKVVNAIVRRNSAPMAVHIEMARDLSKPIDERRKIEKDQSEYRERNDKDRALFAEHFQRMPTGIEFEKWRFYREQQGKCAYSVEPLDIIRLLEQGYVEVDHALPYSRSFDDSKNNKVLVLAKENRDKGNRTPYEYLGGAENTPRWQQFVAFVESTKAYRLAKRSRLLRKDFSAKEAEEFRERNLNDTRYICRFFKNYVERYLQLAEGSEAKRCVVLSGQLTSFLRARWGLLKVRGDNDRHHALDAAVVAACSHGMVKRLSDYARCRELEKVREGFVDLETGEIVSPAMFQQLRQHFPDPWPHFRDELEARLNIDDPVQLRADMERLGSYPTEAVEQLHPLFVSRAPQRRNGGAAHKDTIYGQPERLKLQGGVTQKVPLAGLTLKDLDKLIDPHRNEKLYAAIRVRLEAHGGKGDKAFPPDNPLHKPDRDGNPAGPVVRTVTMVIDKLSGIPVRGGIAKNDSMLRVDVFAKAGKFHLVPVYVHHTVAKVLPDRAIVAFVDEDSWTLIDDSFEWLFSLHPNDLVRVKLKKESHLGYYAGCNRSTGAINLWAHDRNAQVGKDGMIQSIGVKTALAIEKFDVDVLGNIYPARLEPSRGLA

SEQ ID NO: 1583 - protein, 1121 aa, unidentified
  REGION 1..1121: note = Description of Unknown: Cas Enzyme sequence
MSDKPFEPLTFGFDIGIASVGWCVVCENRIVDLGVRCFDKAETADKGESLNLARRTARLMRRRLRRRAWRLIKLARLLKREGLIQSVEIIRSPAPVSPWKLRAEGLDRRLNDEEWARVLYHLCKHRGFHWLSRAEEKKAESDKQEGGKVKQGLANTQRLMLEKGYRTAAEMVLSEFPHAQRNKAGNYDKALSRALLAGELALLCRRQRELGNPHAGTELEVKILGNGDRKSGLFWEQRPPLSGEALLKMLGRCTFERDQYRAPKASFTAERHVWLTRLNNLRIVVDGITRPLDEAERQIALPLPYRQAGDFKYEQLRKALTKAGLTNFSFAGINEDKEKDVLVKLPAWQALRKALKENGLETEWESLAGQAIGGDPSLLDAIAWVLSVFKDGAEVAAELRKLALPGGETMIKALSEISFDKFHALSLKALRKIVPHMEAGLRYDEACQAAGYHHSQPPNGASEKSLYLPPLYSGRDRDGRMSFNDRLDVPRNPVVLRAINQARKVLNALVSRYGSPIAVHIEMARDLSRPFDERKKIRKAQEEYREKNEMDKAAFAAEYGIAAKSREFEKFQLYREQQGKCAYSLKPLDLHRVIFEPGYAEVDHALPYSRSFDDSKNNKVLALSEENRNKGNRTPYEYLTSFAGGEQGERWRQFVVFVEANRNYRLAKRQRLLRKDFSAKTADEFRDRNLNDTRYICRFFKNWIETHLKFAEKIGTDGTVLPAAKHCVVLNGQTTAFLRARWGLLKLRGESDRHHALDAAVVAACSHGMVKRLADYSRRKELENLRAGFPDPETGEILDPSMYQRLAEHFPVPWPHFREELEARLFIDDPQQLRQRLDAFGTYLSEALAVVRPLFVSRAPQRRGGGAAHKDTIYAQPQRLKAKDGVTQRVPLASLKLSDLGEPGNEDKTCKLIDWHRNKKLYAAIRARLEAHGGKGEKAFPPDDPLRKPDKDGNATGPIVRTVTMVIDKLSGIPVRGGIAKNDCMLRVDVFRHKQDGKYHLVPIYVHHTVAKELPNRAIVQSKGEEGWTLIDDNFDFCFSLHPNDLMRITLKNEHHLGYYAGCDRSTGTVSLWAHDRNQRVGKDGLIRGIGVKTAVAVEKFHVDVLGNIYPAPPEQRRGLA

SEQ ID NO: 1584 - protein, 1135 aa, unidentified
  REGION 1..1135: note = Description of Unknown: Cas Enzyme sequence
MGDKTPQNEVSVQANVSAANVKARSAGRSQNLTFGFDIGIASVGWCVLDDARIVDLGVRCFDKAETADKGESLNLARRMTRLMRRRLRRRAWRLIKLARLMKREGLIARVDELQSPAPVSPWRLRVEGLDRRLTDDEWARVIYHLCKHRGFHWLSRAEEKKAEGDKKEGGKVKQGLADTQRRMTEKGYRTAAEMVLAEFPDAQRNKAGDYGKALSRALLADELGLLFKRQRELGNPHAGAGLEAKILGTGDRKSGLFWEQRPPLSGEALLGMLGRCTFERDEYRAPKASFTAERHVWLTRLNNLRLVVDGVTRPLTEAERRIALPLPYRQAGDFKYEQLRKALAKAGLANFSFAGVNEDKEKDVLVKLPGWQTLRKALKENGLETEWEGLAGRAIDGDPSQLDAIAWVLSVFKDGAEVEAELSKLNLPGGEKMIEALSEVSFDRFHNLSLKALSKIVPHMEAGLRYDEACQAAGYRHSQPRAGEGKKSRYLPPLYSGRDKDGRMRFNEDLDIPKNPVVLRALNQARKVMNALIREYGSPVAVHIEMARDLSRPFDERNKIKKAQEEYREKNEKDKAAFAAEYGIAAKSREFEKFQLYREQQGKCAYSLKPLDLHRVIFEPGYAEVDHALPYSRSFDDGKNNKVLALTEENRNKGNRTPYEYLMATDPSGERWREFAAFVEANKNYRLAKRQRLLRKDFTGKAAEEFRERNLNDTRYICRFFKNWVEDHLLLAEKVGADGTALPAAKRCVVLNGQTTAFLRARWGLLKIRSESDRHHALDAAVVAACSHGMVKRLADHARRKELENLRAGFPDPETGEILDPAMFQRLTEHFPEPWPHFRQELEARLAIDDAQTLRERLQAFGTYPPEALAIVRPLFVSRAPQRRNGGAAHKDTIYAQRLKVQGGVTQRVPLASLKLADLDKLIDPHRNEKLYAAIRARLEAHGGKGEKAFPPDNPLRKPDRHGNPTGPIVRTVTLVIDKLSGIPVRGGIAKNDTMLRVDVFRHKKDGKFHLVPVYVHHAAIYRRTGELPNRAIVAFKDEEDWTPIDDNFDFCFSIYPNDLLRITLKKEKHLGYFASCNRSTGAFNLWSHDRNRSTGKDGLIESIGVKTAVALEKFHVDVLGNLYPAPPEVRRGLA

SEQ ID NO: 1585 - protein, 1143 aa, unidentified
  REGION 1..1143: note = Description of Unknown: Cas Enzyme sequence
MADKTLGPLTFGFDIGIASVGWCVLGEDRIVDLGVRCFDKAETAKEGESLNLARRTARLMRRRLRRRAWRLTKLTRLLKRTGLIADASDLRQPPTASPWQLRAHGLDRLLSGDEWARVIYHLCKHRGFHWISRAEEKKAEGDTKGEGGRVKKGLSETQRRMSEKGYRSAAEMVLAEFPGAQRNKQGDYGKALSRVLLSEELALLFRRQRELGNPHAGTELEFAILGNGDRKSGLFWEQKPPLAGADLLKMLGKCTFERDEYRAPKASFTAERHVWLTRLNNLRIVVDGTTRPLTSDERRVALPLPYDYASGELTYKQLHAALVKRGLLPESFEFAGLRATKDGKDPKAEKLVKLPAWHELRKTLEKAGLETEWHGMAGAATGGNPELLDEIARVLSVFKDGDEVVAELRKLNLPGGQPMIDALSEISFDKFHALSLKALRKIVPHMEAGLRYDEACAAAGYHHSQLHEVGAGEHRYLPPLYSRRDQDGRMVFNDELDVPRNPVVLRALNQARKVLNALVRAYGSPTAVHIEMARDLSRPLDERNKVKKAQDEYRERNEKDKAAFAAEYGIAAKSREFEKFQLYREQHGQCAYCQQPLAPNGVVHKIFEPGVAEIDHVLPESRSFDNSKNNKVLVHWKCNQNKGNRTAYEYLTSFSGGEDGERWRSFKAWVEGNKSYRLAKRTRLLRKDFSGRAAEEFRERNLNDTRYICRFFKNYVERYLKLAPIVGADETVDAKTNKRCVVLNGQTTAFLRARWGLLKLRGDSDRHHALDAAVVAACSHGMVKRLGDYARTKELAKVRDGFPDPETGEIVDPAMHQQLHAHFPDPWPHFRQELEARLNIDDTAELRLRMEAFGTYPPESLDALRPLFVSRAPQRRNSGAAHKDTIYGQPERLKAQGGVTQKVPLAGLTLKDIDRLIDPHRNERLYAALREWLKGLDYAKDIEKSAKETKRELTTDEKEKIERLRALPHKPGRDGNPTGPVVRTVTMEIDKLSGIPVRGGVAKNDAMLRVDVFRHKRDGKYHLVPVYVYHATSKELPNRAIIQGKEEGEWTLIDEDHSFQFSLYPNDLTRVTLKDGIRFGYYAGCDRSTGAISLWAHDRSQQAAKDGLIRSIGVKTAITVEKFHVDTLGHIYPAPPETRRGLA

SEQ ID NO: 1586 - protein, 1143 aa, unidentified
  REGION 1..1143: note = Description of Unknown: Cas Enzyme sequence
MECKPSSFGPLTFGFDIGIASVGWCVLGENRIVDLGVRCFDKAETAKEGESLNLARRMARLMRRRLRRRAWRLTKLARLLKREGLITDITTLKQPPGKNFKTPNLWKLRVEALERKLDAEEWARVIYHLCKHRGFHWISRAEEAKAESDSKSEGGKVKKGLAATKRLMEDKRYRTAAEMVLKEFPEAQRNKQGDYGKALSRIALGEELATLFRRQRELDNPKATSVLEQAVLGDGSRKSGLFWAQKPPLSGNDLLKMLGKCTFERAEYRAPKASFTSERHVWLTRLNNLRIIVDGTTRSLNEQERRIALPLPYQQAGDLTYKQLRAVMTKAGLLPDTFRFTGLAYPSASQQADSKTKNPEEEKLVKLPSWQELRKTLEKADLKAEWQKISTNALEGKPELLDRIAWVLSVFKDGEEVERELRALNLPGGEKMIAALETISFDKFHALSLKALCAIVPYMESGLRYDEACQQAGYHHSQLHEPGKDVGRYLPPFYSGRDKDGRLRFNEDMDIPRNPVVLRALNQARKVCNALIRTYGAPYAVHIEMARDLSRPMDERSKVKKAQEEYRERNDKDKALFAREFKPAGAVKGREFEKWQLYREQQCKCAYSIEPIDIHRLFEPGYTEIDHALPYSRSFDDSKNNKVLVLATENRNKGNQTPYEYLDGKSNSERWHRFTVWVENNKSYRQAKRSRLLRKDFDVKASAEFRDRNLNDTRYICKFFKNYVERYLQLAEGSENKRCVVLSGQLTAFLRARWGLIKVRGDSDRHHALDAAVVAACSHSMVKRLSDYSRRKELEKAANAVDMETGEIADPAMLSRLEQHFPAPWEQFRNELLARLSIDDAEKLRAELQRLGTYTDDALATSRPIFVSRAPQRRNSGAAHKDTIYGQTEHLRKQGSVTQKVPLSSLNLKDLDKLIDPQRNEKLYAAIRARLDAHGGKGDKAFPPDNPLLKPSKDGSGNGPVVRTVTMLIDKLSGIPIRGGVAKNDTMLRVDVFRHKKDGKYHLVPVYVHHTVAKELPNRAIVAFKEECDWTVIDGQFVFCFSLHPNDLIKITQKSGEVIFGYYRGCHSGTAALNIALHDRYAFGEKTTSLSWSKKNLGKPIPNDKLGLIEGVGVKMAAIFEKLHVSTLGNIYLAPPEQRRGLA

SEQ ID NO: 1587 - protein, 1118 aa, unidentified
  REGION 1..1118: note = Description of Unknown: Cas Enzyme sequence
MSATYTIGLDIGIASVGWCVLGETHVLDLGVRAFDKAETAKEGESLNLARRSARLMRRRLFRRAWRLKKLARLLKSEGLTADTKLFKPEQPFSSSLWQLRVDGLDRGLSDEEWARVVYHLCKHRGFHWISRAEAKQAEGDSKSEGGKVKQGLAGTAKLMDEKGYRSAAEMVLAEFPDAQRNKQGEYRKALSRELLAKELALLFAKQREFGNLHASSALETAILGNSDKKSGLFWQQKPALAGADLLKMLGTCTFEKTEYRAPKASFTAERHVWLTRLNNLRIVTDGITRQLTEQERQLCLPLPYQQAGDLTYKQLGNALTNAGLLASDSFRFIGLAYPTGMQKVEGKTKDPESATLIKIPAWQELRKTLTNAKAGLNDEWKKFSGDALCGQPELFDQIAWVLSVYKDDDEVRTELAKLALPNPQALTEALLNIRFDKFHALSLKALRAIVPHMEKGLRYDEACVQAGYHHSQLHKVGEGEHKYLPPLYDGRDKEGRMIFAENADIPRNPVVLRSLNQARKVVNAIIRKQKCSPTGVHIEMARDLSRPFDERNKIKKEQEEYQARNQRDREQFIELFGHPPKGLEFEKWRLYREQNGQCAYSQKPLASSGDVAEIFLDGSTEIDHALPYSRSFDDSKNNKVLVLTRENRDKGNRTPYEYLGGSENSERWQRFVSFVESNKAYRLAKRTRLLRKDFGAKESEEFRERNLNDTRYVCRFFKNYVEQHLKLAESSEAKRCVVVSGQLTNFLRARWGLLKVRSDSDRHHALDAAVVAACSHSMVQRLSNYSRTRELEQVRDGFVDIETGVIVNPAMHQQLREHFPDPWPYFRHELEARLKIDSPELLREEMARLGSYTEEELAALKPLFVSRAPQRRNGGAAHKDTIYGQPERLKKNGSVAQKVALASLTLKDLDSLSDPHRNAKLYGAIRERLEAHCGKGDKAFPAANPLRKPDKEGNPTGPIVRTVTKVIDKLSGIPVRGGIAKNDTMLRVDVFTKAGKFHLVPVYVHHRVTGMPDRAIIQGREENEWTLIDESFDWCFSLYPNDLVAVHVKNDHWLGYYSSTDRSTGAISIWAHDRSQAVGKDGLIRSIGVKTALKVEKFHVDTLGNIYPAPPEKRRGLA

SEQ ID NO: 1588 - protein, 1114 aa, unidentified
  REGION 1..1114: note = Description of Unknown: Cas Enzyme sequence
METRYTLGLDIGIASVGWCLLGENRIIDLGVRAFDKAETAKEGDPLNLTRRMARLARHRLAQRAWRLKKLTRELKRQGLIDSKRFFLEKPAQTSPWCLRVEGLDRKLESNEWARVIYHLCKHRGFHWVSRAEEKQAEGDAKSEGGKVKQGLAGTRRLMEENGYRSVAEMVLAEFPEAQRNKQGEYTKALSRILLGDELSKLFALQRQFGNPLASPELEAAILGNGDRKSGLFWQQKPPLSGAALLKMLGKCTFEKTEYRAPKASFTAERHVWLTRLNNLRIVFDGETRPLNEQERALALPLPYKQASELTYKQLHDALVKGGLLPKSFEFTGLRPAKEGKDPKSEKLIKLPAWQELRATLKAAGLETEWEGLAGAACCGQPEILDEIARVLSVYKDDDEARSELNKLPLPNREKMVEALLDIRFDKFHALSLKALRKIVPFMEQGQRYDEACISAGYHHSQLFAADGEKELFLPPLYEQARGHLPGEEGKMIFSERIEHEITGGIPRNPVVLRALNQARKVVNAIVRRYGSPLCVSIEMARDLSRALDERIKIKKEQDEYLARNERDKALFVEEFGQAPKGGEFEKFRLYREQLGKCAYSLEALDLDRLLEAGYVEIDHALPYSRSFDDSKNNKVLVLAKENRNKGNRTPYEYLDGAENSPRWLQFVSFVESTKAYRLAKRSRLLRKEFGEKEAKEFKERNLNDTRYICKFFKNYVERYLKLAEGSEAKRCVVLSGQMTAFLRTRWGIHKIRSESDRHHALDAAVVAACTHGMVKRLADYSRTKELTKVQEGFVDTTTGEIIDPAKYQQLKQHFPEPWPHFHHELEARLKIDDPNLLREEMARLGTYDDEALEQLRPLFVSRAAQRRNGGAAHKDTIYGQPEKMKKTGGVTQKVPLSRLTLKDIDNLIDPHRNEKLYAAIHARLEAHGGKGDKAFPASNPLRKPDRDGNPTGPIVRTVTMLIDKLSGIPVRGGIAKNDSMLRVDVFTKAGKFHLVPVYVHHRVTGLPNRAIVAFKDEEDWTLIDESFAWCFSLYPNDLVRIAQKGKPPILGYYSSCHRGTGNINVWAHDRNQATGKNGMLEGIGVKTALALEKLHVDTLGNIHPAKPEPRRGLA

SEQ ID NO: 1589 - protein, 1112 aa, unidentified
  REGION 1..1112: note = Description of Unknown: Cas Enzyme sequence
MENNAYTLGLDIGIASVGWCLLGENRILDLGVRCFDKAETAKEGDSLNLVRRTARLMRRRLRRRAWRLTKLARTLKRHGLITDTQLFQPQHPFTRSLWQLRVEGIDRRLENEEWARVIYHLCKHRGFHWVSRAEERMAAEERSGEGGKVKQGLAGTRKLMAEKAYRSAAEMVLAEFPEAQRNKAGDYGKALSRVMLGDELLQLFERQRELGNPLAGLALQAEILGGGDRKSGLFWAQNPALAGADLLKMLGRCTFEKNEYRAPKASFTAERHVWLTRLNNLRIVVDGVTRPLNDTERRLALPLPYQQAGDFTYKQLRTALIKAGLLPESFRFAGLAYPSAAQAEAGKAKDPESEKLVRLPAWQELRSAFKKAGLDTEWQGIAGAALGGDPQRLDDIAYVLSVFKDSEEVERELRTLALPGGEAAIMALAELSFDKFHALSLKALRRIVPLMEQGLRYDEACLQTGYHHSQPDAASASKQKYLPPFYARRDKDGSMIFREDIDVPRNPVVLRSLNQARKVVNAIVREYGPPQAVHIEMARDLSKPLSERRDIEKEQKDYRERNERDKALFAEHFGQAPKGVEFEKWRLYREQQGKCAYSIQPVDLHRLLEPGYVEVDHALPYSRSFDDSKNNKVLVLAKENRDKGNRTPYEYLGGKSDNPRWLAFKTFVETNKAYRLAKRSRLLRKDFGEKESAEFRERNLNDTRYICRFFKNFVEQHLALAEGSDAKRCVVVSGQLTAFLRARWGLFKVRGDNDRHHALDAAVAAACSHGMVKRLADYARRKELEKVREGFADAETGEIVNPAMFQQLQEHFPAPWHHFRHELESRLKIDELAWLRDAMALFGTYPPDALAGLKPLFVSRAPQRRCGGAAHKDTIYAQPERLKKEGSVTQKVPLASLTLKDLDQLIDPHRNEKLYAAIRSRLEAHGGKADKAFPASDPLRKPDRDGNPTGPVVRTVTMVIDKLSGIPVRNGIAKNDCMLRIDVFAKAGKFHLVPVYVHHRVAKTLPDRAIVAFKDEGEWTQIDDSFEFRFSLHPNDLVQVKLKTESHLGFYAGSDRSTGAISLWAHDRDRQIGKDGLVRGIGIKTAQSVEKFHVDVLGNIYPAPPEKRRGLA

SEQ ID NO: 1590 - protein, 997 aa, unidentified
  REGION 1..997: note = Description of Unknown: Cas Enzyme sequence
MAQQNTQRPYYVLGLDPGIASCGFALLDMNNQKILEMGSHLFDTSQTDKTHTSLAVVRRNARSIRRNNERSKNRQKHCLELLKEHGLVPENANKQWFQTKHGDRPSLKLRVRGLGQLLSDRELAQVLYSLSGRRGYIPHGIGRVGGTNGDEELTSDEDGKVLKAVQENISLMRSKGYRTVGEMLNAKGESRNKAGKYELCVLNSQLVDEARLLMEAQMRLGNPKVSSGLIDGYLACMQWEKETLGHDAKVYSQVGKCVYFPDEVRAARADLSSELCGAYERFGHLVIVEGSGQEKGLSPEQRDQYLEILFSPVPLKGNKECKVTYGEIRKDLDLSERALFKGVGRDEEKNEVFIPKAWRSMRKHDLPSTLMERMLQDHSLADTVGEALTYASTEDSLRTQLEPLGLEVDDEDAICALPFSSKVFSGYGARSLKAIRILLDSFDDPEVMTLTVAEEASGLLGLRLNREQTRGGRLEPYYLYDPTCNNPVVLRAMGRMRRIVNAIIKIYGVPDEIHIELGRELKQSGKEKAKVAKANRQNQINNKTWSETIGESLGIAPEEVRGKLLRMYGLWQEQGNKDIYTGQTIEYERMIREDHYCEIDHVLPYSRTCDDSRANKVLVLAKSNQDKRERTPFEWMQEDSTAPDWNEYRARVIELVKNPRKRRNLLNDDLAEKDHEAEFLARNLNDTRYMSRAVKSYLEDTLQFPDDGRTRHVLAVAGGATGNLRWVWGLNTGENDSKDRSDDRHHAVDAAIIAACSESAVQKVARARSLGSKTFKAVKSDRLAETQPWATFADDVLKAREDVIPTRMVDHGVTGRAFEDTLYHYEGKADEGSGLSLLTSGGKTVKKGNVKVREDGSARLVDGMAFLRLWLDPDARPNGKVKGKYYAEPVYYADIPAIKAGTYVPRACKIHVARTEWEPVPESAMRLKPITLHRGDVLSIDGAQGRFWSFGITNCNMEMRDLRSGKTLSPLTTVTSLGRETVLSLMQEDVLGHCYER

SEQ ID NO: 1591 - protein, 1360 aa, unidentified
  REGION 1..1360: note = Description of Unknown: Cas Enzyme sequence
MKNEMNAYYLGLDIGTDSVGYAVTSETYDLKKFRGEPMWGVTTFEAASLAEERRMNRTARRRLDRRQQRVQLLSELFAPAICAVDPNFFIRRKESALFAEDTRFGVKIFDGGITDKEYHKKYPTIHHLILDLMQSDEPKDVRLVYLACAWLVANRGHFLFDADAASVRDFSKPYEAFCAHFTQECGCSLPWADDVSSDTVQKIMQADAGVTKKKALFAEKAFGGKKPPNKSDAEFPFRRDVIVTLLSGGKAAPKDLFVNEDYASVDSLSLGMDEENFDRIVTELGEDGALLRVMRGMYDCALLNVTLRGSGCISERGSSYISKAKVAAYNQHAEDLRWLKQFIRKYKPKDYAKVFRRAEAGNYVAYSYNLKNCEDGKSLKKANRDAFSDFLKSEVKDIEVEESDRARYEDMLNRIEQRTFLPKQKNTDNRVIPQQLYRNELAEILSRAETYLPMLNEADEDGITVKDKILSVFDFRIPYYVGPLNPQSPNAWLERKAGKIYPWNFEKMVDLDASEEKFIRRMTNTCTYLPGEDVLPYCSLLYSRFMVLNELNNLKLNQHSIPVAVKQEIYTNLFEASPKKVTKAGIEKYLKSRGYMNPGDELSGIDTNANANLRPYHSFKPLLTGGVLTEEQAEEIINHAAYSEDKVRMSGWLESRYPDLTVEDRKYILRLNLKEFGGLSKTLLTGILGCAVNGTGEAMTIMDALWDTNENLMQLLSERYTFREQIEAFVREYYADPQNKKTLSDRLSDMYISNAVKRPIIRTLDIVSDVVKATGHAPAKIFVEMARGGTPDQKGKRTVTRKQQILDLYKQVKNKDIPRLLEKLGETSNNQLQSDRLFLYYMQLGRCMYSEKAIDLETLFTDTYDIDHIYPQSKVQDDSILNNKVLALSSENGAKSDRYPVDAAIREQMSGFWTFLREKGLVTDEKYRRLTRTTGFTEEELHQFINRQLVETRQSTKAVAQLLKERYPDTEVVYVKAGMVSEFRQQFDMLKCRSVNDLHHAKDAYLNIVVGNVYHEKFTRRWFDTSQKYNIAVKQVFSQPQSPYGKTVWRGEEDIAKVRKTMGKNSVHMTRYAFCRKGGLFDQLPVSAAEGLIPRKSDLPTEKYGGYNKPAASYYLLASFEISGKRDIMFVPVESRFAQQIDTDEAFCREYLARMIGDLNGGKTAENVHVLLNGRKIKTQATLSLDGMRVLLGGKTGARLQVRPLMPLVLGAELERYAKRLEAYTEKAKSNRGVVLDDAHDRISPKQNLVLYGVLKEKCAKKPFSKCPGNIGEILKQGEEAFEKLNTAEQVTCLMNIILWFNDVGGGCDLKLIGGAAASGTKRPAMKLSSWAKAYRDIRIVDSSASGLFESSSENLLELL

SEQ ID NO: 1592 - protein, 1029 aa, unidentified
  REGION 1..1029: note = Description of Unknown: Cas Enzyme sequence
VGNAERHALEKLDPWILRARALSEPLDLHHVGRALFHLQQRRGFQSNRLTDKGNDEKGAVESGAEAARSEMSSCGAQTLGELKGQPRRSVSKENRSLPKGARRPMPLARVRSHSEGAKTIYDYYPLRAMIEREFDAIWDTQARHHPNAMTDDARATLRETLLHQRPLKPQPVGRCTFENEEERAPSALPSTQRVRIYQELNNLRVSVRPGELQLSLKPEERDKLAAIVLSKPKLSLTQMRKALGLSSAATFSIEAGGRDFLDGDKTRDIITANRKSNSGDWPDWADLPLPEQDALVEILLGRVAPDKGSHPAVVKTHERVVARIARGLGLSDARARELLEAKDEEPLIAFLSDRYGLDPARAERIASLRLPDGHGRLSRTAGAKVLAQLEAPDENGDLQTYDRAVVAAGYFHHSLRGTGEVFDRLPYYGVVLEQSVAFGTGDPDDIEEKRIGKLANPTVHVALNQLRKLVNALIDRFGPPKQIVVELSRDLPLGAVEKNKLEKRQRDNRQENERRAGELAKYGQTNTYTNRMLLRLWEELDATGRKCPFTGRHLSQNMLWSGELEVEHILPFSRTLDDSFNNKVLSLREANRRKGSLSPWEAVERGIFDRETIESSLRDLPKAKAWRFGPDAMERFENEERDFLDRQLNDNKYISRLAAQYLKSLGSDVWVINGRLTADLRHHWGLNSALAGHNRARVESEADEVKKNRNDHRHHPVDAFVIACTDRPMVKAAADEAKKVEDEFTAGQRDHRRLLAGIPDPFDGYLLAVKEAVGRIVVSHKPDHGIQGKLHEDTNYGVVRTQAGQTRLATRKPIAGLTPGEIRSIGDDRIRRELVALTEGLADKERIAKLIEYSASTGHKRVRVHKVQASFETIGHGPDSKGKRHVRAVIPGDNYCMDIVETPDGAWHGVTVTRFQTHRLAKNDEWKHLWRKAHPDARLIMRVRNGDLIGLEHDGTEKVMRVIRLNPSGNRLYLAAANEAGDFQRRHDNPDDDFRWDLAGIGKLKSRKARLVRVTPDGRLIVPVSPHNP

SEQ ID NO: 1593 - protein, 1411 aa, unidentified
  REGION 1..1411: note = Description of Unknown: Cas Enzyme sequence
MTSVLSLDLGGKNTGFFSFTAQDASNIDDFQSGTIIYDESFVLSQVRRRGKRHNKRNDDRSKMVKRLFLLILKEHYKCQIDFLPDEILGLFNKRGYTYASFEIKDDEKEQLESPILKEFLNDRLTNYTIKNDDEIEEFLNQIASNETTFSEYKKYFENLYKTSTHQPKKQLELIDEIKKELQKDDAKELLSGLKIVKKIIDEFDKQKNQGNLPREKYFEELNQEVKQNQNILEFFQSHNLQIQDMQNLIGNLSNYQLKELRRYFNDKEMAKGDIWIPTKKRVGLKEITHRFIQSWHFKKEDKDKKQKEEARNQLLKNLKEKNIIEFLTTTEPSKTIPPYDDMNNRGAVKCQTLRLNEDYLNIHLPNWRNIAHKLASEGQKKDLNISTVKKWSLDSTLLHRILDTSASIDPYELRSDKIDGYIDILGKNDALALQKFAKKYYELIKDKVRTGIWTSTDDMLKKCNHNPPYKNNQIHNLLAGILGVKIEADKFSSFETELWNNKEIKINRLTLSSYCKNIEELRKSHGNLFKSYIEELFKKDPKNLSKDEQKIRNLLDEKVLHEWVEKIGEFFGIDEQYRARFNNLFSMAQLYTIIDTQRSGFNSTCKWCSSENQHRAITKIEIDPQTGEITTNANCQRLPADTQRPFSGKIERYIDKLGYEIAKIKAKELENIQDKKIDLKIILEQNAFEYEESIRSAKIKNANAKAKKSLEDATKKYKKSLDDKDARIKSFSGGVCPYCGESLGDDGEIDHILPRSYTLKKYGTVFNSEGNLLYVHQKCNQAKKENIHKLSDIKAPITKEEIENQITPNDKKDEINYKTFSILTPKQQKAFKYALFLDKDNKAYKKVVDWLRTDQSSRVNGTQKYLAKKIQEKLKMMLPDKEFDFEFILADAQDVSSLRKTYAKENPLLTKPDTQPPSSHTIDAIMAFLSVYPKVAKSDEMPSVDKVVNFANIENWSALNNEFLTKGKSANQKIEEMIKAQDFSQKNMRQIFSKPIFGANALGERFKLIVIKNDNIYIGYPVKTKNGYDLKKCKHITNKNGKQILNQIIETYKNKQEKQLVSKNDKGEVIIYEIIKQNFNGLSNQYFNGNYKNLTKEQKDEAVLLEFIAQNCKYYTKKVNVKFAPSYKKEIDEMKYPFYNEWKLFDEAWQHLKTNENKKDFRDRYIIDKKQTNSSYQIDTKKGEYKLDGDIAPLWEDFCRWYFLDRFKKDEDIKKEKKRIKARKEFSLIAVGGTQGKVFRAKRKTPKGFVYQALPMDNNVIAGDYANVLIEANSKKLSLVPKSSESVINQLGNELKVKQSKDIRDIKLDPSKFFKDSFDYSSVEVILNKTSVEIINFSLEYFKHNLLENIELLDEMITSKKSKIQIIKKKLDLIINATSRNNDVAIKKIEENSINFEIAFRSENLSKLLND

SEQ ID NO: 1594 - protein, 1366 aa, unidentified
  REGION 1..1366: note = Description of Unknown: Cas Enzyme sequence
MHISPIAIDLGGKNTGFFSFTGTLDNSQSGTVIYDDSFVLSQVGRRGKRHSKRNNARNKLVKRLFLLILQKHYDLAIDTLPDEIRGLFNKRGYTYAGFELDEKKKEALEGDTLKEFLSDKLQNIDKDSDTETFLNQVASNGDSFKNYKVGFDKLFADSTHSPNKKTALKDEVKNEYFDGANELLAGLRVVKELLDEFDKQENQGNLPRAKYFEEIGEYITTNEKVKSFFDSNSLKLQDMTKLIGNISNYQLKELRRYFNDKEMEKGDIWAPDKLHRITERFVRSWHPKSDADRQRRAELMRALKSKEIMELLTTTDPVMTIPPYDDMNNRGAVKCQTLRLNEEYLGKHLSNWRDIANRLNHGKFNDDLADSTVKGYSKDSTLLHRLLDTTKEIDIYELRGREPNDLLVKMLGQSDANRLHGFAQNYYELIRQKVRVGIWTSPDGMLKRCDHNPPHKTNQVHNLVAGILGVKLDEAKFAEFEKELWSAKVGSKKLSAYCKNIEELRKTHGNLFKQIVEAGEDKDAVKYQEGLEFWTTKIAEFFGIDNERKQRFNNLFSMAQLHTVIDTPRSGFSSTCKWCTAENRFRSETAFYNDETGEFHKKATATCQRLPADTQRPFSGKIERYIDKLGFELAKIKANELEGLEAQNIHLPIILEQNAFEYEESIRSAKIKNANKKANEKLDKALKNNQKSLDAKIDRIKAFSGGVCPYCGEMLGDDGEIDHILPRSHTLKYYGTVFNSEGNLIYVHQKCNQAKADRVYKLSDIKAGVSAQWIEEQVANIKGYKTFSVLSAEQQKAFRYALFLPNDNEAYKKVAEWLRTDQSARVNGTQKYLAKKIQEKLIKILPNKHLSFEFILADATEVSELRRQYARQNPLLEKQNKQAPSSHAIDAVMSFVARYQKVFSGGTPPNADDVVKLAMLDSWNPVSNEPLTKGLSTNQKIEKMIKSGDYGQKNMREVFGKSIFKDEAIGERYKPIVTDGDKIYIGYPKKISGGYDLHYCHEATSKKEREQINSILASKYARLAKDEQNKKLYEIDKKAVSEASNILFGSAYSDLNDLQKMEATLVEAIINNCKYYVKKTEVVNAPQFVAKTDMRAYPLYDDWVRFDNAWKAQIKDGYKEKLEQGKKIYDILQVTDEWIEFCKSYFGITKNDIRYKARKTFSLIALTSAPGTVFRLKRKTHRKDDFVYQAIAIDNQQISGDYVNILLKNGKQTIALAGQNPSSSLKKEISVKETKEIRSVVIDPKILFRDDFDVNGIDVILNKTSATIKNFPISKVKDFLLGSEKRFALLYISGQKIKKSKNRSKPKTTLDLLSKNKQANKLCVKKDAIDAILKLSTRDGSVSQIAIQDGVIDFVLPFKSTQKLLK

SEQ ID NO: 1595 - protein, 1200 aa, unidentified
  REGION 1..1200: note = Description of Unknown: Cas Enzyme sequence
MPEPAQIGPYVLGIDLGAHSLGWAVLPLDSQGQPCGITAAGVRTFEAGVEASYDQMMQGKQKSKAANRRSKRAPRRQFWRRAWRRYKVMKCLIDNDLLRKPGDLDIRRPADQDRFIKSIDDELRKRLRPAKDDPRRHLWEQVWLYELRASALERELNPLELGRAFYHLAQRRGFLSNRKTDPSDDEESKEKKPKRAKKAESNRTPVPEDESEQAGAASSDGDKEDPKKVKAAIAKLDQDMERAIPDPRFRTLGFYFARHVNPEERRIRQRWTGRAMYEAEFKAICDAQSAYYPGLAEKGDFRSELHDAIFFQRPLKPCGHLVGHCDLEPDRKRALQAIPLAQEFRLLQKLNDLTVLEPGKNQHRSLTPPEREDLLDALSTQGEMTFKEIRKLLKFVEPKVNKETEEIEQIGHQFRHEAGGEEKLPGDRTASKILACEKKASGIAQRWHDMSDGREELVLALVNFENNEALAENLIERFDFSPDQATALSKIRLEESRCSLSRRAMERLLPLMRRGIHFKSAEKEVYGSAVERRTAVLDFLPRLLATDQEHVPLTADRPAFKKRRDLPNPAVARALAELRKVVNAIIRRHKKKPTRIHVELAREAKKTPLRREIAWKNNRLRQDERVAAENAIKMCKEIGISEPRPDDILKWLLAVECNWTCPYTGEKSGTITPKSLFSSPQFDIEHIVPLSLSRDNSFDNLTLCDAEYNRNIKRKQIPYAVESGNAERWQQILERVKRFKRQKRAVRNPNRKAKNRVIVEDRPNSKHERFAWTPEQVKEFYGDEFTPRQLTDAQYASKLAAEYLGMLYGGVIDETGKRRVQVSSGAVTATLRAEWNLNGVIPSLPDSPSHKALGDIRRDEKLRTDHRHHAIDAIVIALSSPKAVKELSDAARKVEQAELRRQDIRDSQGKRRTRYAEMDPPWGTKESFATHIRSAIAEITISRRPEHKIQGPFHAETNYSREINQNGVTTRRQRIKVTDLSARDIEGDAIADPTVRKAIRDKWRELGGGEPKKVFAIAENHPRLPARPGRQSPTIHTVRINVSVSPITVGHGSRQRFVVSGKDTLHHTLIVEVKDRRGRPVWKDRPVDRLTTHRRLARKRPIVRSKWRHGVTFIMALCKDDCIEMDDGTGGRAVYVVKAISKRDIKVRLHLDARTDEQIAAAGQRQQFRISSPDNLRTRHACRVVVDPLGNVARVKHGSV

SEQ ID NO: 1596 - protein, 1038 aa, unidentified
  REGION 1..1038: note = Description of Unknown: Cas Enzyme sequence
MGYTLGLDIGITSVGFAGISENSIPFSGVHIFDAAENPKNGSSLAAPRREKRGSRRIIHRRALRKSAIRTLLKTHGFQKVDEVIEAPVLQSDKPVWDLRAEALARKLSDEEFIRILFHIGKRRGADYGYNSRGESKKNDTDAEKTKKAAKELEERMINAGFSTIGAYLATQSKKRNGDGSYENFVTRDLLRSEIRKIFDAQRRFGNAKATPELYESYSGNGKIEDKRTLEGEGIAFYQRPLQSSENLIGFCTLEPSEKRAPKSAYTAELFVLWSRLNNCRVRTMGGAERELAIDEKRCLQQKAHALKKMTYEQARKELELGDNDRFNISYLKTKKEEKSWEDIRKVSENKTFLELAGYHELKAALDTGSTDDWQNWLSRDRDKLDEVARILSVYQDDKEIAEKLSGLGIINEQIKKLSEISFSKTLDLSLKAIRNILPLMQEGMAYDKACAQCGYDHTAKIMGAGVKLPPFKDIRNPVVNRALAQTRKVVNAIIRKFGMPETIIVELARDVGKSYEDRREIEKKQQKNLAYKEDAKKHAEEILGQEPNGEELVKYRLWKEQDGCCPYSGTYISPELMRDSAATQIDHILPYSRSWDDSLNNRVLCLTGMNQEKGNRTPFEKWGSTPLWDQIAANAARLPRAKAERMLMQELNEEGFKDRNLNDTRYITREFTKHLEQHLALGKGKRVQSRNGQLTAHLRGVWGFAKKNRENDKHHALDAIVVAASTPSMVQALSNWNRYEARLKHPDEKPRAPLPWATFRDDALASVDKIFVSRLPDRKITGAAHEETIRSVRKSDGVVIQRVKVTALKPAMLENLVDKDRNIKLYNVLKARLDEHGGKPDKAFANPVYMPTNDPEKQGPRINSVRITTSEKSGIAINGGLASNGDMVRVDVFQKDGKFFLVPLYVHHFAAASLPTRAILAYKDEKEWEEMVDSDFIFSLYKNDFVKIKMKKENVEGYYIGTHRGTGSINLRKHDNDTNFGKDGVTSSGVKTALAFEKYSVDYFGNIHRVLKEKRVGLAHGNDPESGEAVSQQGAVAA

SEQ ID NO: 1597 - protein, 1080 aa, unidentified
  REGION 1..1080: note = Description of Unknown: Cas Enzyme sequence
MRWRLGADLGTNSLGWAAVELDGDDVPFRVIVAGSRIFSDGRDAKSGASLAVERRAARATRRRRDRFKQRQAALLKHLTLAGLFPIDVTERKALAVLDPFALRARALHESLALHHVGRALFHLNQRRGFKSNRKAERGQDKEDGKIRMGVARLYEAMRDAGAETLGEYLHGRRAAATDPNAIPGVRTRLRPEPGDDAKSVGYDFYPDRQMLEDEFKLIWERQARYHPDELTPENERRFFEVIFHQRPLKQPKIGTCTLVPGEERLPKSHPLFQRRRLLEELNALKIVRPGQIAEPLTLDQRDLLYLKLKDKRSVTFESLRKTLKLDPDARFNKEGENRKDLKGDEVAAELGAKTRFGRQWPGIDTDKQWEIVSRIRDQETDADERALRSWLQDVHGLTPEQAKATAGARLPEGYGRFGHTATSRLIDALRAEVIVYSEAVKKAGFSHHSDFRDGEVLDELPYYGEVLERYIMPGTGEPTDPEETRIGRLTNPTVHIGLNQLRRVVNRLIERYGPPEQIAIELARELKLDDERKREINTRNRQNREAAEERSKKLVEIGIVDKGGNRALLKLWEELNPGNVLDRRCVYTGQQISIEMLFSGAVEVDHILPFKDTMDDSNGNRLLCMREANRRKRKRSPYEAFSHQPDWEDIAARAARLPREKRWRFEPDAMSRFDAQGGFLARQLIDTQYLSRLAREYLSALYPERGEGSSHVWVSPGRLTEMLRRSWGLNSLLPDHNFGGGADQPKNRRDHRHHPIDAVVVAVTDRSLLQRIAREAGQRGHEAANRMAADLPEPWEGFREQVGEIVKRMVVSHRTDHGTVAKSTLRKGHDATAARLHNDTAYGLTGEKDEKNNDLVVHRVPLTALKKTADIKDVRDAELRSALLAWTADLEGKAFEAKLLKFSEFGPLPFRGIRRLRIHEPLSVIVIRDKDGLAYKGYKGDSNYRYDVWELKDGKWVAEVVSMFDAHQPGRISAVRRDNPTARKVLSLHQNDLLAIELDGQDRKLMRVVKFGRNGQVTLAEPQEAGDLKRRDALSNDLDPFKYFAPTAGGLRRVRARQVRIDELGRVFDPGPRDRPGATR

SEQ ID NO: 1598 - protein, 1406 aa, unidentified
  REGION 1..1406: note = Description of Unknown: Cas Enzyme sequence
MKLILGLDLGPNSIGWALVNEAESDNEQSSIIKLGVRIPQLTSEEKEQFNKQKGISKNAERTLKRGMRRNLQRYKLRRANFIDTLIDRGWITRDTILSEHGNKTTFETYRLRAKAVSQEISLEEFARVLLMLNKKRGYKSNRKANSNSDEDGSFVDSIDVAKKLSDEHLTPGQYCYQLLRRGKKHFPAFYKSDLQAEFDKIWSVQSAFYPEQLDAATKANIIGKNKKQTWAILAKQCNLVGIKRPSNKEELTLQNYTWRADAVTKRLSLEEIAIVLQEINGELVVSSGYLGKISDHSKELLFNHQTVGQYLMAQLDKSPNVSLKNIIFYRQDYIDEFETIWSKQAEFHPELTDDLKREIRDEVIFYQRRLKSQKGLVGFCEFEQKQISVEKNGQTKEITIGYKQIPKSSPLFQEFKIWHTLNNVQVSLLGVRSRKPKYIGANLFSDLSVNEDLYNNGSRFLTKEEKEVLARELSVKEKLSKTEVLKLLFKDYKSLDLNYREIQGNSTGAKFYSAYAKIIELSGHKPINFKDPVDDITDEVSSVFHSLGWHTDFLKFDSSLPLESQSYYRLWHLLYSFESDNTPTGNGKLKDKIVELCGIDREYADIIADITFDSDYGNLSAKAIKGILPYMKDGLIYDKACEKAGYRHSASSLTKDEIETKELKDHLSILPKNSLRNPVVEKVLNQMVNVVNQLIDTYGRPDEIRVELARELKKNAKERRELTESIAKATNDMADYKEILQKEFGLQHVSRNDIIRYRLYKELKGNGYHTLYSKTYIPKKELFGKNFDIEHIIPQARLFDDSFSNKTLELKSVNIEKGDKTAYDYVSATNIGGGVSEYVARCENLFPPHSAKLRKLLMREQDIPEGFIDRDLRNTQYIAKKALSMLSEVCRRVSSTTGAITDQLRQDWQLVDVMKELNWEKYKAAGLVEYFTDRDGRVIGKIKEWTKRNDHRHHAMDALTVAFTKPIFVQYFNNKNASTKPNSNEYAIKAKYVQNGKVISPIPLNKFRAEAERQLQDILISLQAKNKVATRNQNKTKTATSGYNVRQQLTPRGQLHNETIYGSHLEYICTEDKVNASFDEQKIMTVANQEIRNALLKRFIENGRDAKKAFTGKNALDKNPIPVNLSDGPTTVPTKVKTVTLQQVYTIRKPISENLPIDKVVDAGIRELLKKRVEEYGSAKAAFSNLDKDPIWINKEKGICVKRVAIWAAVNPLAIRDKRDKDGNLIVNEHGAHVPNDFVCPSSNHHVAIYRKPMTDKQGLPILDSDGLPKQELVEQVVSFIEAVARVNQGQPPIARDFKSNEGWTLLFTMKPNEYFVFPNEETGFNPNDVDLMDPRNYALISPNLFRVQKLSSKDYYFRHHLETTVDNNKTLHGKTWKRICSVTGLEGIVKVRVNHLGQIVAVGEY

SEQ ID NO: 1599 - protein, 1049 aa, unidentified
  REGION 1..1049: note = Description of Unknown: Cas Enzyme sequence
MKNKMQYRLALDLGTTSLGWAMLRVKPNEDGQLQPCAIIKAGVRIFSDGRNPKDGSSLAVTRREARAMRRRRDRLLKRKARMLQQLTHFGFFPTDLAERKALETLNPYELRAKGLDEALSPYEFGRALFHINQRRGFKSNRKTDKKENDSGALKAAIKFVHSQIDGNTHRTAGEWLYKRMLNGDPVRARYRQTKQVKEDGKTKIDKSYDLYIDRAMVEAEFEAIWARQATLNPTIYSEQAKAALKDVLLFQRNLRPVKPGRCTLIPTEERAPLALPSTQRFRIYQEVNNLRLLRAGPKDEALTLTQRDQLVVALEQNNKRTFTQIKKLPGLDGQTQFNFEDPKREELKGNTTSALLSHTKHFGETWFEFDEATQDEIVWQLLNEENESRLIAWLMQKTGVDAEKAETIANVALPEGYGSLSRQALARILPELRKTVITYDKAVQAAGFEHHSRLNNYGEVSGRTFDTGIERIDQKTGEIQRLHAFHELPYYGEFLQRHVGFADPKATPETPEKYFGKIANPTVHIGLNQVRKVVNALIKRYGHPSEVIVEVARDLKQSKKQRDEENKRQAENQKRNDRIRKDIANTLGISEERVRHADIQKWILWEELSFDPADRKCPYSGVQISAQMLLSEEIEIEHILPFSRTLDDSLNNKTVSTRQANRIKENKTPWEAFGKENALGVIYADILLRAQKMPKAKRYRFAEDGLAQWDKEGKGFLPRALNDTRYLSRVAREYVSLVCPQATRVIPGQMTAQLRAKFGLNDVLGLNGEKNRNDHRHHAVDACVIGVTDQGMLQRFAIANASTRQKGLTRLVETMPEPWPTYRQHVERAVQQIYVSHKPDHSHEGAMHNDTAYSLLAEGLVGVHKTIEGKREYVEEKLAVIPFTSQKAAERHGYLPNGELRPYKGYKGDSNFCIEIVRNAKGKWEGEVISTFQAYQVVRSAKTPAEGVAVLRNPYRSLSGKPLVMRLLIDDLIRLELENIVRTMRVSTLSGNGQIFMCDHNEANVDARNRNKEDSFSYTSKMAGSLQKAKARRVTVSSIGELHDPGFKG

SEQ ID NO: 1600 - protein, 1077 aa, unidentified
  REGION 1..1077: note = Description of Unknown: Cas Enzyme sequence
MRYDIGLDIGISSVGWSVINRDKDRIEAMNVRMFDAAENPKNGSSLATPRREARSARRRLRRRRYRVGRVRQFIINQGLQSAVEANDLFDWQDGDFDIWLVRVNGLERKLTDREFARILIHYAKNRGFKSNRKSETKAGEGGVLLKAVQENKALMQEKAYRTVADMLLRDEKFEGKKRNKGGDYSHVLARSEIEEEIRIVFTKQREYGHPFATEENEETYIKIWSSQRPFSTQEDIVKRIGNCTFEPKEKRAPKFTYTFEKFRALDKINRLRIISTTSPQRPLTKEERLLLVEQCMEKKEVKYKDLRKILKLEDHEKFNELFYDPSETHAKNENRRFVSLDGYYQLKQIVHSVKDKTIAEAFRPIDYDTLAYAVTVYKDDNDTRDYLRNNYVNTNGKPVYNLANRVYDEQLIEQVLNLSFSQFGHLSLKALNKIIPFLEEGYQYHEACEKAGYNFNQRVGLEKKRLLPVIPADEIANPVVIRSLSQTRKIINAIIKRYGSPSNIYIEMARDMGRHYKERKDLEKQYNKNRTVNDKAKARIRELRPEISNPRGHDILKFKLWEEQSNRCAYSLDPITIEDLFDQGAVEVDHIIPYSKSFDDSNSNKVLVFAKQNQNKGNRIPYDWFGSDTVRWQEFNSYVKALKIPKKKKDLLLKENFDNDQQNTFKARHLNDTRYITRFLKGFIEDNLEFRKEEGKKQHVFTVNGAYTSLMRKRWGFNKDREENDLHHAVDAVIVAVSHPFQNRVSRYFKRSEQHASQLLKRKGERFPEPWEGFTRELEARLVQDPDKLKLALESLSLSGYDEEFISQVKPIFVSRMPKRSVKGQIHEETLRRHRGFTEKGLNLMVKKYALEDIPFDKNGDFPMYGKESDPKTYQVIKERYLEYGKDKKKAFNDPLFKPSKNPENAPIIRSIKIETTANQVFYLDDKTVAENASIARTEVFRHKENGKFYLAPVYVSDVVAKRVPEKFITALKPYSEWDLITDAYEFLFNLYPNDVIKVKMPREKTSKTNTGEIKKWIEEIFYYKGVDTATAQLNITEHKNEFSDRIGSKNLKLIEKYQVDPLGNLTKVNQEKRHGV

SEQ ID NO: 1601 - protein, 1078 aa, unidentified
  REGION 1..1078: note = Description of Unknown: Cas Enzyme sequence
VRYSIGLDLGIASVGWAVINLDKNRIEDLNARMFDVAENPKNGSSLATPRREARSARRTIRRRRYRVSRVRKLILEKGLLSKIESKELFNWQDGDIDIWIIRVNGIERKLTDREFARILIHYTKNRGFRSNRKSEAKETETGVLLKAVKENEKIMAEKNYRTVAEMLVLDERFEGRKRNKGGDYSHVLARSEIEKEIRLVFEKQREFGHHFASKENEEEFIDIWASQRPFSTSEDIFKKIGNCTFEENEKRAPKFTYTFEQFRALDKLNRLRILSDINPTRPLTEEERNEALQLLLNRKEVKYVDLRKVLQLSDHERFNELFYDLNEKNEKNEDRRFLSLEGFYEMKKIVREVKGKTVAESYRPIDYDTFAYAITVYKDDHDTRAYLLNTYVNENGQQIKNLANRPYNEDLIEALLSLSFSQFGHLSLKALNKILPFIKEGYQYHEACEKAGYNFNQRVGKKKEKLLPVIPTKDIANPVVIRTLSQARKVLNGIIKRYGPPSEIYIEMAREMGRPYNERKDLEKLYSKNRTSNDHARKHIRELHPEISNPRGHDILKYRLWEEQNGLCAYSLKPIKMENLFGHGTAEVDHIIPYSRCFDDSNANKVLVLKKENQNKGNRTPFEWFGSDEKRWKEFTSFVTTLKIRKKKKDHLLKQNFDEEQADQFKSRHLNDTRYITRFLKGFIEDNLLFRENERKKQHVYTVNGAYTSLMRKRWGFNKNRQDDDLHHALDAVLVAVSLPFRHRVSNYFKHREEHPAQLLKRKGEHFPEPWDGFRRELEARFIQDPDKLKLELESLALPGYDDEFINQIKPIFVSRMPKRSVKGQIHEETLRRQRGFNDRGYTRLVTKTPLANIKFDKKTGDFAMYGRESDPKTYEAIKARYLEHNGNLAKAFSEPLYKPSKNPKNAPIIRSVKIESVANRVVPLDDNTVAANGSIVRTEVFQHKKTKRYYLAPVYVSDVIAKNPAVKFITPHKPFSEWIDISPDYQFLFNLYPNDIIKIRLPREKTSKKNDGDFVKWTERILYYKSVHTSTAQLKFTDHKNSFNDAVGSQGLKLFEKYQVDPLGNLTKVRQEKRYDV

SEQ ID NO: 1602 - protein, 1052 aa, unidentified
  REGION 1..1052: note = Description of Unknown: Cas Enzyme sequence
  MOD_RES 480..482: note = Any amino acid
MDKAPGTDIAELGFDPGTFATALMTLEEFRSKDRVIWAGIDIGVASTGLCLVDILNHEIVLMASHLFKSPVVDKKKESASPKSLASVRRAARSVRRNIMREGRRKKAIRAVLADSGLIPADAGGEWFAARRDERTVVKLRSKALGHLLNSRELARVLYSFASHRGYIDHGKSDKDDDAGKVKKALAANHATLADSGCETFGQYLAGQPRSRNRAGDYSFTADIGMTVDEVRTIFARQRELGSEIATEALEERYIAELTWLTDTSKRDMSTYLKVGFCTYRGASYRRGATSTISFEMVRAHQMLCNTVIQHADGALSSIPGNTRIEIVRELFAVRKSVKPLKWSGLRRRLGLSESDSFKGRPVEEEKRDCIALPAWAVLCSGLYEDHRALLERLHDRIDDADAVCSALTFASSAASLAGRLAPLALTDDEVEAIVDLPYSARLFSGYASASLEALQMLRGTFEDPGVTSLRQAEEDSGLAXXXAQVRAMLAEERGESADGLLCAFSDYDPTCKNPVVLRATAQVRRMVNSAIRRYGLPDIIRVEVARDLKRSKHERQVVAESNRARRELTGQAKKDIIEFLGLPDGHHVRGRDLAMVKLYREQGGKDPYTDAGIDFRRMLEERGYAEIDHILPISRTCDDSQANKVLCLTKSNRDKSNRSPYEWMASGEASAPDWGEFCERMERWAKNCEPRRYARKKLANLTCENLAERAGDFIDRNLNDTRYMSTALAKWLRECLPFPKDNHEHVFCVAGGATALMRGVWGIGITGPDGKKNRDDDRHHAVDAAVIACCTPGIVRNVALVNEGHVRADARQRLFRDSLPYPEFKEQVDAWIPCIVPTLTLPNTVTGSVLKDTVYPYLGRDEAGKDLYLTVKKDKDGRIVERKANKATTLWKDGRGGCRKYDEMCALDCVFDASAGKRGKWSFDPVYCIDIPHRDPEIRTMRAFSKERAIDLWDTVEVPEAAPWMTIRRGDVLVCDGKAARFHSYNIANNTVYTFANRPRDPKELQFDGPLSDEAFPTPSKWGNNIQIMQEDCLGLCWLSFLAQRAADAQTE

SEQ ID NO: 1603 - protein, 1026 aa, unidentified
  REGION 1..1026: note = Description of Unknown: Cas Enzyme sequence
MAAYEDPRGCGFDPELVKTALMSREQFSSKPRKLVLGIDMGIAGIGICLMDKLNQEIVLMATHLFDCPWNPKNKTSLASARRQARSQRRNIARRAARKKHIRKILMVRGVIPEGVTAEWFSVRKGEQDNIQLRVKGLSQILSSRELARVLYGFASRRGYIDHGKADNDKDAGKVKKALKENAEIMDANGYETFAQYLVTQPRIRNRQNDYSHTIDIDMVVDEVHAIFRHQRELGNELATESLEGEYLAALRWLTDTTKRDRIIYSKVGYCTYLGEPIRRGPKSSISSEMVRAYQTLANVKIEHIGSVATHISPLTRNQIVHDLFKVSKNPKPLKWSQLRKKLDLADTDTFAGVRQSDEAKEVCVKVPAWNVLCSTLHDLNPALLNRLHDDVDLADAVCAAATFASSSEAFATRIAELTDGLSKEDVDALLELPYGSKLFTGYGSTSLKALQMLRDAFEDTNINRLYDAEVVTGLYDAREALAAKRNASDDGLLMPYSKYSPICTNPVVLRSCAQMRRIINSIIRHYGLPDTIRVEVANDLKRTEHEKKLITSGNIYNRRTNEKAKDDIVEYLGLSDADQVRGRDIDKVRLYNEQGGKDPYTGQGIDFGRMLTEKGYVEIDHILPFSRSCDNARNNKVLVLTKSNRNKSNRTPYEWMTSGEPTAPNWDEFCIRMDVWASGKEPKHYYSSKLAKLKEDNFTNNIDSFISRNLNDTRYMSKDVAKWLADCLPFPEDGRKHVFCVSGAATAFMRGIWRIGILDDAGKKNREDDRHYAVDAAVIAACTSSIVKGIALISEEHATKRDADRLLDGSLPYPEYRDQVKAWIPCIVPTYSPTRTATGALFKDNTFSYKGIDGKGKDLIKKKKGALGPCTTAWKDGKGTARAYDEQYSLLAVYEESAARWLFDPLYYIDVQKRKTEEPFIRKFSKDLSIDYWEKIPLTGNEPSLLLKRGVVLIQDGIVGRYYGYDIAHNNVKLSPSGKVSFQKTGPLAAEKFPTPTKWTDELRIMQEDCLGLCWLEFLTERANHC

SEQ ID NO: 1604 - protein, 1026 aa, unidentified
  REGION 1..1026: note = Description of Unknown: Cas Enzyme sequence
MAAYEDPCDCGFDPELVKTALMSREQFGSKPRKLVLGINMGIAGIGVCLMDELNQEIVLMATHLFDCPWNPKNKTSLASARRQARSQRRNIARRAARKKHISKILMAHGVIPEGASSEWFSVRKGEQDNIQLRVKGLSEILSSRELARVLYGFASRRGYIDHGKADNDKDAGKVKKALKENAEIMDANGYETFAQYLITQPKIRNRQDDYIHCVDIDMVVDEVHAIFRHQRELGNGLATESLEGEYLAALRWLTDTTKRDRIIYSKVGYCTYLGEPIKRGPKSSISSEMVRAYQTLANVKIEHIGSVATQISPLTRNQIVHDMFKVSKNPKPLKWSQLRKKLALADTDTFAGIRQSDEAKDVCVKVPAWNVLCSTLHDLNPALLNRLHDDVDLADAVCAAATFASSSEAFATRIAELTDGLSKEDVDALLELPYGSKLFTGYGSTSLKALQMLRDAFEDTNINRLYDAEVATGLYDARKALSAKRNVTDDGLLKPYSSYSPICTNPVVLRSCARLRRIINSVIRHYGLPDTIRVEVAKELKRTTHEKKLVDDGNKYNKREKEKAVDDIVEYLGLSDADQVRGRDIDKVRLYNEQGGKDPYTGQGIDFGRMLTEKGYVEIDHILPFSRSCDNARTNKVLVLTKSNRDKSNRTPYEWMTSGEPTAPNWDEFCIRMDVWASGKEPKHYYSSKLAKLKEDNFTNNIDSFISRNLNDTRYMSKDVAKWLADCLPFPEDGRKHVFCVSGAATAFMRGVWRIGILDDNGKKNREDDRHYAVDAAVIAACTPSIVKDIALISEEHATNRDADRLLNGSLPYPEYRDQVKAWIPCVVPTYSPTRTATGALFKDNTFSYKGIDGKGKDLIKKKKGALGPCTTAWKDGKGTARAYDEQFGLLAVYDESAARWLLDPLYYIDVQKRKTEEPFIRKFSKDLSIDYWEKIPLTGNEPSLLLKRGVVLIQDGIVGRYYGYDIAHNSVKLSSSGKVSFQKTGPLAAEKFPTPTKWTDELKIMQEDCLGLCWLEFLTNRAVRC

SEQ ID NO: 1605 - protein, 1038 aa, unidentified
  REGION 1..1038: note = Description of Unknown: Cas Enzyme sequence
MMEYSDPRDFGFRPETVMTALMPYEQFSSKTRRLILGIDMGIASVGVCLIDIRNHEIILMASHIFKAPVEGKQKDISARQSGASIRRGYCSVRRTTKRRKNRKKAVREIEKKYSLIPDDADGQWFAIRKGEPDVFHLRGKALIYKLNGRELARILYAFADRRGYIDHGKGTTDDDSGKVKKALSVNHKILDENGYETIAQYLLKQPTSRNREGDYRYMVDIEMVTDEVHTIFRHQRDLGSDIATEELEGEYLSALRWLTDTSARDEKIYNRVGYCTYLGAPEKRAASSLISFEMVRAYEKLSNIKIEHQGREATYISPEKRNEIVESLFAVSKNPKPLKWSQLREKLGMQSSDSFDSRLPADEKGDCIKIPAWNALCTGLFTSNRALLDRLHDDTDIADAVCSALTYASSGESLRNALENLSLDLSEQDIDSLLDLPYASKLFSGYCSTGVHALQMLRDAFKDPQIEKLYDAEMATGLYEARQALAAERNENKDGLLCPYLEFDPTCTNPVVLRATAQVRRMINSIIRHYGLPDIIRVEVAKDLKRSKHEKAIIAATNKANKDSNEQAKKDLVAFYGLPNDAHVSSADFEKMRLYREQFGQDPYTGKGINLERMLNDRDYVEIDHILPFSRSCDDSKSNKVLCLTKSNRDKANRTPYEWMTSGEPSAPDFGDFCRRMDAWAGKGKSAHYTKSKLSKLKNSTFGKEEQKFIDRNLNDTRYMSRQLAMWVRECLPFPDDKRQHVFCVAGAATSLMRRIWGIGIVDEKGKKDRSDDRHHAVDAAVIACCDQGIVKGVARVNSGRSNIKERERLRYESMPYPEFKDQVEAWIPCIVPTRTVSRTATGSLLKDTVYPYVGVDDRGKDLYRRNGKIEPASTLWKDGSGGCKLYDGVYGLMAVFDENMKKSGRWRFDPVYYIDVPNIRQDFIRDFSKDFSIDYWPKVQLKGDEPRIFLKQGDVLLQDGCAMRYYTYNVADGGVRSYSKIGEKSVPLQKTGPLSIEPFPKQAKWNSSLTVMQEDCLGLCWLKFLSDRVGQFENSPV

SEQ ID NO: 1606 - protein, 1041 aa, unidentified
  REGION 1..1041: note = Description of Unknown: Cas Enzyme sequence
MGVRILGIDLGIASIGWGIIETDTQKGEIIAAGVRMFDAPLVDKTGEPKSAQRRTARGQRRVIRRRRQRMNAVRHLLHANGLLPDAKSTALHDALRRVSPPSIHPPVSPWTLRAAAFVRALTGDELAVVLGHIARHRGFKSNSKSESSANAPDETSKMKKAMEVTREALAKYRSFGEMLALDEKFADRKRNRDKDYSHTAKRSDLEDEVRSIFAAQQRLGNPLAKDELSDAFSNAAFFQRPMQDSEKLVGKCPFEPGQLRTARRAPSFELFRFLQRLTNLRIAVGRTERALTKDEITLAIKGFGDAKTVSFSSLRKVLDLDPNARFAGIPKDKESKLDISTRTGGAAYGTKTLRDALGDAPWQSLAKTPEKLDRIAEVLSFREDFGSIEVGLEEIGLNEIIVKKLLESAALGEFKDFTKAAHISALACRKIIPGLREGLTYSDACAGVDYDHSARAATSLDSINSPVTRKAFSEAIKQVREVSREYGPLDLIHVELARDVGKSAEERQKLQDGIEKRTAEKERRRNEAAELLGRPVSDDELLRYELAKEQNFKCIYSGDAIDPKGIAANDARYQVDHILPWSRFGDDSYINKTLCTARANQNKKGRTPFEWFEADRSEIEWMEFVARVEELKEVKGRKKRNYTLKNAADIEGKFKARNLTDTQWATRLLADELKRIFPAQDGERRVFTRPGAITSKFRRAWGLEGLKKQNGKRSPDDRHHAVDALVLAATTEALLQSMTNAVQQREREGKQDDIFHAQQPWPGFRVDVGCCIYGDAEKGKQGVFVSRAVRMRARGKAHDATIKQIRKIDNKDVVLERKPVEKLTEKDLDLIPTPAPYGKIADPKKLRDELVESLRAWIVAGKPKDDLPRSPKGDPIRKVRIKTNDKIAVAINGGTADRGDMARVDVFQKINRKGKPDFYVVPIYPHQIATMETPPDLAVTAAKPEAEWPRIDSSFDFAWSLNAMDYVEAIKSGGEVIEGYFRGLDRATGAIGISPHFTNKEIAKGIGVRTLISFKKFTVDRLGRKHQVSREVRTWRGKACT

SEQ ID NO: 1607 - protein, 1020 aa, unidentified
  REGION 1..1020: note = Description of Unknown: Cas Enzyme sequence
MRILGLDGGIASIGWALIDIEDGAGQIVAMGTRMFDAPETDKERAPTNAVRRGHRGQRRVIRRRRQRMNQVRHLFAQHGLLPDSKSDSLRRPGLNPWEQRVRGLDHHLAGEELAVALGHIARHRAFRSNSKADRQNAASDSSKMLKAIATTQERIAGYRTIGEFIAKDAEFQARKRNRGGDFSRSLLRADLESEVRTLFAAQRWLGNQLATEELQESFATIAFTQRLLQAADHLVGDCPFEAGEKRAARRAYSFERFRLLSRLAHMAIASGRSERRLTPDEIRAIADDFGDRKKITYRSVRKLLGLTDTDRFTDANPEEETRDIVARSGNAAEGTATLRAALPEASWHALLATPEKLDAIAAVLSFRDDLAQIRQGLDGIGLDPLLTETLERAAAEGAFAAFKGAGHISAKAARALIPYLAQGNVYSEACTAAGYDHAARPATNLDDIRNPVARKALGEMLKQVRVIVHEFGLPDRIHVELGRDVGKSAEERDEITRGIEKRNKERDRHRADFAELLGREPLTVEEMIRYELWKEQGGRCLYSDAAISPAALAATDNTVQVDHILPWSRFGDDSFVNKTLCTARANQQKRGRTPFEWLGDDEQSWQAFTARVEGCKSMKGRKKKGFYLRRNAAEVEEKFRNRNLGDTRYATRLLREFLARLYPEDLRQVLARPGALTAKLRRAWGVDDLKKDSSGKRLPDDRHHALDALVLAATSESMLQNLTRAAQAAERSGAPRGFDFNHVQEPWPGFREDARTSVAAVFVSRSERRRARGEAHAATIRQVRERDGKTIVYERKAVESLKRSDLDRVKDADRNAALIGSLRAWLEAGSPKDAPPLSPKGDPIRKVRLATDGKPAVVMRRGAADAGRESTADRGEMARVDMFAKADKRGRVQFYAVPIYPHQIASKEDWPQPPDRAVVAFKSEDQWTIIDKGFSFRFSLYQNSLIEMIKPDGEVLRGYFKGMDRSTAGIAIGSPENPRKMSRGVGSKTLVSFRKFAIDRLGRISEIPRETRTWHGVVCT

SEQ ID NO: 1608 - protein, 1060 aa, unidentified
  REGION 1..1060: note = Description of Unknown: Cas Enzyme sequence
VGDRQRILGVDLGIASCGWGVIEIGNGAAKIVGAGVRCFDPPLVDKTGEPTSAVRRAARGHRRVIRRRRQRMNAVRKLLHKHGLLPDSSTDALSQALRRISPKGTTPQITPWTLRAAAHNRLLANDELSVVLGHIARHRGFRSNSKSGARANAADETSTMKKAMEATRESLAKYHSFGDMLANDPRFADRKRNRSKDYSHTAKRCDLEDEIRLIFAAQRRFGSAVATGELAKTFCNAAFSQRPLEDSEGKVGKCPFEPDQKRTARRAPSFELFRFLSRLASLRITVGPAEPRALTRDEIALAAKGFGQSKKSITFKSLRDALDLDPNARFAGIAKEKESTLDVAARTGGAASGTKTLKDALGDAPWKSLIKTPEKLDRIAEVLSFREDLDNIRKGLDQIGLDTTVVQCLVDAAARGDFTDFSRAAHISALACRNIIPGLRDGLVYSEACARVGYDHAARPVITLQQIGSPVTRKAFGEAIKQIRAVARECGPIDLIHIELARDVGKSAEERREIQDGIERRTVEKERLRAEAAEHLGRAPRDDELLRYELAKEQNFKCIYSGDPIEPASVAANDTRYQVDHILPWSRFGDDSYINKTLCTAKANQDKRDRTPFEWFQAEKTEAEWMEYVARVESLKEVKGRKKRNYVLKNAAEVEDKFKTRNLTDTQWATRLLADEVRRMFPAPEGTRRVFTRPGAITSKLRHAWGLDGLKNLDGKRVPDDRHHAVDALVLAATTESLLNRMTKEVQQREKEGRQDDIFHVHPPWPTFRTDVNQAVYGENGAGGAFVSRAEHKRARGKVHDATVRQVRGTDGKKLPNKRPHEIEGVKIVYERKAITDKNFKESDLEKIPVPAPYGKVGNPKKLRDEMVESLRRWIKNGKPKDDLPLSPRGDIIRKVRIATDRKVAIELNGGTVDRGDMARVDVFRKKNRKGKWEFYVVPVYPHQIATMEQPPNRAVVAYKDDEEWAQIDSTFEFLWSLTSMSFIEIRKTNGECIEGYFRGLDRSTGAASVSVHTTLEKHGLSTGIGIKTLASLKKFTVDRLGRKFEVLGEVRTWRGKACT

SEQ ID NO: 1609 - protein, 972 aa, unidentified
  REGION 1..972: note = Description of Unknown: Cas Enzyme sequence
MNAVRDLLHRHDLLPNANRDALALALKRISPPGQRPQITPWTLRAAAHDRLLTNDEFAVVLGHIARHRGFRSNSKREAVTNAADETSKMKKAMEQTREGLAKYRSFGEMLANDPKFAERKRNREKDYSHTAKRSDLEDEVRKIFQAQRRLQNPCASEELERQFIDKAFSQRPLQDSEDKVGNCPFEPDQKRTSKRAPSFELFRFLQRLVNLRIAVGRAERPLTPEEIGVVVKKFGEQKTYTYKTLRKDLDLDPNARFSAVARDKENIDIAARKGQSAYGTCVLREALGEAPWQSLQRTPEKLDRIAEILTFREDLASIRNGLNEIGLDQLVVDRLLEAAEQGAFAEFKGAAHISALAARNLIPGLREGLGYPDACARVGYDHSARPAVSLDQINSPVTRRAFAEAIKQVRAVAREYGPFDAIHIELARDVGKSAEERAEITNGIEERNAEKDRRRTEAAELLRRAISDGELLRYELAKEQNFKCVYCDGPIAPTGFSANDTRWQVDHILPWSRFGDDSYFNKTLCCAKCNQDKRGRTPFEWFESEKTEKDWETFVARFESLKEMKGLKKRNFKLRDAAAVEEKFKERNLTDTKWVTRLLADELKRMFPAAEGKRRVFTRPGAITAKLRRAWGLEGAKKENGERMPDDRHHAVDALVLAATTESLLQRMTKEIQKRELEGRADDIFHVREPWDGFRREVMRTVFGENGVGGVFVSRAERRRARGKAHYATIKQIREIDGEQVVFERRPIEKLTEKDLERIPVPEPYGKVADPKKLRDQTVEALRAWIKAGRPKDKLPRSPKGDIIRKVRVATKDKVALEINGGTVDRGDMARVDVFRKLNKRGRPNYYLVPIYPHQIAMPDKFPSPPDRAIVAHKEENEWTAIDNTFEFLFSLSLHDFVEVTKPDGEAIAGYFKGVDRAGGSITLADHCNLQAQTRGIGTKLLADFRKFTIDRLGRKFEVPRELRTWRGKVCT

SEQ ID NO: 1610 - protein, 1068 aa, unidentified
  REGION 1..1068: note = Description of Unknown: Cas Enzyme sequence
MGERQRILGIDLGIASCGWAVIEVGEKQGQIVSAGVRCFDAPLVDKTGEPKSAARRGARGQRRVIRRRRQRMNAVRALLRRSGLVPNDGKDALAEALRRISPKDRRPQLTPWQLRSAGYARALSADEFAVALGHIARHRGFRSNSKREASANAADETSKMKRAMEQTREGLARYHSFGDMIANDEKFAVRKRNRDKDYSHTAKRSDLEDEVRLLFAAQRRFGNPLATAELEAEFIPAAFNQRPLQDNDDKVGPCPFELDQKRTARRAPSFELFRFLSKLATLTISVGRVERRLSPEEITIAAGEFGKNKSFSYTALRKALDLDPNARFSGIARDKEKLDVAARSGAAAEGTHTLRKVLGDAPWQSLSKTAETLDRIAEILSFREDLNSIRTGLEESGLERLIVDQLMTAAGEGAFNEFTKAAHISALAARNIIPGLREGLNYSEACARVGYDHSARPAVALKDIGSPVTRRAFGEAVKQVRAVTREYGPIDVVHIELARDVGKSAEERREITDGIEARNAEKDKRKQEAADLLKRAISDDELMRYELAKEQTFKCVYCDGEIAPNGFASNDTRWQVDHILPWSRFGDDSYRNKTLCCAKCNQDKRGRTPFEWFESDKTEKDWDTFVARCESLKEMKGLKKRNFKLRDAASIEDKFKERNLTDTKWVTRLLADELKRMFPAPAGTQRVFTRPGAITSKLRRAWGLEGLKKVSGERVSDDRHHAVDALVLAATTNSLLIKMTKEVQAREKKGRQDDIFHVQQPWPGFRLDVTRIVYGENGSGGVFVSRAERRRARGKAHDATVKQVKVRDGETIVYERRSIEKLSEKDLLRIKDAERNHRLVEVLREWITAGKPKDKPPIWKYSSGSGAFRQEPIRKVRLATNDKPTILLNGGTVDRGDMARVDVFRRANKKRKWEYLVVPIHPHQIATMDSPPNRAVKGGGGEEAEWILIDETAEFLWSLHSMSFLEIVKSDGEVIEGYFRSFDRNTGAITVSPQITAAEIRKGIGVKTLASFKKFTVDRLGRKFEIKREQRTWRGKTLSPAENVARIPLAYRVSSPDGMERPASDAAE

SEQ ID NO: 1611 - protein, 973 aa, unidentified
  REGION 1..973: note = Description of Unknown: Cas Enzyme sequence
MNRVRELLARHGALPVAERNALAEAARRLAEASGESGASPWRLRAAAHDRALSNDELAVVLGHIARHRGFRSNSRREAGANAPDETSKMKKAMEQTREGLAKYRAFGEMIADDPKFAQRKRNRDNDYSHTPKRADLEIETHKIFAAQRRFGQQTADEALESDFADLAFSQRPLQDSERMLGECPFEPSEKRTSKQAPSFELFRFLSRLITLRLTAGRTERPLSAEEIVRASRDFGQVTKGVTFTALRRKLDLDPNTRFAGVPADREKYDVAARKGDAAAGTCALRQALGEAPWASLARTPEKLDRIAELLSFREDFTRIADGLREIGLDPLVNQQLLDATRDGAFSHFGGAAHISAKAARAIIPGLKDGLDYSEACARVGYDHAARPTVALKDINSPVARRAFLESIKQVRAILHALGPIDEVNVELARAVGKSAEERAKLSQGIDDRNKEKDKRAEEASDLLGAAVSVDELLRYELCKEQNFKCVYCDAEIAPTGFSANDTRYQVDHILPWSRFGDDSYRNKTLCCVACNQHKRGRTPFEWFDADKPPGEWEAFAARVEGYKEMKGLKKRNFKLKDAAAVEDKFKTRNLTDTQWATRLLADELKRIFPSQDDKRRVFARPGAITSKLRRAWGLEGQKKVDGARVADDRHHAIDAIVLAATTEGLLQWMTKQVQQRERQGRGDDIFHVVPPWRGFREDSIRAIYGEGGVGGVFVSRTERARARGKAHDATIRQIREIDGEEVVFERKAIEKLTEPDLDRIPVPAPYGAIVDPKSLRDATVAALRAWIAAGKPKGEDKLPRSPKGDIIRKVRVESKNKVGIRVNGGAVDRGEMARVDVFRKANKKGVRQYYLVPIYPHEIATMETPPMRAVVAYKDEGDWPVMDSTFEFLWSIESMAFLQAVRPGGEVIEGYFRGLHRGTGAIALSSHKNSDELVAGIGVKTLASFKKFRVDRLGLSRTEVTREVRTWHGKACT

SEQ ID NO: 1612 - protein, 1030 aa, unidentified
  REGION 1..1030: note = Description of Unknown: Cas Enzyme sequence
MRILGLDGGIASIGWALIDDGDGDSAAGRIIACGSRCFDAPETDKERTPTNQIRRQKRAMRRVIRRRAQRMAEVRRLFVAHGLLAGAGRDALRPDALKTGADPWTLRAEGLTRALSGAELAAALGHIAAHRGFKSNSKRDRGANAADETSVMKKAIEVTRERLGQYRTIGQLFARDQAFAERKRNRGGDFSRSMLRDDQAAEVKVLLEEQRRRGNGLATEALEEAYVAAAFFQRPLRDSDDLVGDCPFETGEKRTARRAYSFELFRLLSRLNALTLTWRGGERRLSAEELAAVAGDFGSTKKITFKAVRKALDIDPAVRFDGVKAEEEGGDVVARSGNAAEGTATLRAALGAAWAGLVGRPEILDRMAEIITFRDDLYSIRTGLGETGADTAAVEAVMAAVEAGRFQSFKGAGRISAKAARAIIPGLRAGLVYSAACAEAGYDHAAPGKVKLEDIRNPVARKALGEMLKLVRAVVRAHGLPDQMHVELARDVGKSAEERDEITRGIEKKNKERDRARLRFAELLGREPRGEDMLRFELWEEQNGRCLYTDAEIPVRLVSASENGAQVDHILPWSRFGDDSFVNKTLCLAQANQAKKGRTPWEWFQAEKSEAEWDVYVAAVEGCKGMKGRKKRGFYLRKNAAEVEEMFRNRNLGDTRYTTRVLLEVLKGMYPADGTVHVRARPGALTSKLRRGWGLQGLKKGEDGKRIEDDRHHALDAIVLAATSERQVQQMTKAFQDAEQKGSAREFAGEFVQAPWTGFRLDAEAAVAGVFVSRPERRQVPGEAHAATIKRVRTGDDGAAVVSVRKGVEALTEKDLEKIPVPKPYGRISDPAKLREALIDAVRAWWAAGKPKDAPPRMPNGDVIRKVRVDTTDKVAVAVRGGTADRGDMARVDVFREVDAKGRTRFHLVPVYPHQMVGMERVPDRAVVAYKGEDEWTPVDRPGFAFLFSLYQNSLMEAVKPDGEVITGYFKGLHRGTGAINIASMTSSRDITAGIGAKTLHSLRKLDITRLGSMSEVQQETRTWRGAVCM

SEQ ID NO: 1613 - protein, 1061 aa, unidentified
  REGION 1..1061: note = Description of Unknown: Cas Enzyme sequence
MGERKRILGIDLGIASCGWGVIEAGENEGEIIATGVRCFDAPLVDKSGEPKSAQRRVARGQRRVIRRRRQRMNAVRKLLHQNGLLPDASSNALHDALKRISPKGAHPPITPWTLRAAAHERALSNDELSVVLGHIARHRGFRSNSKSEGNANAADETSKMKKAMEATREGLAKYRSFGDMLANDEKFKDRKRNRDKDYSHTAKRSDLEDEVRTIVTAQRRFGNATATDDLAKTFSETAFTQRPLQDSEKLVGKCLFEPDQLRTARRAPSFELFRFLQRLAHLRISVGRIERPLTQEEIALASNGFGETKKTITFGSLRETLDLDPNARFAGIPKDKESKLDVAARTGGAAYGTKTLKDALGDAPWQSLVKTPEKLDRIAEVLTFREDLDSIRKGLDEIGLDRMIVQCLLDAAAKGDFKDFTRAAHISALACRNIVPGLREGLVYADACARVGYDHAARPSVQLTEIGSPVTRKAFGEAIKQIRTVARAYGPIDLVHIELARDVGKSAEERREIQDGIEKRTAEKERRRGEAAEHLGRAVSDDELLRYELAKEQNFKCIYSGDPIEPKGVAANDTRYQVDHILPWSRFGDDSYINKTLCTAKANQDKRGRTPYEWFDAEKTEPGWMEYVARVEALKEVKGRKKRNYTLKEATEEVENRFKTRNLTDTQWATRLLADELKRMFPAPEGERRVFTRPGAITSKLRRAWGLEGLKKENGERVPDDRHHAVDALVLAATTESLLQLLTKKVQQREKEGRQDDIFHCNQPWPGFRIDVERAVRGENGTSGVFVSRAERHRVRGKAHDATVRQVRGADGKKLVNKTPSEINGEKIVYERKLITDKGFKESDLDKIPIPAPYGNVADPKRLRDEMVESLRAWIGKGKPKDDLPRSPKGDIIRKVRVATDKKAAIELSGGAVDRGDMARVDAFKKSNKKGKVGYYLVPIYPHQVADPQKWPDPPNRAIVAHKEEEEWTPIDSTFEFLFSLSIHDYIEVAKSDGVFIGGYYKGVDRAGAQITVAQHNDLQSQTRGIGSKTLFAFKKFTIDRLGRKFEVSREVRTWRGKACT

SEQ ID NO: 1614 - protein, 1090 aa, unidentified
  REGION 1..1090: note = Description of Unknown: Cas Enzyme sequence
MGERILGIDLGIASCGWGIIEKDRTNGRIIGAGVWEWDSPESPDKKKSNLSERGAVRRRRRLLHVRRERMRKVKELLVEFAAIKRASRNALSISGLNPWRLRIAALDRKLESEEWSVVLGHLAGHRAYLSNAKRKKNEPDDDTKKLLKALTENEREFEKARAEGIARTIGEWLAIKDKQRNRGGEFRHSIKREWIRQEAATIFERQRKFENPLAFTSLENRYFPLAFEQGQITAPPVSDCTFEPSEKRAAKHSYSFERFRLLQRLTNVRIVANTSEPPRRLTESEIRLIESKLGVQPTISYKTLRKALGLSSGESFLRINDAEQEEQDIVTNTKSGQSAPGTRALRTVIIRNFKESEWKSMLAKPAFVDAIASAIAHRDDLELIRAELKKVEVKPEIVETLLKESDGGELGFFKGTGHLSTKALNKLIPHMLEGLDYHDAQIAAKYDPSMDRYSRRPGIVGSGPNAVATWLKKDQLEELIRNQVVARAIRETFKQVLSLWRAEGPFDAIHLEMAREVGKNAAERDEMDRENKRRRDRRNALRESFIDNFRKKPTDREFERWTLWTEQQGKCPYTPYNYAGIPCDAVLDGDERVEVDHPLPRSRFNLESLDNKVLCLTGANRNKRNQTPYEWLSKGQEKLNWESFCEQAKIIFLARQRKLNNLLIVDTTKLEKSLSSRALNDTRWISKFLLAGFERLGTKDQPLRVQPVNAALVASLRWAWGLAGWKHDPKDRSKRQSDDRHHALDAMIVATIDAKLVHRLTGAYQRAEERGEYFEARCFKPPWKGFREELLGRLYGDGAAQARPNEFTPDSTTGVLVSRSERRRARGQMHKETTYRLTKVVSEDTGVLKQYRVVRTTVNEKLNLADLERLKDPDRNHKLLELLRDWIKKGNPTDDLPVWKYSMPDGSIRFEPIRAVSLIANEGPAVVPRRLRKIEQDNEVAFATYDRIEMVRIDVYENSNAAAKARYSYVPIYVHQIVEATPPNRAFTLRRPYEEWPAVAGDDKFLYSIYKFSLMQVEADGKLPLLGYFRGLDSNDGRLKFTPQYSRDEKLAIRYSPTTVTAIQKFTVDRLGCRHRVTREVRTWRGKACT

SEQ ID NO: 1615 - protein, 932 aa, unidentified
  REGION 1..932: note = Description of Unknown: Cas Enzyme sequence
LRAAAHERRLTNDELAIALGHIARHRGFRSNSKSEGAANAADETSKMKKAMEQTREGLAQYRSFGEMIANDPKFADKKRNRDKDYSHTAKRSDLEDEVRAIFAAQRRFGNAAASEELQEAISRAAFDQRPLQDSEKLVGKCPFEADQMRTARRAPSFEMFRYLSRLKNLRLTVGRTERELTVEEIALAADGFGEGTKTITFKALRKLLDLDPNARFQGLPLDKESQDVAARTGGAAYGTKTLKDVLGDAPWRSLVKTPEKLDRIAEILSFREDFGSIRQGIEETGVGSLIVDQLVKAASEGAFKDFTRAGHVSALACRNIIPGLREGLVYSDACARVGYDHAARPQTDLKDINSPVTRKAFSEAIKQIKAVAREYGPIDYVHIELARSVGKSAEERKKLTDGIEERNVEKEKRRKEAAECLGRAINDDELLRYELAKEQNFKCIYSGDAIDPKGIAQNDTRYQVDHILPWSRFGDDSYINKTLCTTKANQDKRGRTPFEWFEADKSEDDWTAYAARVEALKEVKGRKKRNYVLKNAADIEEKFKARNLTDTQWATRLLADELKRMFPAPEGTRRVFTRPGAITSKLRRAWGLEGLKKNEAGERVADDRHHAVDALVLAATTESLLHNMTKEVQKREKEGRQDDIFHVAQPWPGFRLDVVRTVRGENGDGGVFVSRAERRRARGKAHDATIKQIREIDGAKVVFERKAVEKLTEKDLDLIPVPAAYGNVADPQKLRDEMVESLRQWIAAGKPKATLPRSPKGDVIRKVRVETKDKVAVPINGGTADRSDMTRVDVFQKSKKTGKPSFFLVPIYPFQIADGLRYPNAPDRAVMAHKAEALWNVIDSSFNFIFSLTLHDYIEIVKSDGEIIEGYFKGIDRASSSITVADHKNMQSQNRGIGSKTLSSFKKYRIDRLGRKFEVLREVRTWRGKACT

SEQ ID NO: 1616 - protein, 1021 aa, unidentified
  REGION 1..1021: note = Description of Unknown: Cas Enzyme sequence
MRILGLDGGIASIGWALIDETEERIIACGSRCFDAPETDKERIPTNQIRREKRAMRRVIRRRRQRMALVRTLLERHGLLPDSGRDALRLGIDPWQARSAGLERVMSDAEFSVALGHIAAHRGFKSNSKRDRGANAADESSKMLKAIGETQQRLGQYPTVGAMFANDPEFASRKRNRGGDFSRSVLRDDQAHEVGKLFDAQRRLGNEKASVALEEDFTKAAFFQRPLQDSDALVGPCQFELDQKRTARRGYSFELFRLLSKLNTLTLTQLGSEPRRLRADELAMLTESFGKQKKISFTSIRKLLELDRSVRFDGIAADQESADVVARSGNAAEGTGTLRTALGEAEWARLLATSDILDKIAEIITFRDDTGSIRQGLTDAGASPDAVIAIMAAIEAGRCREFKGAGHISAKAARAIIPGLYRGMVYSEACTEAGYNHADRAVVDVSDVRNPVARKALGEMIKQVRAVVAKYGLPDRMHVELARDVGKSAEERDEITRGIEKKNKERDRARDRFREALGREPHGEDMLRYELWEEQNGRCLYTDEAIPVTWVSASDNRVQLDHILPWSRFGDDSFINKTLCLAQANQQKQGRTPFEWFSAEKTADQWEVFARAVEGCKSMKGAKKRGFYLRKNATEVEERFRNRNLGDTRYATRVLLGLLARMYPQDGTLHVLARPGALTSKLRRGWGLQGLKKGPDGKRLEDDRHHALDAIVLAATSQSMVNRLTRAFQEAEKQGLAREFAGSHVEAPWPGFRLETEAAVAQVFVSRPERRRVPGEAHAATIKQVREVDGDQVVFIRKNVEALTEKDLALIPIPVPYGRISDPAKLRNLMLDAIRAWWANGRAKDAMPRMPNGDLIRKVRVATGDKVAVSVRGGTADRGDMARVDVFRELDSKGRTRFHLVPVYPHQIATMVAPPDRAVVAAKPEEEWTLIAGSRFLFLFSLYQNSFVEITRQTGEVIDGYFKGASRSTGSISIADTKSQSTITSSIGAKTLLAVKKFEVNRLGLKSRVEQEARTWHGAVCT

SEQ ID NO: 1617 - protein, 984 aa, unidentified
  REGION 1..984: note = Description of Unknown: Cas Enzyme sequence
MGKRFSFDLGSASVGWAVFEAEGHAVIQLLDAGVRVFDEPRNSKTLESNAAERRRARSLRRQIRRRKTRRTLLIRLFKEYGWLEQSINPPYGFSENPYRLRKEALERLLSPLELAEVFFNIAKRRGFRSNKKTDAFNTELIKMSASANLLVQSMNELGHRTLGEHLNHLYLNTLNGEVQDRKRIRGLSTLRKMYEDEFHLIVETQKKLGTQLLNESQIEDLKKIIFFQLPFELQIERRLKTIGKCPLEKGEVRAYRHDPIGIEFRIRAIVNNMEIIDPTNNNSQNLAPNQREELAQALLENAKITFPKIKKLIKVSDQYQLNYEAERQKDINGDPFYSTVINILGIKNSSQHKEDIQRICKNYHASNSIEDFEFRFQSLNLPFSASREKFQEIYEKMPSGEGGTFAYSSLAMSKLLPLLREGKSEHEAKQTVYPADIDSKVYDLLPLPLDKITNPTVNRTVHQFRRVYNALIKVYGKPETIVIELAKEIKLPKWKKDEISFQQRKIEKNREAIKEKIKEDGFDPTYNLVLKFELAESQGFQCPYSGKSFGRAEIYAENVLQVDHILPFSRSLDDSRMNKVLTFAEENKDKSDRTPGEWKTDELYSQMIERVCKMTFPWAKKWRFYNNAKADVESFISQQLNDTRYASKYVREFVGLTFPVSERKRRIASLRGSHTALLRKLWGIEKNRDDHRHHAVDAIVVGLSTPKIFHALSRSLNRKADRLEITQPYPNFQTDFKRILESMIVSRMQSKKKSGALHEATTSSLMRESEKKGYVLVSHRVKLEDLTLGQISNIKDDAIRVLILERLKNHGYDGSDKELGQSLLSQKILSGLTMKSGVPIRRVRIQERKKGRILSSKKDARTGKIYGSVANGGNYSISLFSPDSNQKKIRAELTSLRHVALKDVPKVSDLTLHKTDAFEIKDFGVAYVRSISLNISDGPDVSFDLHFSSNSKKLGIDYKRYTNASRMMKELKPINISVLGKKIE

SEQ ID NO: 1618 - protein, 1080 aa, unidentified
  REGION 1..1080: note = Description of Unknown: Cas Enzyme sequence
MTMTPETSPYILGLDIGVASVGWARVACSPDGKAERLLAAGSHLFEAGTDGGKSGLEGIARGTDTPRNKERRDARLMRRQAWRRARRKRKLLTALIRHRLLPDPAVLGLGACLDLRRPLDIDAYMKKLDAGLTARWIALRAATGEGGHADQQRICYLLREAAARGPVERHELGRALYHLAQRRGFLSNRRADAKKKEEDAGVVEKAIGELANKIEAFAAAGGTPTLGAYFASLNPDEERVRRRWTARPMYQAEFDRIWATQAPAMGLDDDARTEIRRAIFWQRPLKNQSNLIGRCSLIPKEKRCPIAHRLYQRFRVLQALNHLQIAPPGQSPRIPNLDERESLLAALLTEGDLSFARVRKLLGVKRGVAFNLERGDEKRIVGHRTDTKLRAIFGERFESFSEADRDRMVEDLRSFRVPEALSRRAVRKWELSQEAATGFAAIDLEEGYAPHSLAAIRRLLPHMEEGLPYGTARKVEFPESFRSVEAVNELPPVLKAVDDLRNPAVARALTEVRKLVNECVRRHGKPVMIRIELAREIKNPRKVRERITKNMRDREKARAGVAAMIQKEAGIARPTRDDIERALLAEECGWVCPYTGKQIGWDTLFGPHPQFDVEHIWPRSRSLDDSLMNKTLCYHEENRARKRGMTPREAYGGNAERFEEIIARLRLWKADPFLKAAKIARFKAESIPEGFTNRHLSDTRFIARTAADYLGLLYGGRVEAGASDDAPGTRRVEVCTGGLTAWLRSGWGISGLLGDSPDKNRADHRHHAVDAVIVALTDARAVQTLARAATEADRLGKQRAFETIDAPWTGFREDVQRTIDAVIVSHRQSRKVTGSLHDQSIYSRPVGPNGEHRIRKELQKLTVSEIRDGKIVDKRALDAITAKLIELGKPEPTPQELTKIFADPANAPLVMGHEGRLVRLRKVRVCAGTGRRIGRDDRGTGRWVQPSNNHHTLVVEVTDSNGRVRWEDRPVQLLDAYARQASRLPIVERSVAEGERFLFSLAPSEFVEMDTPDDPSRRAVYRVASISQGDNELKMHSDGRTADELRKAKARVRASGEKLRQLNARKVRVTYLGEVVNAGG

SEQ ID NO: 1619 - protein, 1116 aa, unidentified
  REGION 1..1116: note = Description of Unknown: Cas Enzyme sequence
MNTNYLVGKYSPLTKLPQTFPTQVDDELFCGIDIGVGSCGVALVSTASNKHVIRGFEGLPGQLTFMGIRAFDLPEEKTTAGISLKNPDRRQKRLMRRVLDRRAQRIRSIKNLLVECNILPKEYNFKDDEWRGRHESATPWRWRVQALTRKLSSWEFAVILIHYAKRRGFKSAKKSDLESKGSEGGTLQSSRANHAALEHYDTVAEMLLNDPRFAISKTDDQATETRQRNHDGDYIAMVTRADVVDEIHKVFSQQRAFGNEHASEEFEQQYLEQLNKQRAMQDPVKLLGDCPFIPSEKRASVMCPSFELARALQKLNALQIISSENQKTMFSEWILQHGGYASFVSDFGRKAKITWGDLRKFWQLPSSYEFADLRSLPSKRNKNGEFEPELSPAEKERSDFSNRSNAGACAQGSHALRKVLGDKLWAQCLESDFAELDYAAFCLTFYEVVEEEGSQTTMLGAISANAKNHQLFEAIAQDLRSEKPTLHKFKGSASTSAALMRRLIPFLMQGQVYSMAMENAGFNHVKTDFSLDKITNPIVKSVLREAMKQIAHVFNEVGRLPGRINIEVARDVGKSIEERNELERGLKKRTTQKNINRETVAARKGCNEGDVTEDELMRYELYMEQGGMCPYSGLSLPNVENIYNADLQIDHIQPRSRSHDNSYDNKVLVYASANQNKGNLTPYEWLSSSASGWQEFQTRIAAIRGIRRGKRNRLLSETFAMQEPEFLERNLNDTRYISRLLLAYVNDFYRIVGEEPEGKGAVRRVYSIPGALTSLVRKAWGLENLKKNVDGNRVGDKHHAVDALVCACLSHGRAQWITRLSQAYASSIHLLTLRNLSTPWQNFRNDVVSALNQITVSRRERCGAGGALHQETNYGVVIDEHGKQTIYKRQNIIGKNSANKLEASFKTLADLEHIRGINEERSAWLKNALSAWIAVGSPLETEQLPRDPQGCLIRKVFVAQSRVKNVRKQNQGHVTSGTLVRCDVFSKAGKYYLVPIYNYQLASATPPMRAVVAAKDEDDWQMMDATYQFEFSLWKNSRFRFVDKKSRSTFQGCYTTINRNTGVIEFKLPDDYGADEKQSVSPKSTVVDFQKLNVDRLGRVFAVKKEKRVWRGVVCI

SEQ ID NO: 1620 - protein, 1046 aa, unidentified
  REGION 1..1046: note = Description of Unknown: Cas Enzyme sequence
MARILGLDIGIGSIGWAVVDTEAIDQTTGEVIEQFTIEGCGARCFEVPEEPDTKELKNKGRRLARGQRRVTRRRRQRLQELRRMLVQGRLPVPGEIGVGSASDLTWQLRLDGLERRLSPDEWARVLIHLAKHRGFKSVSKREALDNKSDAGKALQGIAQLQQAAAGYRTLGEALASDARFAGRKRNTAGDYSHTALRADVEREAARLFAEQRRMGNPAAGAELERRYMEVAFRQLPLRSSLEMVGRCRFEPAEHRAPKNAPSFECFRFLQTLNHLRIHERGSGPRPLSGSERERALLLFATVQRLTYKALRKRLGLAESTRFDGLAATKDPENKALGDFTGSVKLQEALGPARFTTLLQSDPAALDGAMSAIVFQSADEQVETELRRTGLSHADMEAVLGQLDRFAGLRGAGHVSALACRRLLPHLEAGHVYSEACRLAGYDHTALGQIDLKGLPNPVVRKVIGECLKQVRVLFREFGMPDRVHVEMARDLGKSREDRQEIYRAGQERGAERDRHRDQYAELVGRQPNDEELLRFELWLEQNHRCLYSGEYISPEQLMATDNSVQVDHILPYSRSGDDSFRNKALVMAKANQDKRDRTLWEWFGQSDAPRWQELETRIDLLRGRLHKEKARKLLLKSFAEREDAYRARHLQDTRYIIRVFRLLLEQHWPELRTRVEEERRIFTQPGALTALVRRGLGLDEAKRGGALGDRDHALDALVVAWTSPAVVKRLTDGAKRLELEARAKLVPELVADAREKERLRQAILAAAEAVFVSRPEVQRGRGPAHGDTLYAFTPNGDGSVTRYQRVPVAKLERKHLERLKDPERSRALKGAAEAWLTSAERAGCRPGKLEKYMAQNPLRMPSRNGADGPEVRHLTVELPGAIRGGMIIPRGQSRAHVDVATMVRVDVFSKGSRYFLVPVYAWQVADRMKWPQPPTRAIKQDTPESEWPVIDATFAFHFSLYPGALIEAARIDRTGRAVENHVGYFRTVDRSNGRVSYSLPSEFASEKQLRFKTKTLSSFRKFHVDRLGRRFEIMKEPRLWHGEVCS

SEQ ID NO: 1621 - protein, 1055 aa, unidentified
  REGION 1..1055: note = Description of Unknown: Cas Enzyme sequence
MLNSARGNATVDIKENLVLGLDLGIASCGWAVIDVSACAIIAMGSRTWDAPETDKERTPTNQIRRTHRGMRRVLKRRRQRMNAVRRLFAQHGLIDSRAATSLRIGQLDPWELRSAGLDRRLTGPELAIALGHIAKHRGFKSNSKRERGANAEGDAGKMLSAIKETASKLQNHGVVGEIPEVRYRTVGELFFKDADFGARKRNRDGEFTRSVLRDDQAYEVAALFKAQRAAGNAQASAELEASFTEIAFFQRPLQDSDALVGDCPFEPGEKRAARHAPSFERFRMLSRLAAIRVTEGREERPLTADQIARVDGTFGDQKGIKWARLRKLIGLKEETAFVGVSGEDEKKLDFVGRASNAAEGTAALRGVITDALGEVTWLSLLKAPERLDAAAAIVTFREDLDSIGKGLVETGLDSAVVAALMAAVEDGRPFARFKGAAHISAKAARAMVPHLLDGKVYSEAAAAAGYDHARRPDIDIETITNPIARKAVREALKQVKAIVMEYGLPGAIHVELARDVGKSKEERDEIRSGIEKRNRMKDRLKEEFARVVGRASSGREDLLRFELWQEQKGRCLYSDREIHPDMIVAGDNTVQVDHILPWSRSGDDSFTNKTLCFAKANQDKRGRTPFEWLGDNPARWEAFRAAVESNTTMKGFKKRNYLLRDSDRLTEKFRPRNLNDTKYATRLTLDLLARAHYPESDRFTGVPRSADEARRTRRLFARPGALTDRLRRAWGLQGLKKDDKGNRIADDRHHALDALIVAAMSESTLQQLTRAAQIEEERGSSRFIATFPQPWPGFREQAEAAREKVLVSRSERRRARGEGHAQTIRRVEDTIDGPVVYERKSIDALKPADLERVKDPERNAALIASLKAWIDAGKPKDHRPLSPKGDPISKVRLATTKKVDVLIRDGVAERGEMVRVDVFRKPNKRGIFEYFLVPIYPHQVFDPQAWPAPPNRAIQGGKDEAEWPDVSDHEFLWSIYPMSFLEIEKSDGTFIDGYFRGADRSTGAIHLSVHNSREQVIRGIGVKTLRVFAKKSIDRLGRRTDIASETRTWRGAACT

SEQ ID NO: 1622 - protein, 1020 aa, unidentified
  REGION 1..1020: note = Description of Unknown: Cas Enzyme sequence
MEILERRRFGIDLGIGSCGWAIVDMPYGSTSGSIVAMGSWLFDVPETAKERTPTNQIRRIMRGMRRVLGRRRQRMNAIRAVFKEYGLIDSDAKSVFHAARLDPWAMRAEGLDRRLTPLEFAVALAHIAKHRGFRSNSKRDRANAPADETSKMKSAIEATRLKFAAYRTAGEAFAKDPAFAGRKRNRDGDFTRSILRDDHAREVAILFDRQRRLGNALASADLEAAYEPLAFDQRPMADSEDKVGFCPFEPGERRAAKHSYAYEMFRFLSRLAALRIGRGERALMPEEIVAAEKDFGTQQSMTFKRLRKLIGLDEAELFQGVPAAEEGKRDVVARSGKMCPGTAALKDVAGAAWGSLLATPARLDRIAAVLSFRESIDSIRAGLIEAGIETPLLEAILGGVENGTLSKFSGAGHISAKAARKLIPHLARGLVYSDACTAAGYVHTTQTEVDVTAIGNPIARKALSQALKQLKVMVERFGLPGAIHIELARDVGKSVEERDEITRGIEKRNKDKDKLREAFAETISRAPSGADELLRYELWHEQGGRCIYTDAPIPVGTIASGDNVVQVDHILPWSRSGDDSFVNKTLCFATANQAKKGRTPFEWFSQENPGGWDAFVACVESLKSAKGRKKRNYLLKDASVLENRFRERNLNDTRYACRLLAQAAAALYPAEATKDTRRVFARPGALTDRLRRAWNLQALKKNEKGERIPDDRHHALDALITAACDEATLQRLTKAFQAAEAAGAPRDFTKFDPPWPGFRAEFDAHYDKIFVARSERRRARGEAHAATIKSVETIDGAPVVFERKAVEKLSLKDLERIDSPERNAKLIENLRAWIEAGKQKGTKPLSPKGDPISKIRLKTTDNVAVPVRGGTADRGDMVRVDVFTKPDKKGKKQYFVVPIYPHQVADRANFPVPPGKAIQANTPELEWPDITAEHEFQFSLYPLSLIELVKPDGEIIQGYFRGMSRNTGAFVVSMPNSGIDLRQGIGARTLLSIRKFAIDRFGERHEIPREVRTWHGAVCT

SEQ ID NO: 1623 - protein, 1020 aa, unidentified
  REGION 1..1020: note = Description of Unknown: Cas Enzyme sequence
VGNSGSPQENLVLGIDLGIGSCGWAVIDEARASDRIVAMGVRTFDVPETDKDRTPTNQLRRQHRGLRTVTRRRRQRMNAIRSLFHEAGLLADARKGALKIAGLDPWQLRAEGLERKLSAQEFAVALGHIAKHRGFKSNSKRDRGANAPEESSEMLGAIEAIRARMKAYRTIGEMFAKDAEFAARKHNRDGDYTRSILRDDQEKEVRLLFDRQRAAGNRLATGALEEKFMGVAFFQRPLADSEDKVGACPFEPTEKRAAKHSYSFELFRFLSRLTSLRIQSFAGERPLTPVEIDAASKDFAAHRGMKFKRMRKLIELGDDQRFAGIPIEEEGQRDVVARGGDFASGSYALRKVLGDTWRTLLAAPEKLDQVAFVLSFREDVGSIAAGIEEIGLDPLIRDTIMEGVRGGEFGHFRGAGHISAKACRNIIPHLKRGLVYSAACAAAGYDHATRPETDPGKIGNPIARKALTEAVKQVRAIVREYGLPGKIHVELARDVGKSREERDEIARGIERRNKAKDALREQFQIDIGVSPRSGEDLLRYELWREQNGRCLYTDREIHPNAVIASDNSVQVDHILPWSRSGDDSYLNKTLCFAGANQEKKGRTPFEWLGTDEQRWARFARGVEGNKNMKGRKKRNYLLKDATLLEDKFRPRNLNDTRYACRLLAEFLGAMYPKDGRRHVFARPGPLTDRLRRAWGIQGLKKDAEGNRVSDDRHHALDALVVAATTESELQKLTRAFQDAENIGSHRDFARLDPPWPDFVAEATAKLAQVFVSRAERRRARGEAHGATIRQIVGAKGGQVVYERKSVDALTEKDLLRIKDPARNAKLVEVLREWIMAGKPRDRRPLSPKGDPISKVRVQTNKKVDVLIRDGAAERGEMVRVDVFSKVNGRGRVEYFLVPIYPHQVANHTDWPKPPNRAIQADTPEEQWPEIDETYEFRWSVFPLSFLELIKPSGEVISGYLRGVSRNTGALVISPQHTKEIVRDGIGSRTLNSIRKFAVDRLGRRFEIPRETRTWHGAVCT

SEQ ID NO: 1624 - protein, 1022 aa, unidentified
  REGION 1..1022: note = Description of Unknown: Cas Enzyme sequence
MDIREPLRLGIDLGIGSCGWAIIEESGPACGRIVAMGVRTFDAPETDKERTPTNQLRRQYRGMRRVLRRRRQRMEAIRRLFRQHGLIADAGKDALKAPGLDPWTLRAEALERRLSGQELAIALGHIAKHRGFKSNSKRDRGANAPKDSSEMLKQIQATRDRLAGYRTVGEMFARDPEYAGRKRNRDADYTRSILRDDQDREVRLLFDRQRSLGNDLASEGLERAYIDIAFFQRPLADSEDKVGDCPFEPGEKRAARRSYSFELFRFLSRLAALRIKSGRIERPLTADEITTASADFGGQKGMTFKRLRKLLGLADGDRFDGVPPEEEGKRDVTARAGDTAPGTYALRAVLGDAFRTLLAAPDKLDRIAFVLSFREDIASIRKGLEEIGLEPLIVSTLMKGLENGELSDFSRAGHLSAKACRNIIPHLKRGLVYSDACKAAGYDHAARPETDVEKIANPVARKALTEGIKQVKAIVREFGLPGRIHVELSRDVGKSKEERDEIARGIEKRNKEKDKHRAEFRKTVGVDSAGPEDLLRFELWKEQGGRCLYTDQPIHPNTIVATDNSVQVDHILPWSRSGDDSFVNKTLCLAGANQEKRGMTPFEWFGKDEKRWDAFVARVEGAKGMKGRKKRNYLLKDASVLEEKFRPRNLGDTRYATRLLADALKRLYPEDGTRRVLARPGPLTDRLRRGWGIQSLKKDAAGNRVDDDRHHALDALIVAATSESALQRLTAAFRESEAAGGHRDFARLDPPWPGFVAEAREKMAQVFVSRAERRRARGEAHAATIRQIAERDGVPVVYERKSVDALTEKDLERVKDPDRNAKLVAALREWIAAGKPKDRRPLSPKGDPIAKVRLRTDIKPGVLVRGGAADRSKIIRVDIFENGASKSRSRYLLVPVYAHQISDREPPNRVFTLRVEYKNWPTIPDDAAFLFSLNPMCFVSVLCKERGAAVATELQGYYRQFDANDGRITISDHRSKSSKAKEFQTRLSPTTIRQLKKFHVDRLGRRFEILKEARTWRGAVCT

SEQ ID NO: 1625 - protein, 1019 aa, unidentified
  REGION 1..1019: note = Description of Unknown: Cas Enzyme sequence
MSGERMLGIDLGIASCGWAVVEQGEGDGRILAWGVRTFDAPETSKERTPTNQLRRQHRGLRRVTARRRQRMNTVRALFAAHGLLPEVGRHALRVPEADPWTLRAAALERRLDGTELAVALGHIAKHRGFRSNRKRAGNAAKDDSTMLKAIEESRQRLTQYRTVGQMFAQDPLYAARRRNRDGDYSRSVLRADLEHEVRVIFERQRTLGSAHATEALRDAFAEAAFRQRPLADSEERIGHCPFEPAERRTARRAYSFEMFRFLSRLAALRVGGRRTERALTAEEIAAAADGFGTQRGMTFARLRRIIALPEDERFAGVPADEEAKPDVVNRVARNGCMQGSKALRDAMGDAAWKALLATPEKLDGIAAIVSFREEASRIREGLARLGLPDDVAEAVMAAFDRGEFADFSGAGHVSAKACRAIIPHLRGGLVYSDACAAAGYDHARRPETKLADIANPVARKAIGEALKQVRAVIAEHGLPDRIHVELAREVGKSQEKRDEIRAGIEKRTREREKLRAAYVETVGREPRGAEDMLRFELWREQNGRCLYTDRCIPPDALVAEDNSVQVDHILPWSRFGDDSFVNKTLCFAGANQQKRGRTPFEWIGADAARWEGFARAVEAIKAMKGRKKRNYLLRDAASVEDKFKARNLNDTRYAARIVLEHLARLYPKEGARRVLSRPGPLTDRLRRGWGVQDLKKVLEPDGEKRRHDDRHHALDALIVAATSESALQRLTRAFQEAEAAGSHRDFSGLLPPWPGFVEEVRAKFADVFVSRAERGRARGEAHGATIRQVEEGPRGAEVYERKAVDALKEVDLARVKDVERNAALVERLRAWIAAGKPKDAPPLSPKGDPVRKVRLRSREREGVAVRDGAAARGEMVRVDVFRKPDARGAAKYYLVPVYPHQVADRRRWPVPPNRAVVAHKEREEDWTDVTSGFEFLFSLTQRSYIEVVTKDGEHIAGYFMGLDRWGGQISISAPHSAQSMKAGIGARTLLSFEKFTVDRLGRRHRIARETRTWHGVPCT

SEQ ID NO: 1626 - protein, 1033 aa, unidentified
  REGION 1..1033: note = Description of Unknown: Cas Enzyme sequence
VNIQESRVLGIDLGIASCGWAVIDREANAIVAMGARTWDAPETDKERTPTNQLRRLHRGMRRVIKRRRQRMNSVRKLFRDHGLIEVQGATSLRIARLDPWQLRAEGLDRRLSGPELAVALGHIAKHRGFKSNRKGEGGTNAADDSSKMLKAIGETKERLASYHTVGEMFFKDEAFVSRKRNRDGEFSRSVLRDDLAREVEILFLRQRGAGNPLATPELEAAFKELAFFQRPLRDSDALVGDCPFEPDQKRAAKHAPSFERFRMLSRLAAVRLTEGREERPLTPDQIAAVDAVFGDQKGIKWARLRKLIDIPESTAFVGVSAEDEKTNDFVGRASNAAEGTSTLRSVIIEALGELAWFSLMRTPERLDAVAAVITFREDLDSIRKGLVDTGLETSVVDALMVAVKDGRPFARFKGAAHISATAARAMIPHLKDGMVYSDAAAAAGYEHARRPDADLDAITNPVAKKAVREALKQVKAIVMEYGLPGAIHVELARDVGKSKEERDDIKNGIEKRNRTLDRLKVEFVNVVGREPSGREDLLRFELWQEQGGRCLYSDREIHPDMIAASDNTVQVDHILPWSRSGDDSFTNKTLCFAKANQDKRGRTPFEWFGDDQHRWETFQRCVQSNKSMKGFKKRNYLLKDAAALSEKFRPRNLNDTRYAARLTLDLLARLYPESDRFTGVPRKPEEAARRRRLFARPGSLTDRLRRAWGLQGLKKDETGKRIADDRHHALDALIVAVTSESSLQQLTRAAQGEEERGSSRFIADFPQPWPGFREEANARLLEVFVSRAERRRARGEGHAQTVRRVDHTEEGPVVYERKSVDALSLPDLERVKDPHRNAATIASLREWISAGKPKDRRPLSPKGDAISKVRLATTKKVDVLVRDGVAERGEMVRVDVFRKKNKRDAWEYYLVPIYPHQVFDAEDWTRPPNRAVTASKPEDEWPEMIDHEFLWSIYPFSLIEVETAKGLSFFGYCRGMDRATGALSISSPRSRDEIEKGIGARTLRVFKKHQIDRLGGHTEILSEKRTWRGAVCT

SEQ ID NO: 1627 - protein, 1020 aa, unidentified
  REGION 1..1020: note = Description of Unknown: Cas Enzyme sequence
MAGGAPFRKNLILGLDLGIGSCGWAVIDEAKASDRIAGMGVRTFDVPETDKKRTPTNQLRRQHRGLRTVIRRRRQRMNAIRGLFQDATLIPDDRKGALKVPGLDPWALRAEGLDRKLTGPEFAVALGHIAKHRGFKSNSKRDRGANAPKDSSQMLSAIEVTHERMKSFRTIGEMFAKEPEYSARKRNRDGDYTRSILRDDQEQEVRLLFDRQRAAGNRLATEELERVFTSQAFFQRPLADSEDKVGECPFEPEEKRAAKHSYSFELFRFLSRLTALRVQSSSGERPLTPLEIDAACKDFGAFRGMTFKRLRNRIELSGDQRFAGIAIEEESKRDIVARAGDLAAGAYALRKVLGDIWRGLLATPDKLDHIAYVLSFREDINSIRAGFDEIGLDPIICDALMKGVQDGDFSDFRRAGHISAKACRKLIPHLKRGLVYSQACEAAGYDHAKPRETDPDKIGNPVARKALTEAIKQVRAIVQEYGLPERIHIELARDVGKSKEERDEITHGIERRNKEKDRLRQQFIEVVGTEAKTSEDLLRFELWREQNGRCLYTDREIHPNAIVASDNSVQVDHILPWSRSGDDSFVNKTLCFACANQEKRGRTPFEWFGKDEQRWPRFVEGVETNRNMKGRKKRNYLLKDATLLEEKFRPRNLNDTRYATRLLADMLARMYPDNGIRHVFSRPGPLTDRLRRGWGVQDLKKDAAGKRVADDRHHALDALVVAATTEGALQKLTRAFRQAEEIGAHRDFARLDPPWPGFVAEAREKFALIFVSRAERRRARGEAHGATIRQIGEAGGSQSIYERKTVDALSEKDLERIKDPERNRKLIDALREWVLAGKPKDRRPLSPKGDPIAKVRVQTNKKADVLIRDGAADRGEMVRIDVFRKQNKRNTWEYFLVPIYPHQVANEAGWPTPPNRAVQANTPEELWHEVDETYEFLWSLYPLNFVELVKPDGEVIEGYLRGLSRNTGAFTISPHHTKEEIRDGIGGRTLKSIRKFAVDRLGRRFEIPRETRTWHGAACT

SEQ ID NO: 1628 - protein, 1041 aa, unidentified
  REGION 1..1041: note = Description of Unknown: Cas Enzyme sequence
MEIREDVSLGIDLGIGSCGWAVIRQSGNNGEIIALGVRTFDVPETDEKRTPTNQLRRQFRGMRRVLRRRRQRMNAIRGLFAKTGLIDEPGPDALAVGLDPWQLRADGLERALSPIELAVALGHIARHRGFRSNSKRDRGANASKDSSAMLEAIDATRDRLGRWRTVGEMFARDPYYAGRKRNRDGDYARSVLREDQEHEVRRILARQRQLGAFSDNAFEARFLDLAFSQRPLADSEDTVGACPFEPEEKRAAKRARSFELFRFLARLTALRVGGRPLTAEELTAAAAEFGGQRGMTFKRLRKTIGLDPGERFDGLPPDDEGRRDVVNRSSSNGCMQGTAVLRAALGDTAWRSLLMAPEKLDRIAFVLTFREDLGSIRAGLEDVGLDPVVLDSLMTAAVQGDFADFRGAGHVSARVCRAVIPHLLQGKTYDKAMRAAGYRHTDRERPILAGLSFHDSVKAQVAWAADRIANPVARKALTEALKQAAAIIHEYGLPGRIHVEVARDVGKSKDMRDEISRGIERRNRQKDRLREEYCETVGRQPAGADDLLRFELWKEQNGRCLYTDQPISPAALVASDNSVQVDHILPWSRSGDDSYLNKALCIASANQEKKGRTPFEWLGPDEARWAAFAAGVESNRALKGLKKRNYLLRDASVLETKFRPRNLNDTRYACRLLADALAAFYPADDTIEEPQGPHRNRRRVFTRPGALTDRLRRGWGLQRVKKDDAGKRIADDRHHALDALIVAATSESALQRFTRLFQDAEAKGSHRDFSRLDPPWPGFIQEAREKLAAVFVSRAERRRARGAAHAATVRQISDRDGVPVVYERKAIANLSDRDLDRIKDADRNARLVGSLRAWIAAGSPKDAPPLSPKGDPIRKVRVATGKKPDVLVRAGAADRGVMVRVDVFRKQTADGSQGFFLVPIYPHQVGDPAGWPAPPDRAVAGGRDEADWPVIDSTYAFLFAVYPLSFLELVKPDGEIVEGYFRSLDRSTGAMTISPDWTKAQIRKGIGTRTLASLRKFTVDRLGRRYEVRRETRTWRGAACI

SEQ ID NO: 1629 - protein, 1021 aa, unidentified
  REGION 1..1021: note = Description of Unknown: Cas Enzyme sequence
MTASFEPVLREGLTLGIDLGIASCGWAMIENVDSGDGRIVAMGVRCFDAPETAKERTPTNQIRRQNRLIRRVLKRRRQRMNGVRALFKVHGLLIDDSKKALAVGLNPWTLRAEALDRSLNGQELAVALGHIAKHRGFKSNSKRDRGKNSDKESSKMLGAIEKTREHLNEWRTVGEMFAKDATYAVRKRNRDGNFDRSVLRDDLEREVALIFDRQRRMGNAIANPDLQRQFIETAFFQRPLQDSDDRVGFCPFEPDERRAAKHSPSFERFRLASRLCTLSVRSEGSERTLTAEEISLAMADFGAPGVKLTYKRLRTLLKLDDGNSFDLPREEEDKREIASRSRDQAAGTEAFRNVLGNAWKTLVDQPDKIDRAAAIIAFREAPESIEAGLNEIGFEPLLLELLMKGVVEGDFADFKGAGHISSKAARKILPHLMRGLVYSDACKAVGYDHTRRPETDLSTINNPVARKALSEALKQVRAIVREYGLPGAMHIELARDVGKSKEERDKITSGIERRNKAKDRLREEYRDAVGREATNAEDLLRFELWKEQAGRCFYSDSEIHPDWIISSDNRVQVDHILPWSRSGDDSFVNKTLCLAKENQDKRGMTPFEWFKQAKSEKAWEEFVARVEANRAFKGRKKRNYLLRDARALEEKFRPRNLADTQYATRLLADLLKRIYPEDGSRRVFTRPGALTDRLRRAWGIHGLKKDKDGKRIPDDRHHALDALIVAATTEGALSRLTCAAQIEEERGSSRFIANFPMPWSNFKEELDALFPRIFVSRAERGRVRGEAHAATIRAIGQGEDGRVVYERKPVDSLNEKDLDRIKDAERNHRVVSALRDWIAAGKPKDKPPLSPKGDSIRKVSLATNKKVDVLVRDGAADRGEMVRVDVFRKKNKRGDYEYFLVPIYPHQVASKEDHPQAPNSYVRGGGEEEPLTVDHEFVFSLSQLSFLEIEKQDGTFIAGYFRALNRNTGAINISPHDTLQMMITSIGARGLKFFRKYQVDRLGRRHEIQRETRTWRGVACT

SEQ ID NO: 1630 - protein, 943 aa, unidentified
  REGION 1..943: note = Description of Unknown: Cas Enzyme sequence
MNAIRRLFVERQLLVSSGQNALKYPGLNPWQLRVEALDRLLQPEELAVALGHIAKHRGFKSNRKSDGANAADDSSKMLKAIEATREKSAAYRTIAEVLTNDPSFEGRYRNRSGDYSRSILRQDLEAETRAIFQAQRRMGNVSADQAFEQTFSNIAFFQRPLQDSETLLGPCPFATDQRRSSKRAPSFEMFRFLSRLINLRVSVGRKERPLTADELVAAIADFGKTAKITFKTLREAIALAPHERFVGISKEDEKRDVTSRVGESAFGTSKLRSILGTAGWSSMIKMPEKLDRIADIITFRDAPERIEAGLLELGLDDLIVKALMQAVHAGSFAKFTGTGHISATAARNIIPHLKQGLVYSDACERAGYQHSAGQKIDVADIGSPVARKALSEAIKQVKALIHEYGVPDAIHVELARDVGRSAEEREEIRSGIEKRNKEKDRLREQYVADIGQDPRTAEDLLRYELWKQQNCRCIYTDALIDPSHVAATSNLAQVDHILPWSRFGDDSFHNKVLVTTKANQEKKGRTPFEWFSDQQDDHAWDAFVARVEASKAFRGMKKRNLLLKNAEEVQDRFRARNLNDTRYTARALAALLVQKYPPEPGKRRVFARPGSITSKLRQAWGVQSLKKDGNGNRRSDDRHHALDALVCAATTEGALQRLTRAFQESERRGSGRELIEMPQPWKGFRDQAVAAFEEIFVARAERRRARGKAHDATIKQIVTDTNGTLIYERKSVDKLTLKDLDNIKDLERNAATAASLRDWINAGKPKDAMPRSPKGDIIRKVRLRNRAKDGLEIRGGIVDRGEMVRVDVFSRNNAKGVRQFFLVPVYPHQIAMDVKPPVKFVEPGKSEEQWQSVNDTFDFLFSVYPMSLIEIIKSDGEVLRGYFRGMDRSTGAVSLSLHQSKEALLRNIGARTLLQFNKLTADRLGIVSSIRGEVRTWRGAAST

SEQ ID NO: 1631 - protein, 1019 aa, unidentified
  REGION 1..1019: note = Description of Unknown: Cas Enzyme sequence
MGISSGLVVRESLTLGVDLGIGSCGWALIENADSGGGHIVAMGVRCFDVPETAKERVPTNQIRRQNRLMRRVIKRRRQRMNEVRALFKAHGLLSGDGKKALATGLSPWSLRAAALDRPLNGQELAVALGHIAKHRGFKSNSKRDRGKNAADESSKMLGAIEKTRERLGDWRTIGEMFAKDETYAVRRRNRDGNFDRSVLRDDQEREVRLIFDRQRKMGNAIASSDLEREFIGKAFYQRPLQDSDDRVGFCPFEPNERRAAKHSPAFELFRLASRLCALRIRSFGGERPLTAEEISRAMADFGAPGVKLTYKRLRNLLDLEDGARFDVPQEDERKREIASRSGDQAAGTKAFRNVLGDAWKTLAGHPEKIDHAAAIITFRESLDSIRRGLEEIGFEPLVLEALTKGVQEGEFAHFKGAGHISAKAARKLLPHLMKGLGYHDACKAVRYDHARRPETDLSSINNPIARKALGEALKQVRAIVREYGMPGAIHVELARDVGKSKEEREEITRGIERRNKAKDRLREEFTAATGRARATAEDLLRYELWKEQNSKCIYSGDHIPIDWVAGDRNLAEVDHILPWSRSGDDSFINKTLCTAKANREKKGRTPFEWFKQEKTEKEWEEFGARVESSKTFKGRKKRNYLLRDASVLEEKFRPRNLTDTQYATRVFAETLKAMYPQDGSRRVFTRPGALTDRLRRAWGIQGLKKDKDGKRVPDDRHHALDALIVAATTEGALNRLTGAAKIEEERGTSRFIANFKMPWPIFQQDVDTHFPKIFVSRAERGRVRGESHAATLRSIGDDGSVVYERKAVDALGEQDLDRIKDAERNHRVVTALRAWIAAGKPKDKPPLSPKGDPIRKVSVATNKKVDVLIRDGAADRGEMVRVDVFRKKNRKGAHEYFLVPIYPHQVANKHEYPQAPAAYVRNGGTEEPLTTGHEFIFSLNQLSFLEIEKQDGTFIDGYFRALDRNTGAIKVSPHNTLQTMITGIGVRGLKFMKKYQVDRLGTRNEVQSETLTWRGVACT

SEQ ID NO: 1632 - protein, 1028 aa, unidentified
  REGION 1..1028: note = Description of Unknown: Cas Enzyme sequence
MQTVRFPKLSQAAKRVLGIDLGIASCGWALIDLENDDTDSGPVGRIVALGTWMFDAPETDKERTPTNQIRRTMRGQRRVIRRRRQRMNALRRLFLEHKLLPTADRDALKIPRLDPWKLRAEALDRVLGAEELAVTLAHIARHRGFKSNKKSDGANAADESSKMLKEIEASREKSAAYRTVGEMLVKDPTFAGRLRNRDGDYTRSLLRQDLEAETRKICEAQRRLGNPLAGEALQSSFAEIAFFQRPLQDSKSLLGPCQFEKDEKRTSKRAPSFELFRYLSRLTALRLRQGRTDRPLTLDEIGAAAANFGRTAKITFKALRKLIDLDPDCRFVGVSAEDEKHDVAARKGEAAFGTAKLRDVLGDAGWSSLVKTPERLDRLAEVLTFRDAPERIRAGLDELALDPLIAKAVMDAVAAGAFARFTGAGHISSKAARAIVPFLKQGRVYSDACAQAGYDHAARPRIELTDIGSPVARKALSEAVKQINAVVREYGVPDAIHIELARDVGKSKDQRDEIKSGIDKRNAEKDRLRTQYEEDIGHAPRTAEDLLRYELWKQQNCRCIYTDAYIGPKAVASTANEAQVDHILPWSRFGDDSFHNKALVTAKANQDKRGQTPFEWFSKMKSEGEWDAFVARVEGSKVFRGFKKRNLLLKNAAEVEERFRSRNLNDTRYASRALAGLLEHEQRYPPEPDRRRVFARPGTITSKLRQAWGVQDLKKDADGKRLSDDRHHALDALVCAATTEGVLNRLTRAFQEAERRGLGREIADMPQPWQGFRDQAKAAVQSVFVARAERRRARGKAHDATIKQLGDDGSIYERKPVEKLTLKDLELVKNPERNGKLIENLRAWIEAGKPKNTFPLSPKGDPVRKVRVLNRAKDGVPIRGGIVDRGEMVRVDVFRKKHAKGAWQYFLVPVYPHQVAMDDAPPRKWVQAHVPESEWKSLDAGHDYLWPLHPMSLIELVKSDGVVLRGYYRGMDRSSGTISLSLHHSKDAVVRGTGTRTLSNLTKLTVDRLGRVNVVEREKRTWHGVVCT

SEQ ID NO: 1633 - protein, 1068 aa, unidentified
  REGION 1..1068: note = Description of Unknown: Cas Enzyme sequence
MTILGLDVGIASIGWAVIEMKDGAGRIVAAGTWMFDAPEEKGQTGTRLKSELRRVFRGQRRVVRRRAQRMALVRRIMAEAGLLPTLHRDALKIEGLDPWPLRKAGLERRLDPKELAVALGHIARHRGFKSNAKDAKGTNSADDSKKMLKASAETREKLARYGTPARMLLEDEAFILRRTKRKSGEEEIVRRLHNRDGDYSRSLLRDDLATEVRDIFHSQRRLGNAQASEDLERGFTAAAFFQRPLQDSESLVADCPFEKGEKRAARRAYSFELFRFISRLNALTLSMGRETRRLTPEDIAKAAANFGHTAKISFAALRKVIGIGDDVKFDGISKDDEKRDVVARSGEAAAGTSRLRKLVIDNHGAMAWGALTNHPERLDRIAEIISFRNDFDSIAKGLAEIELDESLRKSLLGAVEAGDLDEFTKAGHISAKAARAILPGLLEGLTYDKAAAAAGYDHTASRERHAFDVGVIGKEALARILKEERIDRHLVGSPTARKALIESVKQVKAIVEIHGIPDAIHIELAREVGKSIEERGEIERGIEKRNKEKDKLRQRFEEPGMIGRPARNAEELLRFELWEQQKGFCLYSNEYISPSLLAASDNSVQVDHILPWSRFGDDSFHNKTLCIAKANQEKKGRTPFEWFSADKTPEEWDRFVASVQALPALKGMKRRNYLLKNALEVSERFRSRNLNDTRWTCRLLGEALKNLYPKDEGHRRVYARPGPLTDRLRRAWGLQWVKKDDKGERIPDDRHHALDAAIVAATSEAVLQQATKAIQDIERKGLPYDLKNVPEPWEGFRADVLDAVENVFVARAERRRARGKAHHATIRQIRERDGKEIVYERKKIADLEMSDLSLEKDSALVKDSERNQAMIESLRTWIDAGKPADRPPLSPKGDPIAKVRLKSKSKINVLLHRGGADHAPGTVDRGEMARVDVFRKATPKGVWQYFLVPIYPHEVATLDQPPDRAVTARKPESEWPVMDGTYEFLWSLVPMTYLQVVTGRGEIFEGYYQRMNRSVGAIALSPHHDSTELKQGIGARTLHIFKKISVTRLGIVHEIKQETRTWRGKASS

SEQ ID NO: 1634 - protein, 1039 aa, unidentified
  REGION 1..1039: note = Description of Unknown: Cas Enzyme sequence
MSARGYRRILGIDLGIASCGWGVIEVGENDGNIIAAGVRCFDAPLIDKTGEPKSADRRKARGQRRIIRRRRQRMNLIRRLLVEFRVLPDHTPEALHHALRRIPPTAAGSQVTPWTLRAAAHMRLLTNDEFAVVLGHIARHRGFRSNSKKEAGANAADETSKMKKAMEATREGLAQYHSFGDMIANDPKFADRKRNRDKDYSHTAKRSDLEDEVRAIFRAQRRLGSSAATEQFERSFAGAAFFQRPLQDSEDVVGECPFEPGEKRTARCSPSFEIFRFLSRLVNLRLTVGRVERMLTPDEIAIAAKHFGEQKSITFKTLRKRLDLDPNVRFAGIAPDKEGVDVAARMGGAAFGTCVLRNVLGDAPWQSLLRSPEKLDRVAEILSFREDVDSIRRGLDEVGLDAPIVDRLTQAVADGDFRDFSKAAHISSLAARNIIPGLRQGMVFSEACARVGYDHTARPSVSLEQIGSPVTRKAFSEAIKQVRAVTREYGPIDIIHIELARSVGKSAEERKAISEGIEQRNVEKERRRKEAQELLDRAPSDDELLRYELAKEQNFKCIYSGNPIDPGGIKANDTRYQVDHILPWSRFGDNSYINKTLCTTKANQDKRGRTPFEWFETEKTEQEWMEYVARVESLKEVKGRKKRNYCIKDAGNFEEKFKARNLTDTQWATRLLADELKRMFPAHEGERRVFTRPGSITSALRRAWGLEGLKKEAGKRVEDDRHHAVDALVLAATSESLLNRLTKEIQKRESEGRQDDIFHCSQPWPGFRLGVEETVYGSAGIFVSRAERRRARGKAHDATIRQIREIDGETALFERRPIEKLTEDDLDKIPVPEPYGKIADPRKLRDDLVENLRVWIASGKPKDKPPRSPKGDVVRKVRIRSTNKVAVELNGGAVDRGDMARVDVFRKKNKKGAFEFHVVPIYPHQIVTLESPPNRAVIGNKAESNWTLIDDNFEFVWSLNPMCYLKLTKSNGEMIEGYFRSMDRTTGAINLSPMETNSKTIRSIGVKTLSSFRKFVIDRLGRKFEIPGEVRTWRGEACI

SEQ ID NO: 1635 - protein, 1047 aa, unidentified
  REGION 1..1047: note = Description of Unknown: Cas Enzyme sequence
MGATIGERLRAIGARYPVDESLVFGLDVGIASVGSAVMRHGEAPSIEFAGSRCFEAPEEPKTKELKNKTRRDKRLLRRVTRRRRRRMADIRDLLVEHGLLQHTDTDAFHHRAAAPGPWQARALGLDRRLSDEELAAALLHIAKRRGFKSNKKSDIGQNAPDANKKMLGAIQANRELLARYRTIGEMVTNDSKFTERKRNRSGEYSHTHARDDLRHEVEQLFSAQRRLGNNNATAELMDQFIAVAFHQRPLQDSEHLVGMCPFEPAERRSPRHAPSFEKFRFLAKLNTVKVREADGSLRRLTREELGSAAADFGTATKSISWKALATKIDLPKGSFFDGIDDKKAKADVATSAGSAAGTKTLYDALGPAGWNSVRQKPELLDAVAAVIAFREDLESIEKGLGEIDGLEPLILDALMIAVRDGRFGAFKGAGHVSAKAARNVVPHLLQGNVYSAACVLADYDPTAGRRIEIDDLKNPVVQRSLREAVKQVETLIHHFGARPGRIVVELARAVGKSAEERDKITKGIEKRTAEKKRRRAELKELLQLSYEPGEEDLRRYELWKEQNYRCIYSDREIPPHDILATSNAVQVDHVLPRSRSQDNSFQNQVLCFAQENQNKGQKTPWEWKGRTDPKWWGAFEARVNTLTMKRYKKNLLLMRNFDERQQGFVERNLNDTKYAARALLAVLRELYTDENEPDPASEGYLGNTKRRLFARPGAITAILRRAWGVGAIKDRADDRHHARDALICAAGSNEWLLNTLTKQYQQVEVENRGKWTPYVPPPWNDFRDDALRAVESVFVSRSEKRRGRGQGHMDTIYSVGEENGRKVTYERKAVDKLTKADLARIKDADGGNRPLAEALAAWVDRGKPADDPPRSPKGDPVRKVLLRRSGVSGFSLSGGHVDNGDMVRIDVFTKPNKRGKDEFYLVPIYRHQVMDFSGWPQPPNSAVRAYKAEDDWEEMDGNCHFLFSLYGDAFVEVVKRDGEIFEGYFRSMNRSTGALNISPHHRRDQSFDGGSIGARTLTSFRKFHIDRLGRKHGIEREARTWHGAVCT

SEQ ID NO: 1636 - protein, 1079 aa, unidentified
  REGION 1..1079: note = Description of Unknown: Cas Enzyme sequence
MKILGIDGGISSVGWAMIETGNGNSQGEILGTGVWMFNSPEISTKKGPVSKNQERRQAQGARRLVKRRRQRMNAIRSLFQDHGLIHRNTKNALHFPSMNPWQLRCDALERKLSPEEFAKALSHVAKHRGYHPNTKADNLGKNESKEEGRMLSAISKNEKLISRYRTPAVMLMSDSIYEKKYGEDSCFTIRSVRNRDGNYTRTILRIDLVREIKTIFLSQKRFGNAFANDELETEFLKIVEHQHEMPDTEHLVGDCAFEPSAKRCSKLAPSFERFRLLQKLVNLKIVGRAANRLTPDELTEINRHFGLGDTMTYSDVREIIGLDRSQKFSGIKFESEVTTDVVSKRGKTSPGTYALRNLITEKLGESCWEALVNAPVILDQITNVVSFRRKSDSVLNGLSDITGITADVSDVIYTSWKEGAFESFVGATHISDAAARNIIPGLLKGLTYDKACLAAGYDPASNNEKNAFKIELDGSVVTGKEALKQILSQQKVDEKLIGSPTARKAIIEVLKQVKAIIEEYGMPDRIHIELARDISNSIKKRAEIDKGINERTKYRTMLPERFENAVGRRPHPGGAGANDLLRFELWEQQGHHCIYTNTYIPPSTLSEDDGSLQIDHILPWSRFGDNSLNNRVLCLSKANQEKRGRTPYEWFKADKTDADWKRFVASVNGSKTLKGMKKRNLLIEDASELEAGFRSRNLNDTRWASKITLEALKYVLPDVQNADGSVTRRVFARPGAITSLFRNAWGLNHIKKDENGNRKSDDRHHALDAVIVAAVTERQLQLATSEVQRLEQQGLPIRLSKCIAEPWDGFRTEALTKIEKIFVARQESRRALGQVHQETVRSFSERDGKLVAYNKVSVHKLTLKNLNDIKDKERNWRLVEVLKEWIEAGSPKDKLPVLPHDKSKNSNPPSIISKVTVKYYKGVDLTIPRGSGLGAVDQKSIVRTDVFSKPDKKGDEYYLVPIYRADIFTLKEPPLRFITKGKNGNNLIGKDHTFCFSLYPNTLVKFTRSNGEKVEGYYRRVDTDDSRITVLNPSTSDSTEGVRFSKKDLNEFRKLTVDRLGRVFEVKGEKRTWHGKVCT

SEQ ID NO: 1637 - protein, 426 aa, unidentified
  REGION 1..426: note = Description of Unknown: Cas Enzyme sequence
MRTLTLVSIQKAYKLKLYPTVEQADALARFAGSCRWLWNYLLDLQEKKYEAEKKFIFSFVMQQRLPKLKRENPWLADAPSNSLQRVCRNLDQALKKCFKEGAGFPRFKKRGVSREAFYVANQGMRIEDNRVVLPKMKQGVKFRAGRLPEGRILSATVSQRAGTWWCVVQCEVEQTIDVIDASVETVIGVDVGLKSLMVCSDGVVVANPRRLSKAQKRLRRAQRILARRKKGGANRRRQAARVAVIHAKVANYRADALHQATTALVRRASVVVTENLNIKGMVRNKRLARSISDAGWGEAIRQISYKAEWAGKTHLRVGRFEPSTQKCSACGNLRSGEDRLRLHERTYRCGSCGNVADRDVNAAHNLRNFGLYKLGFNSIYVGQAMPERTGVIPVNACGASSAGPDAIASGRYGALKQEPKSTSDVG

SEQ ID NO: 1638 - protein, 1134 aa, unidentified
  REGION 1..1134: note = Description of Unknown: Cas Enzyme sequence
MDIIEDYSAGLDVGTSSVGWGLIDTVNRSVVPHEVTHHLWRDGVSRKVTETRYAAGVIKFDPVEQKLQGKWISRSNERGVFRRSRNRLQRKQWRLAALRELFHELGLTETAEPGPVFQSGAKAFKSPWILREEALHRVLTGEELFRALYHIAGHRVYEANSKAGEAADLAAIGDNAEVPPEGKKPKKGKSGESYGEKVVSLTAAIEVSGLTVAQYFNANFTNEDGRKHGLNGSLDRLFKRRLLRDEVRSIFAAQRRNGNKRATPELEAEVDRIAFYVRIGQDSEKFVGDCPFARDACGKPLKRAPRYSPSYEKFRFVQKLAHLRLKDGGFLSAEQRAVVAQSFGDRPTYTWAALGQVLGLDPAATFKDAPKQLDRDFVMARGECARGTAILSDVLGEVDLPPGALDRIAAILSYRPDLRSIEAGLRGSGLPAAVIERTIEGVRMGAFKFFKGAGHISVEAAGSLSERLLAGDTYDRACAFHGWDHAAPDNSAFAGLIRPASPKSILAIINDAESPPVHAPGARKALGVAFKQFVAIAREFGGLPGSVHVELARDIGKSLEERTKADNGRKDNEARNRRQAEHFEEIVGRPPIKGSEDMLRFRLWREQRHKCPYRASRDGQSGHISCETFRADRNGDGTLLNIDHILPWSWSHDDSFENLVLCFADENARKGSNVPWQWFGSDADRWAKFKAWIDNIPTLKSTVDRKKSKDFDDDPGMGGYKRRNLLVEGDEAIEKLKQRLSSRHLNDTRYATRILMQAIECLYPIEQYSDRQGNQRVKQRVFARPGQLVGMLRRAWGINHLKFDSQGVRLNDDRNHAVDALVGAAVTNRELQQMTKAYQKQEAKGGRIGRALSHVPPPWRTFAADIEAARDRVFVVRSERKRARGKLHDAGIYGGGPAAGKEQFHYRLNMQKEFGLKKGKFDAEVARGQLAKIKDPDRNRHLIQAIEAWIDGGAPREDGKWPVDQRGQPIRRITLHDPTRKPGIAVHDGDAKRQTMVSVDVFSLKGAKYNRRWAFVPIYLYHVLDQRSSPHAPSPDLQGGGVEIKFQLRVGRGDYLEFVSGSGECAEGYFIDFDIDSDRFSVGRHHDMAEHRVSASKMLTINKYQVDQFGRKSLVQSEVRTWHGVVCTSPIQPG

SEQ ID NO: 1639 - protein, 1051 aa, unidentified
  REGION 1..1051: note = Description of Unknown: Cas Enzyme sequence
MNGHTSKELVFGIDLGIASCGWAVLRHPSPSDPTGEIVAMGSWMFDVPETDKERTPTNQIRRSNRLLRRVIRRRAQRMAEIRRLFAQHGLLAGNEPDALKRAGLDPWELRARGLDKPLSPAEFAVALGHIAKRRGFKSARKGKEANTAGDDQKMLKSLESTRERLGRYRTVGEMFGRDVEFRDRKRNRDGLFDRTQSRDDLIHEVGKLFEAQRRLDNDGASVALETDFTAIAFRQLKMQDSEKLVGMCQFEPKEKRAARFAPSFERFRLLGKLVNLRVSTPEGERPLTPEEIRLAADDLGKTAKLSIKEVRKRIGLPADQRFTAIKPEDEAQDIAARTGEAMHGTRRLRDALGEALWAEFRDKPAQLDHIAHVISFHETVDKIGAELGKLGLPKGATDGLLEDLAVFSRFKGAGHISAKAARALIPHLEAGLRYDQACEAVGYDHAASRWSKREQVADKAGFNALVKSMGDEIANPVARKSLTEGLKQLWAMRNRWGLPDAVHIEMARDVGNSLEKRNEIKRGIDKNTAERERQRDEVRELLGIEDVNGDTLLRYRLWKEQAGRCPYTDKAIPATAIIATDNSHQVDHILPWSRFGDDSYSNKVLCTARANQEKKGQTPFEWIMSSQGEDAWNTFLARIEGNTAFRGAKKRNYVLKNAKEAEERFRTRNLNDTRYAARLLAEAVKLFYPEGDRQEKGGNRRVFTRPGGLTAALRHAWGVESLKKVDGKRVEDARHHALDALVVAAIGEWEVQRLTRSYQEWEQKGLARPLRQVDPPWGDAASFRREVREAYANVFVARPERRRARGEGHAATIRQVKERDGALVAYERKSITDLSEKRLQDIKDPERNQGVIDAIRQWIANGRPADDLPRSPAGDEIRKVRLRTKGKPAVPVRGGSADRGEIARVDVFAKPNKRGKEEFYLVPIYPHHVMNKRDWPMPPLRAVVAYKDEEDWALIDDSFAFRFSLYPRNFVEVVKSTGEVFEGYFGGMDRSTGAISLQSHNNPKNSFRGLGAKTLLTMKKYSVDRFGARSEVKSEVRTWHGVVCTSPTQPG

SEQ ID NO: 1640 - protein, 1046 aa, unidentified
  REGION 1..1046: note = Description of Unknown: Cas Enzyme sequence
MNGLVFGIDLGIASCGWAVLRHPTPGDPSGEIVAMGSWMFEAPETDKERTPTNQIRRGNRLLRRVIRRRAQRMAEIRRLFAQHGLLAGNEPDALKRAGLDPWELRARGLDKPLSPAEFAVALGHIAKRRGFKSARKGKEANAAGDDQKMLKALEATRDRLGRYRTVGEMFGRDADFRDRKRNRDGLFDRTQSRDDLIHEVGKLFEAQRRLGNAAASAALETDFTAIAFRQLEMQDSEKLVGMCQFEPKEKRAARFAPSFEKFRLLGKLVNLRIATPEGERPLTPEEIRLVGGDLGKTAKLSVKEVRKRIGLPADQRFTAFKPEEEAQDIAARTGEAMHGTKKLRDALGEALWAELQARPEQLDQIAHVISFHETADKIGDELHKLGLPVRTVDLLLRDLAVFSRFKGAGHISAKAARAMIPHLEAGLRYDQACEAVGYGHAASRWSKREQVTDKAGFNALVKSMGDEIANPVARKSLTEGLKQLWAMRNRWGLPDAVHIEMARDVGNSLEKRKEIKRGIDKNTAERERQRDEVRELLSIEDVNGDTLLRYRLWKEQAGRCPYTDKAIPATAIIATDNSHQVDHILPWSRFGDDSYSNKVLCTARANQEKKGQTPFEWIISSQGEDAWNTFLPRIEGNTAFRGAKKRNYVLKNAKEAEERFRTRNLNDTRYASRLLAEAVKLFYPAGDRQEKGGNRRVFTRPGGLTSALRHAWGVESLKKVDGKRVEDARHHALDALVVAAIGEWEVQRLTRSYQEWEQKGLARPLRQVDPPWGDAASFRREVRQAYDNVFVARPERRRARGEGHAATIRQVKERDGGLIVYERKSITDLSEKRLHDIKDPERNQGVIEAIREWIANGRPADSLPRSPAGDEIRKVRLQTSGKPAVQVRGGTADRGEIVRVDVFARPNKRGKDEFYLVPIYPHHVMNKRDWPMPPMRAVVAYKDEGDWTLIDHSFVFRFSLYPRNFVQVVKSTGEVFEGYFAGIDRSTGAISLQSHNNPKNSFRGLGAKTLLTMSKYSVDRFGVRSEVKSEVRTWHGVVCTSPIPPD

SEQ ID NO: 1641 - protein, 1037 aa, unidentified
  REGION 1..1037: note = Description of Unknown: Cas Enzyme sequence
MIKENLSLGIDLGIASCGWALIDWPDTDSPGTILGMGAWCFDVPETDKERTPTNQIRRANRLLRRVIRRRRTRMAELRKLFEQQKLIADRDPEHLKKQKLDPWEIRARGLDKLLTGDQFAAGLLHIAKRRGFKSNAKRDAGANTASEDGKVLKALEQTTEKLARYRTPGEMFARDPEFALRRRNRTGDYSRVMLRDELSHEVRKLFEAQKRLGNSFANSDFQEKYEAITFFQRSLQDSEAIVGFCGFEKTEKRAAKHAPSFEQFRFLSKLINVRVTAPREAPRALTDDERVKACALAGKTQSVTWKALRKVIGLSDNAQFIGIKPEDEKYDFGARTGESFHGTVKLRECLGENIPPALLDTIASIITFRETPESIDRGLREAGVHEAGIESLMKGLQDGKFAKFKGAAHISALAARNLLPHLQAGLGYDKACAQADYNHSQSRFSGYDQIKDRAGFKALLADLQGAINNPVARKSFTENMKQIWALVNIYGLPGRINIELARDVGKSAEERDEISRGINKRTSEKEKLRDELKEQLGIERVNGDDLLRYELWKQQGGRCLYTDREIHITQVRASDSSVQVDHILPWSRFGDDSFHNKTLCLAAANQNKKNQTPYEWFMLSNPSDWDRFSTQVESNKALKGLKKRNYLLRNAAEVEEKFRSRNLNDTRYAARILLEAVKLLYPQDRRHSCVRARPGPLTAALRQAWGIEAMKKIDGKRIPNDRHHALDALVVAATSEGELNKLTKAYQQSEARGEARSLGHVDEPWNGFRNDAIKGMNSVFVARPERRRARGEGHAATIKQLRESDGKVYARKAVDNKLKLEDLDKVKDADRNRAIVEKLRAWIEAGHPKDKPPLSPKGDIIRNIRVETNGKPGVPVRGGTADRGEMVRVDLFSKPNKKGKAEYYMVPIYPHQVMDRRKYPLPPNRAIAGGKPESEWPEMDSSCEFLSSLYPHSWVEIVDAKGVVKQGYFKGCDIATGAINLGRHSDVRNVKDGRSIGVKTLSSINKFAVDRLGRRSRIMREVRTWHGEACISVGPPG

SEQ ID NO: 1642 - protein, 1052 aa, unidentified
  REGION 1..1052: note = Description of Unknown: Cas Enzyme sequence
MDQKVAAKSAPTLGDRLAALDRFPIDDTLSLGLDIGIASCGWAVAMLGETPGIVMMGSRCFEAPENPKTSELLNKARRQQRGQRRVVRRRRQRMHAVRHLLHEAGLLQSSKPLPTGEKPVVNPDPWQWRVEGLNRALAPHELAGVLIHIARHRGFKSNSKRDRGANAADESGKVLAGIAALEEKLAGWPTFGAMIASDEAFAGRKRNRSGVYDRTPKRDLIADEVIKLFSAQHRYGNADATDELLRRYSEITFFQRPLQDSETMVGFCPFEPVERRAARNGYSFELFRFLSRLTTLTLVEGAGRFRRLTPDEVRLAVRDFGNQKTLTFKALRKLLGLSDAVSFEGVPRAADGAGGTKARARDGEAKDVVASAGAAAGTWTLRQVIGDGPFRSLLSTQEKLDRIAEVISFRDDLGRIALGLDDIVLEPPVCSALKAAVERGDFAAFRQAGHVSALAARKMIQPFLSGAPSYDKAAEAAGYVHTTRRVEPIEDIGSPTVRRSLGEAIKQVLAVLNELKVRPGRIHVELARDVGRSAEMRDVISRGIDRRTKEREKARADYLELVGRERCTDEELLRYELWHEQQQRCVYTDDYIEPDWLLDGPNEVQIDHVLPRSRSQDNTRVNLVLTRVDANQRKGNQTPYEWFGRDDPARWTAFVARVERLPIKGMKKRNLLMRNFADRESKFLDRNLTDTRYAAKALLGALEALYGGRDSEGARRLYARPGAITWNMRKAWGVEDLKKAADGERQGDRHHALDALVCACTTEGALQSVTREMQRMEKMGRSREVVAVPPPWPTFRQDVAEALASVFVSRSEVRRARGEGHGATIYAVSERDSRPVIYERKAVENLTKKDLDRIKDPERNAAIVATLSDWIERRKPKDEPPRSPRGDVIRKVRLSTNKKPALRVRGGHADRSKMVRVDVFQKNEKFHLVPVYLHQVVDKEAWPVPPNRAIVAHTDQSEWSLVDNSYTFLFSFHPYVFLEIIKSTGEIVEGYYRSTDISSGGITLSYSGDKSSLIRGVGVRTLKSLRKFQVDRLGRRSEIPREAQTWHGVACT

SEQ ID NO: 1643 - protein, 1032 aa, unidentified
  REGION 1..1032: note = Description of Unknown: Cas Enzyme sequence
MKVLGLDCGIASVGWAVLELRADDGGGRIVATGTRMFDTPETDKERRPKSELRRMHRGQRRVIRRRSQRMNAVRRLLNKSGLLENAGPDALKFSGIDPWEVRTKAIDKLLSPKELAIALGHIARHRGFKSNAKTRGENAAEQSKMKKAMAETQDKMAGRTFGQLIATDPAFSGRKRNRENDYSRTPLRADLEAEVRMIFNAQRRLQNPMAFRELEADFIECAFFQRGLQDSEILLANCAFEPNEKRTAKRAYSFELFRYLSRLNTLEIVHGRSSRRLMSAELAEAIAHFGSTKKISFKALRTLFKLADDEQFSTVRIEEEGNDVTSRHGEAAAGTATLHKILEGAAWNSLVKTSEKLDRIAEIVSFREDFENIRAGLEEIGLEPAIVEQLMEEAKAGTFSKFTGAGHISSKACRRMIPHLAQGLVYSEAAEKCGYDHTMSRERNAFNVGATGKEALAKILSHQVIDRSLVGSPIARKALIEAVKQVKSVIEEFGIPDAIHIELARDVGKGIDERREIERGIEKRNKEKERLRARFAEDVGQPCGSAEDLLRYELWLEQNGRYVYSDEAISPRDIISSSNVVQVDHILPWSRFGDDSFTNKTLCTAKANQLKRGRTPFEWFSSDVPEADWLTYIGRVQALPTLKGFKRRNYLLKDGASLEQKFRERNLNDTRWTSRLLAECLKQLYPADEQKRRIFTRPGALTDRMRRGWGLQWIKKDDNGERIPDDRHHALDAIVVAATTEGMMARLTKAFQAEEIRGGHRDFRALDQPWKGFREDVITKMEGVFVSRAERRRARGEAHAATVRSISEHQGEKRVFERKRVGDLKPADLDKIKDPERNRATVEALRAWIEAGKPDDAPPLSPKGDVIAKVTLLTNKKPEIIVRGGAVDRGEMARVDVYQKEDGKGANRYFLVPVYPHQIASEEQPPMRAITGGQPEDCWPKLDSSFEFLWSLFPYNYLEIETSKGNLIEGYFRGVDRNTGAITVSQHENSSVITKGIGARTLKTFNKYTIDRLGRRSLVKGELRTWRGKVCT

SEQ ID NO: 1644 - protein, 1044 aa, unidentified
  REGION 1..1044: note = Description of Unknown: Cas Enzyme sequence
MAGRTVLDRLEAACGRYPIDEDLVLGLDVGIASIGSSVVRHGAEPVILHCGSRCFDAPENPKDRTLNNAVRREARLHRRTIRRRAGRMKQLRSLLVEHGLITTTDPDAFHHRDDAPDPWAARVEGLNAWLADDAFAAALLHIAKHRGFKSSSKSDAGENAPDESSKMLAAIAARQEIMQPYGSIARLMTEHEEFAKRKRNRSGEYSRTPMRSELEAEVRVLFEAQRSLGNRLASEELETAFHDIAFFQLGLKGSEELVGHCPFEPGEKRSPRQAPSFEKFRFVAKLNTVQVRTDAGLRRLTAEEMGRALADWGMTTKSFTWNALAKKLGFRDGTVFTGVDAEKAKKDIAAGNGAMEGTRVLFQHLPSASIEALKARPDVLDRATAVISFREDFGEIRAGLEEIDGLEPHLVEALMTGVEAGGFARFTRTGHISARAARNILPHLLQGMVYSEACAAAGYDHTAERRIEITDIANPVVQRSLSEAIKQTVTLVHVFGARPGRIIVELARDVGKSAEEREKMTKGLEKRTKAKEKARETLQQELGLGDRPTDEQLRRYELWKEQNQRCLYSDEHISASMLLTEAVEIDHALPRSRSQDNSFQNQVVCLTSANRDKGNRTPFEWFGHDTARWEAFKVRVGALKQMKRYKRNLLLMQNFGERVDGFVARNLNDTRYASRALLAALRVLYADNGEPEPSDVGYTGMGETKRRLFARPGAITAILRHAWGLGDVKDRRDDRHHGLDALICAAARSDWLLQGLTRQYQSLEEQHRSRWTPPVPAPWPGFRKDALEAYENIFVSRSERRRGRGAGHQATIRAIARTPDGERMVIERKSVDDLKPADLERIRDGEGRNRPLVDALRDWIDAGKPKDKPPLSPRGDRIRKVRLDAGSKGGFEVNGGQVDNGDMVRVDVFRMADKKGRERYFLVPIYRHQVMNPASWPRPPDRAIARNVPESDWPAISPDARFCLSLYPNSYVRIVKSDGTEVQGYYRGMDRFDAKIGLSSHYSRTISRVGTPTSQLIEKFSVDRLGNISPVKQEQRTWHGAVCT

SEQ ID NO: 1645 - protein, 1036 aa, unidentified
  REGION 1..1036: note = Description of Unknown: Cas Enzyme sequence
MQTILGLDCGIASVGWAMLEYDASETEGRIIAAGTRMFDTPETDKERRPKSELRRMYRGQRRVIRRRRQRMNAVRKLLLEHGLLPDSKSDALKFQGIDPWVVRAKAADTLLSKEELAIALGHIARHRGFKSNAKSQGENDVEGSKMKKAMALTREKAEGKTFVQMIAAGEGRKRNKEGDYSHTPLRKELDDEVRAIFRNQQRLQNNIATSELEIAFIDKAFFQRGLQDSENLLADCAFEPAEKRTSKRAYSFELFRFLSRLNTFEIQEGRTSRRLTTDELKDAIKNFGATKKITFKALRKLIKLQDSASFGGIRAEDEKLDVTSRHGSSAEGTGSLCNLFEGAAWDSLVKTPEKLDRIAEVISFREDLGRIQQGLEEIGLEPLVLEKLLSELQFKTFNEFKGAGHISSKACRNIISGLVRGLTYDKAASECGYDHTTSRERNAFNVGVTGKAALKKILSEAVIDRSLVGSPIARKALIEAVKQVKAVVEVHGIPDFIHIELARDVGKGIDERKEIERGIEKRNKEKDKMRLEFADVVGQPCSSANELMRYELWKQQNGKCVYSDESINPRLLITIDNSVQVDHILPWSRFGDDSFNNKTLCTARANQEKRGRTPYEWYSKDKTETDWDAYEGRVKALPALKGFKRRNYTIKDATSVQEKFRTRNLNDTRWTCRLLAECLKQLYPKDQRERKVFTRPGALTDRMRRGWGVQWIKKDEKGERIPDDRHHALDAIITAATTESMMQVLTRAFQKEEALGSPRDFRALQQPWPGFREEAIAAVEKVFVSRAERHRARGEAHAATIRSVVEVDGEERVFERKRVGDLKLTDLEKVKDADRNAAVIASLRVWIEAGKSESVPPLSPKGDPISKVTLLTNKKPDVIVREGAVDRGEMARVDVFRKKTAAGAWQHFVIPIYPHHIAGEEAPPNRAVQAATPEDKWPMVDETYEFMWSLTPMTYLEIETSKGDLLQGYFRGMDRATGAIIISDHKNSGAITKGIGARTLRTFNKYSIDRLGHKNLVESELRTWRGKACISPNPQG

SEQ ID NO: 1646 - protein, 1425 aa, unidentified
  REGION 1..1425: note = Description of Unknown: Cas Enzyme sequence
MSNYDNFKKYGDYYIGLDVGTGSCGWAVTDKSYNILKVSGKSLWGVRLFPTADTAAERRAHRCARRRVFRTRQRLNLLEQLFDPEISKVDVGFFQRLKNSEFKEISKNNLFGDNSYKDKDFFKEYPTIYHLRYKLMNEPVDDIRLLFLAVHHIIKHRGHFLFERLDVNNIGASLPELWEQCCSQFVDISLFSNVSDDFQEIADSLKQNLIDMRDDVINVIRTSSDKRSDLKKVFAQLKSVYDEISDPEVKKSTENKVNRWYLLLLGYKVSAAEIFTIEESDEEGLSCKIKFNSSDYDEQIQKINDEFKGVVESEKAVYDVIKLQEILKDCNSISESKVELFNKHAEELRIFKSLLRERLSENLLAEVNKKVNVAKNEKLTTEPKSFYKEIFEERNKNTEKGKICFYYDITHGDKSANKEAIKGSSIYKRLQILAQILLCSSEIYKLSEKEKVLLHRIGDLSIFETQVSADNSVIPYQINLAELDKILKVQSKNFAFLSEKDDAGVSVYDKIKALLTFRIPYYVGPLNNHSKFSWIVKKSQEKIVPWNFESVVDTEKSAEAFIKRMTSKCTYLSGEDVLPKNSIIYSKFMVLNVLNNIRINGMRLDEAQTGLTKKVFDELYCNQINVTQKQLVAYLYNNGFLTSKEELTGFDDEQKVSMSSYVKIKNALGTDNFDINFAESFIKYSTLFPNDYLMIEKRLKREFSSECAKFNENLSKLCRIKFSGWGRLSEKLLTGLLGHNKNSEFDKNSILGFMLNGKGNLMELLSSEYTFSDLISSENSTLDKNDAFSYQNLVEGLYVSPSVKRMIWQTLLVVREITKKIMGYEPSRIFVEMARGATADQKGKRTNSRKKSILALYDKCRKDFDISEIYSSLEKQDDNKLLSDKIYLYYTQLGKSMYTGNKIELEDLLNNSKQYDIDHIIPQSLTKDDSIDNRVLVERTVNEVKDNNYPLSYQIRENQTQFWKHLLDLGLISKSKFERLIRSTSLSNSEKEGFIARQLVETRQSTKAIAGLLSKLYKKAKIIYPKAGLTADFKQKFDLIKVRELNDLHHAKDAYCNIVVGNVYFEKFTSKYQYVIANNERYSFSTSDTSYIFTNQNEKRLQQSGTWDSRNGKSISIVKKYYKRNNILMTYKQEERIGALFNQTLYGPEKGTIPKKKNMSCHDYGGYDSDQNSFFSFISYKDDKGNLKTKLIGIPLRVVYGLSDKSSAISHYLLTEKSNEYIDPKVLIDFLPYNFILKDNETGFLARVVSYATKGRQLVLKQFNSLILNEKNNKMLKAIDNFVSRLKNKSFEVKYDKDKSGFTEEDLSSIYSELKDKTKNTVLKALPKTTVKILTDVDINSYQYSENEKSEPKLLSIEQKAVAICEVIKAFHTEPSDLSLLGGKANSGKMCINSVLNLDKDDYSVVFYSITGFYEKELRLSDLLK

SEQ ID NO: 1647 - protein, 1511 aa, unidentified
  REGION 1..1511: note = Description of Unknown: Cas Enzyme sequence
VKFLYEFIDKEPKRVRARIVFISQTEKLREYCSLRKAGNQIPKEKGATLSRLSKWILEGWVKGGVQGLPAVPAKNTVDIVEYLNNRSAAAADKILHSLPGKQDLAQEKNDLNKSIWNFDAEKFQMDKVNLDDSEKTDIKAHLHHLAFALHKIHGELQSGGRHRSKYFEEVKIVLARTDHTHDHMKGFCKNLQSGHFRSLTVDGLSNLLGHISNLELKPLRKYFNNEKHRGGDYWDESRITRLFERWVLREWRVGEKDKDKADGGKWPYLELKNRWNQRGGSVVDFWLETPPEYTIPPYQDNNNRRPPKCQSLLLNVGFLNRKYGGWRKWLGELKGGESVRDYLGDYEGQLKELESGKGMRYFGDERAGKPLTDSGRRSMAELDARVLQFILDRVKAEDALNLNEIYSHAKKIKQDRHKRDDESVKAVEQAKEKLAAAIKDSALPQGLAVAPDDGRDDLFPDGGFLHLICKYYKLRRRARDGRIFIHPEYRYAKEIGYKNTGRFDDKGHLLTYCNHKPRQKRYQMLGDLAGVLQVSPHHLEQFAKEHVGETTDDKLLNWLCGIDRLKANCDRAAKEQKDRRGRLKLDIRTVFGLISYRKQVESPSKKEIKEILKSSKINNAQALYDFCERAKRRCFALTETLYGDSKQKEWRNELDDNPATAVYLLSQINNIAFKERSGNANTCAVCSMDNAHRMQMVSAADGKDTTAKAQRLPAIPTRLIDGAVMRMARIVGGAIARDKWEKIEAELAADKRVCVPIITESNQFEFEPSKDELVKGQRTKPRKGKPLERGGELKIAASKDERIWAAGKGICPYTGESTPKGTGDKDHIIPRSSDRGTLNDEANLIWASDRGNKEVKKDREFSLANLDGEYKKTVFDGKDDAQIKNWIIEQISDGSGEDFKFGKYRSFINLAPEQQTAFRHALFLMGHPLRKKVINAIDNKNRAFVNGTQRYFAEVLANKLYKLAKSKGKARLLSFDYFGVEAKPNSAGDSIYDLRKMHEQYNHRIAGYAKSKDSKQQAYSHLIDAQLAFVIVADAHRGEGGLKLQIDDEVGKDPYSEETGEIDGGLLMAIQVPNDDFQLKLLSRQKPNENFSSHRAFTRDTYYADRYLPVLLKGEGDSVTVKIGFDWQNSVQIKADSDRKHKKLMGDLVALLPVCEGAQMLMGGQYGTLGDLFDAMKGVNKFSEQLRKNGYCYLIINKPKLHEFWMSQYNTKSGNDFNEDDFAYKNLQYRTQKVTINKPEDLTAHIGKADKFTKTIERQNITLPAKKDWKNCLEAWQENEARGMPFGRFLREYFKSQMKGSHQKVRKVFSLPVLAGQGKFMVRRKSWKGGYTYQIINDSDSRGPDNKPNIPVRLSDGSLGIKLAKWAQSENVVKFPSKGKYQDGETINPADWYAVDKSRFSFPNGIEKVWYRIDDSTAPSIAVKLARNGSQLQPECLEDPICQHGFRKVNARKATKENPAQPEKSPQDVRNEFFEEEIKPAKQGKIIVYKGKVYNKTIREAFRTAIVGKLQ

SEQ ID NO: 1648 - protein, 1897 aa, unidentified
  REGION 1..1897: note = Description of Unknown: Cas Enzyme sequence
MKRILGLDLGTNSIGWSLVGIDQEKEIVQIIGMGSRILPMDAGEIGDFESKGTIKSKAAQRTEYRGARRLNERFVLRRDRLHLVLNLLDALPTHYKLKIDFERNGKKCGQFKEYKEPKIAYKKISENSSKHEFIFESAYQEMITDLKEENPNIKNKKGHRIAKDWTLYFLRQKALSQEISMEELAWVLLSYNQKRGYEKLEVENDGESDKIEEKLDLVVKSCSEKYDDDAKKYFEIKLSGIDDFIYKEYSNEKLTDEKDLKEVKKISKADEFGNINKKKIEYEITDIYQLTISNVIYKKIDDGFPHRYTIQFSNGWSYEKKKKKYTSQFFKLKEKSFDYIITTAFDANGNFKERKYHEPDYDSDTSDDWTLLKKKTEKEALKFNYKHDYIDEETGSAKKYISPKIYNRLKKDSKTGERTKIIGGMFQVVERDFYREELNQILKTQKQFHEKLKDGKDGKFFRDCVKLLYPKNETHQKNLLNNKDAIRHLLIEDILLYQRPLKTKKSEIANCKYEIRHWKEEVDKNTGEITNVPYYRKVVSASHPLFQEFRIWDKIHNLKLIKLESETGDEKHTNVDVTKEHFNTPEKYQELFRVFNNRKSLNQTQFLNYCKKKIGLKNTKNYVWNYPEDEELKGNETRTSFVLRFKRCGFTEYNEFLTQEKEIELWQYLYSVNYRERTKNENASLKSFFSNFFEGYDIDELAKEKIITDFSTFPKFKSKYGAYSEKALKKLLPFIRIGSNFLKTPQDEEVSADLKAIDYNPENIKKYLDLTKENLQKLNNPERRKLESKKQKLYPAIWKHSIEQRIEEILKRLKAIDFSAEEIDYSKAVDINAVIPFPKGLFKAFRNAKERSDFQNLNLTQTSYLIYGRHSELAKAKYWTSPQQIRDEIHKELKQHSLNNPVAEKVIREMMQVVADIWCFYGDGAEKYFSKIHLEVGRELKKSANEKKKINDRQKGNKVQNKRIRQVLEEFLDNSQYKAQHQNPDHFERLKIVENAAEHTKNTNKDFFEGKSYNKKDIDDILKKPHITKSDFEKYKLWIQQGYCSPYSGRVINLTDLFNGNKYNVDHIFARASVTNNSLSNKVVCEREINEDKSDMTGRAYINKYQGKKVFVSAFKNEISIITEERYKELVKQQFSGTKKYILLAKEIPEGFTSSQLNSTKYIARKAMELLSHIVREEGEIEYRSKNVLPVTGMITSKLKQEWKLNHVWSELVAPRFKRLNKITQSDLFGEEQISKKSGKSYFDCNLHESIREKNTDFNIKRIDHRHHALDSLIVALCTENHISYLNNQNAGINPKKKKERMTAIKIQRASLKRQIMFSVLHPSNEEPKKKKWHYMLPGEFRKKESKGSTTETLGQVKYQYKNKTNLTDDYKSTILFALQDTIATFKQSDRVINKTTNRYNKTPDKNKFSIQKPDLRKDSSSNKYNWAIRRSLGKKTFYGKVNLKLKVKKNLHSSLDKIFEKPKIVVNKELRKKLIDLKKDNNKKVFIKKAKEELINEKIKLYNFTNGTKDEKVASREELNDKFNTNKIDSITDTEIQKILKNHLKKFDTVEIPFEEALNSYKAILERVEIEAIIADKETEFRDIESFLSYLKEHKFEYKKDNYKNLNVFVEQVQERNFRTEKDESGEKKHKILEHPDLAFSPEELTDMNKPENLIKLNNGKNHMPIKKVRTYTKLGTKHAVSKDDYSNKNMQYVTTDGNSNLYLGVYQRNMNKNEIKTERKFNDIDLLSLIKFLKKNKNNRFAPLPTLYFEGNKEFQLRFTLSPLDIVYVPTEDELKKQNECDPNNNNKTVDESILNFDNLNAKQLNRIYKYVDGSSKVANFIPFSVSDLIWKFHKDKDRKVISEKSNIEIDKFKNEYGLRSPQSKNQNSIDGIQIKSVCWKLEVDRLGNIKKIIK

SEQ ID NO: 1649 - protein, 1113 aa, unidentified
  REGION 1..1113: note = Description of Unknown: Cas Enzyme sequence
MKNTQQADIQMAFDVGHSSIGWAALRSTDRELPELMACGAVTFEADGCLASRRRGFRRQRRHIRSTRQRLSRIKVLIGHIRAIPGEVLEKKHAAGGGHAAPWFLAARVFRGGALCSWEQVWDVLRWYAHNRGYDGNRTWSRRDEEASEDTEKLQNANRLLLEFKQKHGRDGTMAEVFCDVSGLNPLGPKMSCNLPGDKRPKALNAAFPREVVVAEVDSFLRKHIGHLDRLDEAFRRSLMEDWTAIPCPGIKLPSRFGQTLADGTRSKGGLLFGQLIPRFDNRIIARCPITYERVFQGVLADTGSEEQAKRAADKESKVPAKDCREFLRFRWAMQVANIRITRTGGDGLRPLNADERKALDQSVPQEGYFTPTGLKASVRKITGGAPDNLEQLLLHPDAAEALLIDPARKALSRPGWGQAALGLPESLLNVLLNKLRRGAPVEMEWILAKHHAAALLFDEAAAAIADKKKKKTRAEVLDEWKTEKAILHPVSGRAPFSREVMREVDQFVFSTDRHPSEGAPDANDNGPLYRSESIREAQLRREIDEQTNNRLVRHRLLILERLHKDILKEFAESNPNRVSRITIEVNRDLREMSGKTNKEIKQELGIRLGNFRDVAEKLESDLKPHGIRATAGLIRKARIADDLGWKCPYTGQSFDALALHARTVDKDHIIPRSQRPSDSLDSLVITFSEVNRMKGGKTALAFIQEFGGQPVTGNPGLFVQTARQFEALVNSLDARRGHLDDQHRKKKRKELLLLENYVEKEFTPRDLTQTSQIVRMGAQVLERAYLDNATRPVITSLPGSVTGTIRKAWSLTGCLAAANPLVLNPDDLDSNGNPQPHAKTEIRSITHLHHALDACVLVFASLYLPREGDIWGLLVKRRLTKPEAERLREGLGGMVQIAADGTFQIAELPNVLKEQIRRRLAEKRVFQHTPSRRQGLRVEQNAWRVVEIKDGVATLRQKMRQADGTKTPKVATEKIGKVLGLFPDGGTGKLKTLKAGLVIGDNYGLALDPEPQIIPFHKVHQRLSELTRKNGGRPPRVLRNGMLIEIPIKLPGRGGDYRGVWRIKSVKLTEAYGLCLDLSTADGIALGRGNARLDVLLKSGMRLLSSPYTGIAG

SEQ ID NO: 1650 - protein, 1427 aa, unidentified
  REGION 1..1427: note = Description of Unknown: Cas Enzyme sequence
  MOD_RES 1247..1250: note = Any amino acid
MTQSERRFSCSIGIDMGAKYTGVFYALFDREELPTNLNSKAMTLVMPETGPRYVQAQRTAVRHRLRGQKRYTLARKLAFLVVDDMIKKQEKRLTDEEWKRGREALSGLLKRRGYSRPNADGEDLTPLENVRADVFAAHPAFSTYFSEVRSLAEQWEEFTANISNVEKFLGDPNIPADKEFIEFAVAEGLIDKTEKKAYQSALSTLRANANVLTGLRQMGHKPRSEYFKAIEADLKKDSRLAKINEAFGGAERLARLLGNLSNLQLRAERWYFNAPDIMKDRGWEPDRFKKTLVRAFKFFHPAKDQNKQHLELIKQIENSEDIIETLCTLDPNRTIPPYEDQNNRRPPLDQTLLLSPEKLTRQYGEIWKTWSARLTSAEPTLAPAAEILERSTDRKSRVAVNGHEPLPTLAYQLSYALQRAFDRSKALDPYALRALAAGSKSNKLTSARTALENCIGGQNVKTFLDCARRYYREADDAKVGLWFDNADGLLERSDLHPPMKKKILPLLVANILQTDETTGQKFLDEIWRKQIKGRETVASRCARIETVRKSFGGGFNIAYNTAQYREVNKLPRNAQDKELLTIRDRVAETADFIAANLGLSDEQKRKFANPFSLAQFYTLIETEVSGFSATTLAVHLENAWRMTIKDAVINGETVRAAQCSRLPAETARPFDGLVRRLVDRQAWEIAKRVSTDIQSKVDFSNGIVDVSIFVEENKFEFSASVADLKKNKRVKDKMLSEAEKLETRWLIKNERIKKASRGTCPYTGDRLAEGGEIDHILPRSLIKDARGIVFNAEPNLIYASSRGNQLKKNQRYSLSDLKANYRNEIFKTSNIAAITAEIEDVVTKLQQTHRLKFFDLLNEHEQDCVRHALFLDDGSEARDAVLELLATQRRTRVNGTQIWMIKNLANKIREELQNWCKTTNNRLHFQAAATNVSDAKNLRLKLAQNQPDFEKPDIQPIASHSIDALCSFAVGSADAERDQNGFDYLDGKTVLGLYPQSCEVIHLQAKPQEEKSHFDSVAIFKEGIYAEQFLPIFTLNEKIWIGYETLNAKGERCGAIEVSGKQPKELLEMLAPFFNKPVGDLSAHATYRILKKPAYEFLAKAALQPLSAEEKRLAALLDALRYCTSRKSLMSLFMAANGKSLKKREDVLKPKLFQLKVELKGEKSFKLNGSLTLPVKQDWLRICDSPELADAFGKPCSADELTSKLARIWKRPVMRDLAHAPVRREFSLPAIDNPSGGFRIRRTNLFXXXXFGNELYQVHAINAKKYRGFASAGSNVDWSKGILFNELQHENLTECGGRFITSADVTPMSEWRKVVAEDNLSIWIAPGTEGRRYVRVETTFIQASHWFEQSVENWAITSPLSLPASFKVDKPAEFQKAVGTELSELLGQPRSEIFIENVGNAKHIRFWYIVVSSNKKMNESYNNVSKS

SEQ ID NO: 1651 - protein, 1491 aa, unidentified
  REGION 1..1491: note = Description of Unknown: Cas Enzyme sequence
MKIISPIAIDMGAKNTGVYLNHFVQGEDPTTSGNSRGRTIVIDGKKITWSQASRTQKRHQVRTGKRRKLAKRMLKLILKSVYGLRPERQQAEFLMGLLNRRGYTYLVEGLNEEAVQKQFVAEYFAEKHGKFFKSAGTFFDDFLELSNDVGKSQKLLAELTLSKIESKKALEKALNTAFDSDDKQSFADAYDNIKTVLDKQIKSEVDGHKYRADYLGNIEADIRNSALLKPLFTGDFTAKKLACLIGNISNLQLRVLRKYFNDAGMKTGDKWVPTKLHALFFRWVWSWHVKQVSHKENRKKLLALKAKDVVEILTTSDPALTIPPYEDQNNRRPPKDLTLRLKPSGLDENLKGWESVVRGLIKYYCLPPVCKGGIESIDIEEGLKANVRPQKITGKLPVALDRQCLADALHRIFDRTAKLDPYQLRRLRAAGNATNTKCSRELLDKHSGGRAADVIELAKKYYDEVDTAKQGLWSDSAGSLFFRCNTNPPHKNKISHHLIGHILGEQLDKKTLREFLVGCWRKKVGRSTITGIAKRTEDERKKYGNRFKHLVERQVWLKAQPGRELDNKEKHGVDGSGILKIHADCLTAADRIAEHFGHDDAKKKIYANVFSLAQLYNILETQIKGFSRTDRWNTIENAWRSRKDERDENGEPIANAVRLTADSIRPFDGLLDRIISRQAREIAMMKIEQLQELGVAQSEPVFVPIFMEQNRFRFEEDMADIKANKKKKGAAQKNLAVQEKRWNSKSERIKGASNLCPYTGKEITAGEIDHIIPQSQSKQGGDVVYNSEINLIYCSREGNFRKGADPYDFDRLNGNYLKSVFGTADKEKIKADIRDFVGSLDKANFAIHKLDGQGQKYLRHALFMRELDNETFPLLNMRLKTLVNGTQGYLGKQVRKLLQNDYPQVEVKTYQVGAQEVSDLRKSLGDAEPGFAKSERQGAFSHVIDAALTMAAALQEPKISAKLQTVDVSALSERSEWLKELPPIQVDVQHIERKPKYRKDLSSTQIFKEALYGERFLSILLDGAGVYMGFDMSNCAPIKTKQRAYFDAMKPFLYFGSGKNMRALNEDLDHWQQQAKESKRGYLYFPVNKGKSLAHLQKCAKAPCAADEADQAGKLNELRYCVEKKNIKSVLLKGSQDKTFIRSLNEIKFAIVKGIHLPAKADWERLIAHPVRDRLGKSTTLKDCFGKKERVLVADPAAVNLWADLNKESGLNIDFLKENLLKKNPQGELAQVPGIIPMGVFRSKMQENQRLAPLDDSSVLGNWLGKDLEIKEERIPASSWENLQESFFARRQNTGLHKSVRKVYSLPIVSAPSGGFRVKRENTMTKETVYQVSSVDGFAASGFDPTMKHAALIDGLQKSKNIAPVGALYQEPPAAVIFFDERREIDLSGSQLESKISSLHYALGSQGRFHIRIAMPFQNFQKLDSNIGDWKEVSVELAKPAHFTTYFSSDLLGKPRSVLRVEKISAEQVVFSYIVNSTSKEMKTAFKKAQS

SEQ ID NO: 1652 - protein, 1083 aa, unidentified
  REGION 1..1083: note = Description of Unknown: Cas Enzyme sequence
MRLGMDIGTNSAGWAALKLDADGRPCGVIGLGVRIFSDGRNPKDGSSLAVQRRVPRGMRRRRDRYLDRRSDLMHALIALGLMPDDEAERKALEALDPYALRAKALDTPLTPHELGRALFHLNQRRGFKSNRKAGGKVNEDGVIAEGIKALNALLADAGARTLGEFLHQRHGQGEMVRARPEAGFYPSRLHYEKEFEAIRAAQEKHHTLRADQWDTLSDIIFHQRPLKPVDPGWCLLEDGERRAHRALPCAQDFRILQEIANLQLAAKGAAAMPLTKAQRDKVLQELRTRKDLKLESLLKLLKLPADTHVNLLGENRKALKGDETADRLSSKALFGKAWHDLTFERRTEIVRTLLDTEKPEDIAQIAQAEWGLGADAAEKLGTISLPEGYVRLSEKAITKINPIMEDQGLNYSEAVAECPDYAHHSDFRPDRAHDRLPYYGAVLTRQVVGGDVTKPKSDEIGHYGRIANPTVHIGLGQIRRLMNRLVDNHGKPDEIVIELARDLKMSAEEKKEEQKRNRENEAANRHREEQIRAAGDVPSPLLLRKLRLWDEQTYGLHKVCPFTGVPISFEMAIGDATEIEHILPFSKTLDDSMANKVLALREANRAKKDRSPYDAFHADPKIGPHQYVYEDILLRADSLPKKKRWRFHPDAMERFANEAEFLDRQLNETKYLSRIARQYLAHLYNEKAEKRLRVRAIPGRLTAMLRGKWGLNALLRGHNVDGGDDDGPARKNRDNHMHHAIDAFVIALTDQRLLQAIARRNSDSERKRLIDDVPLPWEGFTPDELRPHLERLVVSHKPDHGTYPWMAEGGRKGVNTQTSGALHNDTAYGLVKPGKNGNWQVVSRAPLSAFATPEKMDKALPDIRDRALREALTVAWEDFQARPAPDTGGDDKRKKKNAAMAFADHVATEGIDLNGRNVKVRRVRMTEELDVVVIKDRKTGKPYKAYKPDGNAFAELYELPDGKWKAVVIRRFDANQANFDPVKFRPHPAAKKIARLHIDDMVAVGEGDARRILRIVKMSGQTITMADHFEAGALKARDADKSDIFKYFAPSASKLKEFGFRKIGVDEIGRLTDPGPRKYGPAR

SEQ ID NO: 1653 - protein, 1079 aa, unidentified
  REGION 1..1079: note = Description of Unknown: Cas Enzyme sequence
MHWRLGVDLGTNSLGWWAFRVTRDGTGEKARWRLIESLDGGVYIFPDAREPSKNGRVGDSNAVQRRMARGMRRNRDHGKNRIRHFVRDLTALGLLPEDAGERKKLFQTPSKTTPETDAYNPYKLRAEALSRPLSSHELGRALMHLGLRRGFKSNRKKASDNDGGNLKDRIEALKSQLGNRTLGQYLWDAYQDEQKREHDGAFRQGIRFRAENEFYPDRTTYAAEFAAIRDHQAPHHTLSDEDWDRLRERYVLFQWPLKPVERGRCAFYTDQPRHWKDTPTAHDFRLYQELNSLQWIDANYETHALEAEQRAGVLQKLMSQKSDVTFKSLRKLKRTDKTLLFPKDSRFNLESEKRKALLPHKIAATLIADPDLAPLWEHRIEHEDGQLDDIFEVLHHAEDDHKAQVDLISNFALDEDTAVKLTKLKLSSGTTHVSRRFMDQIVPILADQGLVYSDAVRELTDDEGNQLHHSMRDDGRRWDRLPYYGEVLSSSMLGADPAADPLKDPEKHFGKINNPTVHVALNSLRRVVNTLTDRFGAAPVEVHVELTRDLKLPRKRRDEITVDQGKRESENKRIKKLCAEHGIHDPSALDVKKVKLWEELGKDQFARQCVFSGKTISAAQLFNGEVEIEHILPFSRTLDDSLANLTVSMRWVNRLKGSGTPYEAFHGDRYADQGVIWDEILQRADRLSKPKRDRFGPGGLARYEKDGGFIARQLNDTAYMTRAATRYFQALNGVEHVLANPGRLTAMVRGKWGFNGILNDDDRKTRTDHRHHAVDAAVVALVDRSVLNEISRLTARGADDLVRIALPELNGDLRKAVRARVPGIITAFKPDHGLQGRMFNDTAYGFVSQDTRDPDLPEHALVTRKALAGLTPKECEAVRDPILRDRVRDHLQRAASAGIKHDTALIEFSKNTGIKRVRVLIANKSVHPISSTPYKGYALESYACCDIWWTPPKKKRNGTFTKPTWEGKFWTYADTLSPSSGFDRKNPKRSQFPERHPAGRFVTRIFKDDVIAFEENGQTHIMRVKGLQASANRFDISPHFSTDAAQKPRGINVLGELGLRKLFITPDGRILESKRGGSS

SEQ ID NO: 1654 - protein, 1063 aa, unidentified
  REGION 1..1063: note = Description of Unknown: Cas Enzyme sequence
MGWRIGIDLGTNSLGWWVYEVVKEGEHWRVLRSVDGGVLIFPDGREPAKGGRVGDSNAVSRRISRGMRRNRDHGKNRLAALVNDLMEAGLLPADKTARDRLFQTPKKADGEPERFNPYRLRAEAMERTLNAEELGRALFHLGLRRGFKSNRREASEEDGGSLKKRIDDLRQRLGKRTLGQFLWDKYQNEREREQEGGQAGGIRFRGEEDFYPDRAMTEAEFDAIREKQEPEHGLGGADWDRLRDRVLFQHPLRDVERGACEFFIDQPRHFRDTPITHDFRIYQELNNLRLRDRDGRDTALDAEQRGRLFDLLMTRKSEVKFTAMRKEKRADKSPLFPRGSTFNLEGEKRKGLNPHKFAALANSEPLLKPLWQARDDDNRLFDDVIEFLHKADDHATALAGLCGDFNLDEGTAELLASLKLSPGTSSVSRKFMEQIVPILRDQGLIYNEAVAELTDDDGNKLHHSLRDDGRRWAELPYYGEVMPHQMLGADQNADPGTRPEKHFGRINNPTVHVALNQLRRLMNSLIERFGHGPAEVHLELVRDLKLSRQARDEKTKEQAKNQRENERIRKFCALQGYPDPSARDIRKVKLWEELDKNDLTRRCVYTGQNISAAQLFNGDVEIEHILPFSRTLDDSLSNMTLSMKRANRLKGNKTPHEAFGQDQHAGKDIRWSEILDRIETLHGNKKWRFTEQAMDRFDEKNSGFINRQLTDTAYMSRIAQRYLGALETVEQVVPNVGRLTGMVRGKWGLNGFLGDHNRKVRDDHRHHAVDAAAIGLVERSLLQGVSTQRGADDRVHIRLPEIDADLYDAIRARVPTIVVAHKPDHGLGGKMFKETAYGFIAPDRRDPDFPDHGLVARMALAALTPKQCATIRDRKLRARVAACLEGAKNAGVDHDKALAAFARDHGVKSARVLVKDQTVVAVPSAPYKGYAPESYAFCDIWRAPKGGPGKWAKDEYVWQGVFWPYAETIGGEVDKGRKKPHPAARYVTRLFKDDMVAYEDGGETRIMRVAGFSTTNNRIDLRPHNLTDSPQRYFGINVLGAKGLRRLHVTADGRILDHCRGRS

SEQ ID NO: 1655 - protein, 1444 aa, unidentified
  REGION 1..1444: note = Description of Unknown: Cas Enzyme sequence
MNRLVSPISIDLGAKNTGVFLSHYNEGEAISSNHSQAVTLVMPEDGGGMTWSQQNRTATRHRVRGNERRKMAKRLLKLVTSQLCMDNKITLSELQWGKAWEALSGCLNRRGYNRLDIELDETSIDLCDPDWFAEVFPAYFTTCESLAEQWARMLENPKMLRDFSQDPLMALTPKDLKKLHLAGYDKDEQNQIAKAHSTVRQAVHNVLQEQDFGHKHRRDYLSAIKLDMHKDSRLFPITEIIGLEPLWRLVGNISNLQLRALRWYFNDKDMAEADLWKPDSLQVVLERWLQYWRPESVAEKEQRKQAVVYLHKSNDPLVFLTGLDPEITIPPYEDQDNRRPPKDQTLWLSPSALTSEYGDKWTIWAQKLLQANPGWDDGLDVILSYFDRKSRLPKVVRGKTIESDVGAAELKASYVLQRLLDRSRKLDNYAFRLLIRGRHTQSASQPLDELTKDLGSQHIELFLSFCERYYSEVDLARQGLWRADTAGLLERSDLNPPHKSKILYQLVGSVLGEKLDKLSLGEFRSNLWTARKLPRGSTLKGACAVIEECRKNQGNLFNERLRRLTYRVDNQGENAQQFTGDDKVIWAAWQKTQQAADAITEHFTHTAEAKAKYANPFTMSQLYNLLERDRKGFSNTTLAAHLENAWRMTDAPGVIKSAYCSRLAADSIRPFDGVLKRILERQAWEIANYKATQLIQQEITHSTISLPILIEENRFAFSEALVDVKKAGAPKRKRFSDRLQRQASRWEEKDIRIRSASQGICPYTGEPISTLGEIDHILPRAASRSSRGTVFNSEANLIWCSRKGNQDKADKRYLLQDLHAVYLSKQFGTSDIVTIQHAIEATVNSLDRAFVFDALVSDEQVAVRHALFLPSGSPAYQRVEWQLARQMSARVNGTQAWLTRAIMEKLDVLLMPWAKEHNNQIIYSAARISAEDASAIRKQLGTFQDEFSKQEVQPIVSHVLDALCVFAAAAATPKTMPILAQGEGLSEHMPWVAKAMPEVVTVSRVERKKRYDKTNVDGQPLFKKGIYGEEFLPLWISSESILVGFDPSKTLIKAKASTCEDVYCLPLKVEGAHPELLLDYLTPLLMHPGNVEAAQKSQKPQRFIIDKALAFELLNRVAKQPATDRDLQQAKLLDALYYNTVREEVWKGVYNAAKKTFNNDEEILKDEKFKMKVNFSIGRGKNADVQIKGQLFLPAMRDWQRFIEQPELQNLIGEKCLLPQNHRQICEQFFNIKQAKNRHKKVKREFSLPVIDTPSGGYRIARMDPSGQKIWQMQALDGLSAIGFEVNAGQIDWGKLAPLPSLERSNGVVGKGQRYSPPTDMVVKFDQWLPLEHESIPSETDVEMAPGTKSRPYIRVSQPFATFALWLEGAIETVPTSPMRLMPEIKVAPKPFSSNHGCKLLGKPRSTIFIEQVGKVVNYRYEVSNGNSEMKSAYQKAYIKFLKR

SEQ ID NO: 1656 - protein, 1046 aa, unidentified
  REGION 1..1046: note = Description of Unknown: Cas Enzyme sequence
MERIFGFDIGTTSIGFAVIDYDSEQSTGNILRLGARIFPEARNPDGTPLNQQRRQKRMVRRQLRRRRMRRRALNEALHEAGFLPAFDKAFRKSSETKSAWQLAMESDPYELRRRGLEEGLSAYELGRAIYHLAQHRHFKGRELEESDTPDPDVDDEKETANEREATLKALKNEQTTLGAWLAHRPPSDRKRGIHAHRNVVAQEFEKLWEAQTKFHPALKSEELKARISDTIFAQRPVFWRKNTLGECRFIPGEPLCPKGSWLSQQRRMLEKLNNLSIAGGNARPLDAEERDAILSKLQQQASMSWQGVRSALKALYKQRGEPGAEKSLKFNLELGGESKLLGNALEAKLADIFGEDWLSHPHKKEIRNAVHERLWAADYGETPDKKRVIILSEKNRKTRREAAANSFVADFGVTEEQAAQLQALKLPTGWEPYSIAALNLFLAELEKGERFGALVNGPDWEGWRRASFPNRNQPTGEILDKLPSPAAKEERDRISQIRNPTVVRTQNELRKVVNNLLGLYGKPDRIRIELGRDVGKSKREREEIQSGIRRNEKQRKKATEDLVRNGITNPSRDDVEKWILWKEGQERCPYTGDQIGFNALFREGRYEVEHVWPRSRSFDNSPRNKTLCRKDVNIEKGNRIPFEAFGHDEDRWSAIQTRLQGMVSAKGGTGMSPGKVKRFLAKTMPDDFAARQLNDTRYAAKQILAQLKRLWPDMGPEAPIKVEAVTGQVTAQLRKLWSLNNILSEDGEKTRADHRHHAIDALTVACTHPGMTNKLSRYWQLRDDPRAEKPKLTPPWDTIRADVENAVNDIVVSHRVRKKVSGPLHKETTYGDTGTDIKTKSGTYRQFVTRKKVESLSKGELDEIRDPRISGIVVAHVAERGGDPKKAFPPYPRVSPDGPEIRKVRLTSKQQLSLMAQTGNGYADLGSNHHIAIYRLPDGKADFEIVSLFEASRRLAQRKPVVRRVRTDGAKFVMSLATGEAIKFPEGAKKGIWIVQGVWASGQVVLERDTDADHSTTTRPMPNPILTDAAVKISIDPIGRVRPAND

SEQ ID NO: 1657 - protein, 1388 aa, unidentified
  REGION 1..1388: note = Description of Unknown: Cas Enzyme sequence
MKKILGLDLGVGSIGWALVNEAEFENEHSSIIKLGIRVNPLTIDETINFEKGKSITTNADRTLKRSMRRNLHRYKLRRENLVQVLKKCGIINDDTILAENSNYSTFETYRLRAKAVNEKISLHEFARVLLMINKKRGYKSSRKAKSTDEGQLLDGMDVAIKLYEENLTPGQLCLQILKSGKKRLPEFYRSDLMNELNKIWDFQSKFYPDILIDDFKKQLEGKGKNDASKNFLGRFGIYTADLKGLNKRTELFQLRSHAPSKQLTLEEVALVISEVNGNIHSSSGYLGDISDRSKELYFKKITVGQYLIQKLDENPHFSLKNKVFYRQDYLDEFERIWETQAKHHPILTPELKSEIRDIIIFYQRRLKSQKGLISFCEFESEIIEIEENGKKRKVTIGNRVCPRSSPLFQEFKIWQTLNNVKISSGKEHWERDLDEDEKLMLAEELKFRDQLVDKDVIKMLFPGRQDISINFKKLDGNKTISALYNVYAKIIEMSGHDEVDFSKTTFSKVHDYVQKVFNGLGFNTQILNFDFEGDQMDPDKHELYRLWHLLYSYEGDSSKTGNEGLINAISRRYGFDKEYAAMIANVVFQDDHGSLSAKAIQKILPFLKSGYAFAGRKEGKLKESACEEAGYKHSIDSLTKHENEQKELLPKLEILPKNSLRNPVVEKILNQMVNVINAIIDEYGKPDEVRIELARELKRSAKERESMTSNINKSNIEHERIRSLLINEFGLRHVSRNDIIRYKLYEELEFTVNKTLYSNTYIPREKLFSHEFDIDHIIPQSRLFDDSFSNKTIELKDVNIKKGNQTAIDFVLQEYGEQELGQYHARLDNMLKNGKISPVKYKKLKMKGSEIPQDFIQRDIRDTQYIAKKAKAMLETIVRSVVSTTGSITDRLRQDWQLIDVMKELNWQKYDKLGLTEVFENEEGHQIRRIKDWTKRNDHRHHAMDALTVAFTKRSHIQYLNNLNARSDKSSSIYGIEAKELDRNEKGKLLFKPPIPVKEFRAEAKSNLESILVSIKAKNKVMTNNVNKIRKHGGHESVVQLTPRGQLHNETIYGSRLEYVTKTEKVNAGFDMEKIQSVANKKYREALMKRLEQFENDPKLAFTGKNSITKNPVWIDDMRTISVPEKVKLATLENMYTIRKEISKDLKIEKVVDKKIRKILQERLDKYQGDANKAFSNLNFDPIWLNEEKGISIKRVTISGVSNAVALRARKDHLGNKIMDEQGLSLPVDFVSTSNNHHVAIFKDGNGNLQEHVVSFFEVVERVRQDLPVIDKHFNEDEGWQFLFSMKQNEYFVFPNEQTGFNPIDKDLLDENNYPAISQNLFRVQKISTKNYMFNHHLETKAVDGEMLKNKKQLVDITFKSIRTPANLEGIVKIRINHIGKIISVGEY

SEQ ID NO: 1658 - protein, 1091 aa, unidentified
  REGION 1..1091: note = Description of Unknown: Cas Enzyme sequence
MASAKEASQNYILGLDLGSASLGWALIALDGSDRPNRLLHTGVRIFEPGVDGTTLEIEQGKDKSKAVERRTARLQRRQLRRRAYRQGKLFLLLQQHGLLPHRESSKPLTPSEERNDVLTALDQQLCLKWRIPAAASDFAQLPLYQLRKAALDNKLEPYEFGRILYHLSQRRGFKSNRKEGRKESDKELGAVKTGIADLAQKMVDANARTLGEYLSGLDPHEIDQNVRRRWTARKMYEDEFAAIWAKQSGHYPELLNEELRREVTHLLFYQRPIAAQSHLIGKCELEGNNQRRAAWATLEAQRFRIMQKVNDLKIIFPGNPIAQPLTPEERKFVFELLDREGDQTFANLRKQLKYDKKSEFNLERGDEKRLRGNRTNKAMLSVFGERWNTLSADEQKQIVEDWRTSESDEALIRRGIAYWGLDEIAAQKWADAKPEDGHCALSRKAINRLLPLMFDGMSFKEAETRVYGSRFSGGEVLDELPPLHVHRKITDSLYTEQLLTKLRLGAIRNPAVERALTELRKVVNALIREYGKPHEIRIELARELKKPRKERESATKQNRTRQKERETVKADLLKDCGIQNPSRSDIEKALLHAECGGICPYTGRSISLSSLFGEHPQYDVEHIIPLSRYPDDSFQNKTLCWHEENRNIKRNRTPFEAYGADTARWEEMQTRIKAWKPGNPGKLKRFMLRSEDELEEFTARQMNDTRYASVLASRLLESLYGGRDVQTPTGIRQGIFASSGKVTATLRRVWGLEAILREAVPSTNGQSKGKPRTDHRHHAIDAITIALTRQSVIQSMARSASLDKRLEQDSRAFRCIPSPWPNFIESIRPHIEQMVVSHRPEHKMSGALHDETNYGTPYNLNGKTVVHIRKPISELSLKDIDNIVDPAVRAAIKQKAESVAGDLTKCESNNDWPSLQSKDGRQIPIKRARMRKVLDVTAIASNERQRFVSVTNSHHTAIFALAEKDCEVEWEGIPVSLYEAMERKRKKQVVINRNHPDGSPWQFKFSLMGGDTVELHRNCSHKDGRCIPELYRIRTIAGNGQLSMVKITDARLIKQIKEAKEWWSPRADALRKLDCCKVTVDTLGRVHTAND

SEQ ID NO: 1659 - protein, 1107 aa, unidentified
  REGION 1..1107: note = Description of Unknown: Cas Enzyme sequence
MRKSEFVLGLDLGVTSIGWALADLEERRIEAAGVRIFEAPMDTAKFEAGEPGGSRAVKRRKSIHQGRQIARRKARHRDLYIALQDWDLLPFAGRKAERRHEVLTELDKTLNSTWREKICEKSPEIADPGQILCYYLRATALIAKLEPLELGRALYHLGQRRGFKSNRKEARSALNAAESQKDEKERSRIKQAIKTLQNSLDETDNTLAQHLSFVNPHISALRNRKRSDIAAIWTERKMFKQELDRIWSAQQVHYPSVLTPERKRRLENLMFWQRKVRTGKPGNCELERTPPLPRAPRSSLLAQHFRLVQTLNNLRVRENAFAEYRRLSREERDSLLLQLSTEITKTKNKKPPELFGLRFSDLKERLRLNRTAKFNLDDNEESQYLRGNRTNAIMARAFGAEQWGSFPDQKKRSIVRRWISESYPEKLLEIAKTCWSLTDSEALQLASLEPEDGYAALSHVAMLKLLPLMESECLSYSEAVARVYDNCGQELEYLPWVEEVLPQIPNPVVKRTLSEMRKVVNAIIRRTGTPKQIRIELARDLKRNAEQRARYQDQQKTRTQERATARKWLNDIGERINGDSIEKALLYMRCKVCLYCGNPLGSLQHIFSESSGVQIEHVLPRRIHDDSFSNKVLAHHACNSKKGDRTPFQAFEGTADWDDMIVRVACLRDEPLLNKFKMTEEQLAEFSNRHLADTRYISKLATEYAEKLYGGRDAVVPWEDRNRRCVYASSGVLTANLRKRWGLNAVLKDTYSNENGTDAKARTDHRHHAIDAIVIALTTESMIQQASIDSQRHDRASGFLAPRYFTPPWPRVGDVEDQVVAFRREIRDVINEITVSHRVDHKLNGQIHEETFYSPKVDGQRFVYSRVPVFEFTLEQIEDQNNKIAPEIREALRDHFYRIGCSDPTVKIRQFEKDVPYLEKNGRRIFIRRVLKAVAASSVQTLDRRKGQPSVKLGENHHFVILEHTNDDEEAEWYTPGAVSRFEVMRKRDAARRAGMKQPYSIVEKSDGPKSRYVMHLMKGDAVEMLNKITDTRDIYICTSFSDGDYAFLRHNVSVPSPKSLNLTLSQLRKKMNDNGDRVRISLEKMRQWGCRKVELDHLGHWKYCHD

SEQ ID NO: 1660 - protein, 1083 aa, unidentified
  REGION 1..1083: note = Description of Unknown: Cas Enzyme sequence
MSVSAGSEHPYVLGLDLGSASLGWALIGIDAIETPVSLIRAGVRIFEPGVDGSALDIQQGKDQSKAVDRREARLHRRQLRRRVARQRELFGVLQGAGLLPTCDVPGAGIGSEQRHRILNALDMALTVRYRTGADKATFDQMPLYVLRKKALYEPLAFDELGRVFFHLSQRRGFQSNRKDVKKKTKEDEDQGQVKSAIYELEQAIQASDAQTLGEYLAGLDPHEQKVRRQWTGRRMFKEEFERIWVAQQAYHPSLLTPELHDRVWGLLFDQRPVSAQKHLVGKCELEPDKRRSPWAALPAQQFRVLQKVNDLRLLQENGKETPLYPQQRAAVFDLLENHGTQSFVKIKQHLGLPKTAQFNLERGKAKELKGNVTAQSMRKVFGVRWEEFSEGKQNQIIENWRNSEKDEDLKREAIEHWGLDEASANVLLAEKAPADYCALSLTALSKILPLMRAGKSFKEAETEVYDNRFSGAAVHPFIPVLRPHRKHFHNSTPPPQDPLMASIANGLRNPAVERAITEMRKVVNAIVREHGRPYEIRIELARELKKPRSKRLDETANNRKREAENRALAKRMHEECGIPQPPSRKDLEKLPFSRLFDDDNGFDVDHILPRSRHPDDSFQNKVLCWGEENRMHKRNQTPYEAYAEQDQERWQEILARVTRWKNPGKLRKFEIRSTDELEAFSSRQLNDTRYTSLLAARLLSTLYGGRDVTENGKNRQVIFASTGAVTATLRRNWGFEQILRGIIPAEPGESSGKPRTDHRHHAIDAIVIALTRNNVIQAMARASALEAWQSGTRSWRHVPQPWRTPDFFRSVEQQVAEVLTSHRPEHKVGGELHRGSNYGRPYMYNGASTIHTRKLISALKIEDIDADDVIVDRVIRDILRAKLAELGGNPKAFEKPENTPYMTTPAGKRIPIRKVRIRETRNPLRVGEGPRERYVASGGIQHVELFVARDEKRREHWLSHVVQTTEMYDLFPKRDHRPGRPKAVTKSIPIRRQMPGQPEAEFLFSLLKNDTIELEKAGCREIFRVKKFEATGKITFVPINNAMPDTLQYGTGSAWSKMPTTLKVMSPQKVVIDLLGRVHPAND

SEQ ID NO: 1661 - protein, 1065 aa, unidentified
  REGION 1..1065: note = Description of Unknown: Cas Enzyme sequence
MSPALEPSKKYVLGLDLGSASLGWALIALDDTYNPTSLILAGVRIFEPGVDGTSMDIEQGKDQSKAVERRTARLHRRQLRRRAARQRDLFRLLQRHSLLPASETLSGSPEEQRHSILNELDQQLAHKWQPAYPGDRFTQLPLYYLRKRALDERLEAHEIGRILFHLIQRRGFLSNRKENKQNPEQKKELGQVKAEIHSLEQEIQNSGARTLGEFFAGLDPHAQKVRRRWTARRMFQDEFDKIWKAQAIYRPDLLTPELHDEIAHLLFFQRPIAAQTHLIGKCQLEPGKQRAPWAAMEAQRFRILQKVNDLRLINPGSLISDPLTEEERQRLYHLLDRDGDQTFKAIKKYLSFPAEVQINLEKGDEKRLRGNRTQAAMRKVFGDRWDTIGAGKQHQIVENWRNSESDEALIREAVEQWSLDDAAATLLSEQIPEPGYCAVSLTAISKMLPLMQCSKSFKEAETEAYGARFSGGVVFDILPEVRKQLESLRNPAVERALTELRKVVNAIVREYGKPYEIRIELARELKKPRQERIEATKKNRTHQREREEIAIKIQRECGRKDDPSRKDIEKALLYEECGGICPYTGIQIPFSTLFDNSEFDVEHIIPRSRYPDDSFQNKTLCYLPENRDVKKGQTPWEAYGKDEQRWAEIMTRVSSWKNRGKMARFAIQTEEALGEFSARQMNDTRYASVLAARFLGALYGGRDVVDGGKVRQVIFTSSGAVTATLRSSWGLEAILHEIVPAESGESRGKPRTDHRHHAIDAITIALTRPSVIQSMARAASMEPWQKDARAWRKIESPWKNFVPSIRPHIEQMLVSHRPEHKMSGELHKGTNYSAPYKYKGKSTVHTRCALSALSPADIADDEVIVDPAVRDAVRRKLEELGGNPKLFDRPENVPCLASRDGRLIPIRKVRIRETKNPLKVGQGIRERFVASGGIHHVALFVSRDERRREKWDSCVVQITEAYERCRRRLPVVLHELVDVTDAEFIFSMMKDDTIEVTDTNGTRILRVKKFGDNKQVWFVPVNDAHDDAQQKKLGITWSRTPNSLKELRPRKVVIDLLGKVHPAND

SEQ ID NO: 1662 - protein, 1081 aa, unidentified
  REGION 1..1081: note = Description of Unknown: Cas Enzyme sequence
MSPAMEASQKYVLGLDLGSASLGWALIGLNAAGDPEHLIRTGVRIFEPGVDGSSLDIEQGKDQSKAVERRTARLQRRQLRRRVARQRELFTELQRVGLLPIGSTGQGAGSEQRHQLLNNFDQALTSKYLATDGEAFAQSPLYFLRKRALDHALEPHELGRVLFHLSQRRGFKSNRKETKKAKDDEDLGQVKADIHSLELAMQEAGARTLGEYFAGLDPHTEKVRRRWTARRMFEHEFELIWSAQLPHHTSVLTQELHDRIWILLFFQRPISAQKHLIGTCELERGDEKHPPKRRAPWASMAAQRFRMLQKINDLVVLNAPMRTSRKLTPEERKSLYDLLDREGTQTFAAIRKHLDLKGTTFNLEAGGDKTLPGNRTLKSMRNAFGSAWDSFSEGKQNQIIENWRNSESDDLLIAEAVEHLGLDATSAKTLVDEKPQADYCALSLVAINKLMPLMLDGKSFKEAETEVYGNRFSGLPVHDILPPVREALPTLRNPAVERALTELRKVVNAIVRAYGKPYEIRIELARELKKPRQERVKATVANRKREAENKLLAKRMADECGIQNPSRKDLEKARLWAEQQGECPYTGKRLSFSRLFDDPEFDVDHILPISRHPDDSYQNKVLCCLNENRMQKRNQTPYEAYSSDAERWRVILARVAKWSNPGKLSKFEIATADKLTEFSSRQLNDTRYTSVKAGEMLSLLFGGRDVTSGGVTRQAVYASTGAVTATLRRNWGFELILQGLVSPEAGETRGKPRTDHRHHAIDAITIALTRQSVIQAMARESQLAPWQPGTRAWRNIPKPWTSPEFEHELQQQMAEMVVSHRPEHKVSGELHKGTNYGKPYLLNGKSTVHARCAVSALSSSDIEADDVIVDRAVRDAVRTKLAEVGGNPKAFDKPENLPRLLAANGKAIPIRRVRIRQTKDPKNVATGSRERFVDSAGIHHAALFVVRDAARKETWISEVVQTTDVYDRARRRDKRPGRPKNPVYGVAVSRVSKEYPEAEFLFSLMKDDTVEMDFQGERAIFRVKKFYANGQIWFTSANNAQDDAEQKKQKTTWSKYPNTLRPLNPRKVVVDLLGKVHPAND

SEQ ID NO: 1663 - protein, 1080 aa, unidentified
  REGION 1..1080: note = Description of Unknown: Cas Enzyme sequence
MSASSVSCQKYVLGLDLGSASLGWAVVALNDANEPTHLIRTGVRIFEPGVEGTTADIAEGKDQSKAVDRRTARLHRRQLRRRAARQRDLFKLLQQQGFLPVQDEGSTSASEERHNILNDLDSRICAKWSANSDTDSFAQLPLYKLRKTALDEKLEPFEIGRILYHLSQRRGFKSNRRDTPKNADEEKEQGRVKTGISELQSAMEQSGARTLGEYLASLDPHKVGENVRRRWTSRSMYECEFNQIWEAQIAYYPESLTPALQKQIGLLLFFQRPIAAQGHLIGKCELEPNERRASWATLEAQRFRILQKVNDLQIIYPGNPISQPLTSPEREFVFNLLDSEGDQTFANIRKHLQLDKKSVFNLERGDEKRLRGNRTNVVMRQAFAERWGAFSEEERKQIVEEWRTSESDEWLAKRGVDHWGLGPEIAATWSTKHPENGYCALSRKAIARLMPLMSEGVSFKTAETQLYGDRFSGATALDQLPVVKQYLTTLRNPAVERALTEMRKVVNAIVREYGKPYEIRIELARELKKPRQERVSATKANRKRQKEREDIMQRILQECGIPKERQSRKDIEKALLHVECGGMCPYTGRSIRFSDLFHDSQFDVEHIIPRSRYPDDSFQNKTLCYLPDNRERKRNKKPFEAYGSNEQEWAEILERVRKFGNAGKLKRFMLETLKDIEDFSARQMNDTRYASVLAGRLLGTLYGGRDVQGDVGMRQAVFVSSGAVTATLRRSWGLEAILHDLVPDTSGQGKGKPRTDHRHHAIDAIVIALTRQGMIQQMARAASTEPWQDGERTWRKIESPWRDFVDSIRPHIAELVVSHRPEHKMSGELHKGTNYSVPHLHKGKLTVHTRCALSALCAADIAAEDVIVDVAVRDAIRKKLDELGGSPKLFEKVENTPYLAARDGRQIPIRKVRIRETKNALQIGHGATARLVASGGIHHVAMFVTRDKKRCEVWKSNVVQITDIYQKLPRHDRRKGRPKSPSQGPVVFRGFPDDPDAQFVFSLMKDDTVALDVNGQARIFRVKKFSDNGQIWFVPANDAHDNATQMKSGITWSKKPNTLKELHPRKVVVDLLGKVHTAND

SEQ ID NO: 1664 - protein, 1109 aa, unidentified
  REGION 1..1109: note = Description of Unknown: Cas Enzyme sequence
MRSSALTLGLDLGVTSIGWALANIEEQLITATGVRLYDAPINLAQFEKGEPGGSHAAQRRQSRLQRRQIRRRQTRHRNLYLALQSAGMLPFAGKRAEDRHKKLEKLDIELAQVWKPVMRTEALEIGDPDQVLCYFLRAVAATRKVDLDALGRALYHLGQRRGFKSNRREGRASSITGETKKAEEERSRIKLSIKSREESLQRTGLTLGQQLALVNPHVSAIRNRKRSDIEPIWTSRRMYQDEFERIWTTQAPHYPELLTDDFKRCIEGVIFKQRDVSTGKPGNCELERNPPLPRAPRSSLTAQRFRVVQTVNNLKASDPQKRLSQEAWQEKQRALILLLETAISKSKGKRVAHDRFGLTFKDAKAEMGLSPRAKLNLDEENASSYLRGNRTNAIMTRAFGHEIWSAKSEAEKRRIVRRWITEPSPEKLIRTAKEQWSLPDNAAEELASFEPEDGYASLSHVAMHKLLIPMEERGLTYAEAVKEVYGNVLSGGEVHKYLPPVEQIFPSLSNPVVRRTLTELRKVVNEIIRGYGKPLQIRIELARDLKRNAEQRAKLHSANKERASERIAAQRWLEERGERPTDRSIRKVLLYRRCKDCVYCTKPLGSLEDVIRENSAIEDEHVLPKRCNDNSFANMVLAHRACNLRKGDRTPRQAWDPSPEWDEMLKLVQSLKDKALLDRFTISTETELQQFTNRHLADTRYISKLAAEYVELLYGGRDAAVPWEDRSRRCVYVSSGMMTAELRKRWGLQNVLQERNQKPDKKTPKARDDHRHHAVDAIVIALTTERTLQQATFEMQRYDRNEGHLAPRYFSPPWPQFGEIENRISSFRQEIKATVKAITVSHRVNHRLQGELHDANPVGKPRIDREGIFINTRKEVLRLSNKDIEAIHDEAVKAAVKQKAEELGTLELCEKQKNWPTLRKSDGSLITIRKVTLKSRRNKEPLGIGNNRNKRYVIENNNHHVVIFKQTTTGDGARWYTHGPVSRFEAMTRLADAKREGTKPPHQIISIKDGSNSAFVMSLMKGDCVEMRDPMNDVIDIYRVASMSEDDYAFIRHNVSMPSAKDLGLTTSQLRQLQINRGDRVRIRANIDELRKFDCKKVDVDPLGRVTYL

SEQ ID NO: 1665 - protein, 1106 aa, unidentified
  REGION 1..1106: note = Description of Unknown: Cas Enzyme sequence
VNEFVLGLDLGVGSVGWALADVQGQNIVDAGVRIFEVPMDTAKFEAGDPGGSHAVKRRTSRHQRRQTRRRQARHRDLYLTLQSSGLLPFAGKKAEHRHKELTILDESLMARWRPRIRAESPLIEDPDQVLCYYLRSAAINTRLELDELGRALYHLGQRRGFKSSRREGRSGLSSADAKEQAKESSEIKSSINDLEAALASSGLTLGQHLSLINPHESAIRNRKRSDMKPIWTGRKMYQEEFERIWASQRIHYPTVLTDVLKPRIERLMFRQRAITAGKPGNCELERNPPLPRAPRSSLLSQHFRVVQAVNNLKIVDYPSPDRRLTPSERQELIATLSTIITEIKGKKRKSDLFGLRFPDVKQRLKLPKRAKLNLDDEDTESYLRGNRTNAIMARAFGADRWNALEELEKRRIVRKWMTEQSPEKLLQIAITQWNLAEQAAEQLASIEAEDGYAALSHVAMLKLLPSMEQDGLPYSEAIAKVYKNSFSGNHVHEYLPAVESVLPRIPNPVVKRALSEMRKVVNAIIRKHGRPAQIRIELARSLKRNAEQRGRDQENIKARTRERASAKSWIEERGQRATGDAIEKVLLYRRCKDCPYCTKPLGPCEVLFSESSAIQVEHVLPRRCMDNSFSNKVLAHRACNLQKADRTPFQAFGSAPEWDAILTLVVSLKDKGLLDRFLISKEEQLQEFTKRHLSDTRYISKLAAQFVEQLYGGRDAAVPWEDRNRRCVYASSGGLTAEMRKRWGLNSVLKEPGTVQNLSDGKSRTDHRHHAIDAIVIALTTESMIQQAAFESQRHDRTLGYSQPRFFSPPWPKVGDREEQIAAFQREVRQIAKGIKVSHRVENGLNGQLHDETFYSPKKSDSNFVYSSTFVHELTKSHIKNLDTIIRDKNIRDAIQKQLEKVGGDPKKLETDLPCLVKGDKRIPIRKVRIAVPGSKAIAVRQGEDEPSIFTAKNHHVVIFQQIDPLKGPYWYTPGPVTRLEAMQKRAEAKRKKLNQPYQIVEKTDGPSSEYIMHLMKGDAVEMLDHVNDMRDIYILTSMSDGDYAFLRHSTAIPSAKAVGLSLGQMRRQLHDRGDRVRVRMNLDKLREWDCKKVVLDPLGKVIYLT

SEQ ID NO: 1666 - protein, 1069 aa, unidentified
  REGION 1..1069: note = Description of Unknown: Cas Enzyme sequence
MSSRENGAFVLGIDLGASSVGWALIERIDDVPAHLVRAGARVFDAAVGGKPGALEAGREKSPGKARRDARSQRRQTWRRSRRLRRVFRLLQRWGLLPAGPLAERQRILDELDRRIVSSAWFAAKRKDSAIPEPFQVLPYLLRAAALEEKLERHFLGRAFYHLAQRRGYRSNRIDLAGDKKDEERGKVEPAIAGLRMEMAQGDTRTLGQHFSRQAPAEKRIRQRYTARDMYEHEFEAIWNAQQGHYAEELTTERKRQLHKAIFFQRPLRSSRHLVGFCELEKGKRRAAAALLISQEFRLLQKVNDLRVGLPGEAERELTAAERQALIERLQSEGDQKFSAIRKLLRMPAKERFNLERGGETKLPGNQTNAALRKELGARWDAMRGEERDKVVAYLRSFQKQEKLAAALARKFGFDEETAKRVAEISLEPGYMSFSQAALKKLLPLMREGRALAEARKELYPEKSAEARDVLPPVVMAGKELGSIKNPAVVRALTELRKVVNAIIRTYGRPAEIRIELARDLRNSRVQRERMAKSYRENEKQRSEAAKRILKETGNAHPSRDDIQRALLWEECGGICPYTGKAIPFHALFGRDAAFDVEHILPLSRSLDSSFANLTLCDAEHNRHVKRKQAPWEAYSGDAAAYEAILDRVKRFQGGYAEEKLRRFRMTTEEIATFLEDFTERQLNDTRYATRVAADYLGLLYGGRVDGEGKRRVKTTAGQVTAILRNEWKLNEILNDGPTANGGEKAKTRDDHRHHAIDAIVTALTDDGSIQALSRAAENAAEFRRRRFAPVAEPWPNFLEDVQKEIQRMVVSHREHRRARGALHEETIYSHPIGRGGEQRGKRGKGRSEEFRVRKPLSSLKATEVGRIADDAVRKLVGAKLEGFPGQEPSRVFSNAENLPYFETKDGLRIPIKKARLRTDLKHPVVLGSGGAARHVKSEANHHAEVFAEVNERGQVTGWDCEVVSLLEAVRKKQAREPIVRKEGSEGREFLFSLAPGDILEMDGQGGTRELAVIRAISQEPRIAYVSVRDARKKSEMEAAYVRKTPNALFKLNARKVRVSPLGDVSEAHD

SEQ ID NO: 1667 - protein, 1240 aa, unidentified
  REGION 1..1240: note = Description of Unknown: Cas Enzyme sequence
MGKKILGLDLGVSSIGWALIEESENQNKIISMGSRIIPLSADDKDEFTAGNTISKNQKRTAKRTQRKGYDRYQLRRKALTEVLIKNNMFDPDLFKLKPLELWGLRAKAVKEQISLKELGRVLYHLNQKRGYKSARKIENADKKDTDYVKEVQNRFNEIKEKGITIGEKFYNELKINKYYRIKEQVFPREAYVEEYDKIMSCQKIYYSNILTDELINSIKNEIIYYQRALKSQKTLVSVCDFEGFWIKSDKGKEIFVGPKVAPKSSPVFQVTKIWETINNIELKNKQGEKLNIPIEKKQALFNFLDKNEKLSQAELFKILNIKKEDGWYGNKQIENGLQGNITKFKILKALDGLNFNPNIVDFKIKIENHETITHLIDRKTGEIIESKQKKIVSSELENEALYKLWHVLYSISSDKECINTLINKFDLSYEAAEKLSQIDFKTTGFGNKSVKAMRKILPYLMDGYKYSDACSFAGYNHSFSLTNDENLQKQLKDKIELLPKNSLRQPIVEKILNQLINLINAIIDENRGWVTRQDRLSNNFEIRIELARELKQSKEERNSAFKNQRERERENKIIAERLFNEYGLKATRNNIIKWRLFHEINQNNESRLNATCIYCGKPFGITDALTGSSVDVEHIIPKALLFDDSQNNKTLSHRACNAAKGNKTAYDYMFSLGEEKFNDYLERVNYLYKNKLISKSKRDKLLTPLKDIPKDFIERQLRETQYITRKSKEILNSICYNVWSTSGNVTEHLRKIWGWEDVLMELQLPKYRSLGLTEWIEWESDGQKHKKEVIKNWSKRDDHRHHAIDALTIACTQQGFIQRMNTLSSQSTRNEMLAETQNQSMEYKEKLNLLDKYLLSKRPFSTEEVKQKVAQILISFKAGKKVATYSSRKIRQNGKKVVVQEKIITPRGPLSEESVYGKIKVVEKDKNIKFLFENPELIINQQIKELVFERLQKHNNDNKKAYASIKKDPIYLDKEKKVVLEKAHCFKEEYVIKYPLNSIKAKDVEYIIDKKIRELVEQRLKQHNNKEKEAFKEPLYLNSEKGIQIKTVRMRTGLSAIEPIKFNESGSPIGFVKPGNNHHIAIYIDEEGNKFEHLCTFWNAVERKKYKIPIVIQNPKEVWDKILNNKSQFPQSFIEKLPNDNWKLFLSMQQNEMFLLGLSNEEIENYFNQSNYKVLSEHLFRIQKISSKFYVFRHHLETQIDDSTEAQKSNRFISIRSLDSLHKINPRKVRIDNLGNIFLK

SEQ ID NO: 1668 - protein, 1046 aa, unidentified
  REGION 1..1046: note = Description of Unknown: Cas Enzyme sequence
FLTQQEEATEEQERILGEEDEKAPSAKDKQKTASSYRYLETLVRDRQQTLSQFFTERLENKLPVRRRKLLVEKKEIEYAVPRFLVKEEFRRIWETQRVLCPNLTKKMEDAVYKAIFEDAPHAPYATGNCALEPNDKRLPRMHRLAEQRRIYEQINNIRYTTPEGECFLSRNLRDRLVAQAYDKGQTLTKTAIRKAIADATNQKIVGVNLGDEETRIKGFCHVTAFADIPAWHTMTNAEQDAVISFIAEPAINPADPASELYPEDVFLEKLCAMLRLEGPNAEAEASRAISCLAKDRSNLGMTATARILEKLIAGYEEEVAAAGGAAAIVWRPHTHRTAADACGFTAEEERIRALAGTYSSLPYYGEILRHDVTPIHPWHKKNAAPEEADGRIPNPVVHVALNQLRKVVNEIVELYGKPQGIHVEFARELGMSAAKREERIKEIQKNERENERINRELAALGLTQSRRNRIKYKLWEEQGKRSLYSYKEIQACDIVACEIDHLIPQSKGGTDTMMNLCLCFEDENKAKGDMFPYEMVKKIVPEKWKEISKIIHDKKKFPAAKARRFSPDAETHYALHGDEEQTDSRLTDTSYMAKMGARYLRALCSDVVAVKGGTTSYLRHLWGLDGLEYELFGLPINKDVIDEQTGEVTVDPATGYPAPNPLWARKPRIDHRHHALDALVAACTTRHMVAKMVQNEKSGWRQADFPVPFGESAADFRKQALQSLRRVLPSPKAEHGKAGQLHDATKYRILQPKNPAKPFEGDYLIRYQRSLDNIKDKNAVTKIMFNTNTIPRDTPAVQTAFAQCESIISTIEGYYPAAENVLLAAQQAAAQSGKLPRTLADKAKEEAVVRKAIDLARQEGKLRGTYPCLDYKRLVAINKSLQCGYEPKSNYCMDFYETIGGKVGWECITRIAACDSGFVPEWKKAGHKHIWSLRIDDVIEVTPTDALRQELGKLCSSSPVYLVVQKMWEGSLQCNLLQDARALNGRNPAIQAGLIVQETYTRWHTGGKGLKTYCELSARKVEISPFGKILRKHQRLWSGKKMAQKT

SEQ ID NO: 1669 - protein, 1115 aa, unidentified
  REGION 1..1115: note = Description of Unknown: Cas Enzyme sequence
MIQKSGGLHMGIKIGLDVGITSVGYSVLRTDDEGVPYKIETLNSVIFPAAENPQSGESLAAPRRGNRGSRRRTRRTKFRKYRTKRLFIRHGLLTSEEIENIFNQKLGHKTIYELRTEALDRKITNEELFRILYFFAGHRGFKSNRKAEKAEAEIGIVLSAISEIKTALEEGTYRTLGEYMHAHPKYEEHKRNKDGKDRYLGTAQRDFIIDEIKQILNAQRGFGNEALTDAFEQEFIGNGEGEAAGIFTAQRDFDEGPGKGSPYGGDQIEKMIGWCTFEKEEHRAAKGTYTFQYFELLSKLNNLKIQEFAGDDCKELNPDQRQLIIDKAFSKDKLQYAEIKKMLKLEPEAKFNLLSYGSKTEQDKTEKTNFVALSSYDKVRKALGKEIYEAMPNSLKDEIGTILTTYSSDKSRRRVFADRLSLPSEQVESLLPLTMIQYGHLSLKAMRKIIPYLEMGMTYDKAAEAAGYDFKHNAIDRAFIHENVSNPVVKRAVSQCIKVVNQLTREYGKPDAINIEFSRELGKNFDERKKIEKNQKENMARNESIANELRENGIAVNGENITRLKLWREQGNMDPYTGQYIPYAEIFFGNYDVDHIIPYSISFDDSYGNKVLVSSAANREKGNRIPMEYLANDPIRIKNLENIASTIRNYNKREKLLKKKMSPEDVDGWKSRNINDTRYIARLLRNYFKQNIEFSEKENIKEKVAVNNGTVTARMRARWGLGPKHRNNDRHHAMDAVVVGCMTPTFVRRVTVYSKRQEVRFNKSLWNEGTLESDLAHMSLEKREEYEKMFSKAFPQPWEGFRDELNARLSDNPKELIKNIKNTLGTYTDEEIDKLKPMFVVRRPNKKITGPAHLDTIRSGKLLHEGKAISRVSISKLKLNKNGEIGTGNAEFYKSDDNGWMPAYNALKAELEKNGGSGEKAFPEGVFTYTQENGQMHTVRKVKVVQKSTLQAVLNNGKAMAGNGPSMIRIDVFRTSKKYVFVPVYVKDTVSRELPNKGCVAHKNYEDWYELSEEDEFMFSLYQNDVVRVEHKKGIPLTYNEGNVGQEKVTEFIGYYNSADIASGNIYILGNDNSFFARGVGIATLLNIEKMQVDYLGNLSKVKERTRQTFSNMKR

SEQ ID NO: 1670 - protein, 1047 aa, unidentified
  REGION 1..1047: note = Description of Unknown: Cas Enzyme sequence
MKQKILGLDIGIASVGHAIINYDDKNFDGEIIEAGARVFDACEVAKTKEPLNAQRRNFRLARRRLARRSSRLRQLKQLFISNNLLNEAQINNMFQGSKNRIDVWELRKEALNRKLTVEELYRVIHQIAKRRGFKSIRKSEEAKREGALLKSLSKNVEAFKDSNFQTIGEMFATIFVDKAKRNKRDMYTNSIPRYLLVDELNIIFDKQRDFGLDIATEEFQKQIFEKIFAQNSIQSMEKMVGYCQFEKDEKRAPKAAYTSEIFVAVQKILNTHVIDEVGQEYEFDEEHIKRILELAHEQSKVTYKQVKKEFSLSDETRFKGLNYNKKIIDKKTKEEKIVNPEESAFVELKKYQEFKKAIIKNTSKEYFENIKDVQTLFDNIAEVLTYEKSDDTIVQSMKEKEIPDEIINAVKDLSAVKVMHLSIKAMKKIIPFMIQGNRYNVACELAGYDFKNEKESKGEDFLPVLKQEELTTNPVVNRSISQTRKVVNALIRKYGKFDKIIIETARDLGKSAEERNKIKAGQNEFKEQKDKARERCIEHGINPDSKNNLLKYRLWEQQGGKCVYSWKEDNGVIKPVEIDIERLAEPNYADIDHILPYSRSFDDSLNNKVLCLSDENRQKGNKTPYEYLGNKVDWYKYSQYIRSLNLNSAKTNRILRQEYHGNTDTFISRNLNDTRYMTVFIKDYIKSNLDCKVETRNGSLTAFLRNQWGIIKNRDTDKHHAIDAVVLACSTQGMVKYLSTVSAKREKMEREGNAKPRFSKPWATFDEDLTKIKDNIFVSRALVTKIPGSIHKATLKSPKHLAEGFTTLKTDIQSLSLSKLETMYDKERNIAVYNVLKERLEQFGGDGKKAFAEPVYMPLSKEKEKAGQKPHEIKSIKLVDNSVSGVLLPQGFADNDSMARVDVFSKKNSKGKDEFYLVPIYVADFAKGILPNKVIKANQPESEWIIIDDTFKFKFSLFSNTLISINKTGKKEDEIFGYYIKTHRCTGSIYYEMVDGKINENGEHVQKTIGVKTLKTFKKYQVDVLGNYHEIKKEKRQPIHFRGDKNK

SEQ ID NO: 1671 - protein, 1108 aa, unidentified
  REGION 1..1108: note = Description of Unknown: Cas Enzyme sequence
VLEILHRHGIADTADRHKMKASHPNLFALRAEALDRPLSKSEFTQIVYTLAGHRGMSDRYEIKEKKGKEDKEKKKAAGGILRNRDLLKECGFRTFGEAKFKTVSLESGKRYRNGPGDYSNSYDFSMTRQELEEIVRAQAQMQSPALLGIDHEALLEELCETIFFQRPLKSTEEMVGFCSVEYHKGVKCAAKCSYAFFRYALQLQYHNIRLVRKATGEIVSIPEIEGAADADIFVAGAIANAGSGSRELSITKLSELLGLPRGSYEYATGRNNKPVKLKIETGAIKLYAALDDGKRGHDEIVSLMDDGGTESLSFKLSCLQSEEQRYDFLMGKGLEEEEARQIAPMEFGGFGSYGIPIMREISEKISAGMTPSEAKDAVGAAGTGGGCNWNFLPPLEMDRKYIDEVLPRFVPGFDKDNFIPFYDNMVNPTARRVIAELRKVVNHVLQNYGKPDRIVIETARETNSVKKQDEISRAQEKRKKVNEALMKKAGKIPGFNALSPDKALRRYRLWKEQKGRCPYCGEAIPEEKIFSGDFEVDHVVPRSRLYMDKGKNIVLVHASDNQAKGNLYHHDYLKNTGKWDNFCSFVEGTYQWKTKKEWLLEENFEERLKGILPDRYLNDTRYAGSLAAKYLSYYLYPREGRHNKGGERPIFNINGTGSWILRESWGLEKKSRDNHYHHFIDAITLSLATPSTIKRLFEHIKVQEKGKKDTFHCPIPEYPKFIKKIEEEYRSGKRYVKHSRRYNFNQEVHDEKPVSCYRVNEKGECDKNAPISSDAHLLKRISIDVAYGIGALGLNQDKGAKEDQRRKAALAMDEKEMLAKAEAFSERAIVDTSPDRFAKRAFIEYAKRRFEADRVIAELDEEIAKKKNKNDEAEKEELETKKKRIEEEMEKTLPFGHFTMVRGRKGKKETIKRITVRDVNGSGTATKLGNHLLIRDHIFNKNNLFCIDVYRDRKSGRVLMAPQYGPHVAGKNAKRNTTRVMGKSPKPVDLSDTKKYTFLCTIRHGNGIEIEHVKFGTVRGIFRGADVSSSSNAKLAHYNTREEKRLNFQTGTVAFNKIDIGLDGEIVYLFREKKLYEDNAEISSGPKRGKGEFYDDDTLDAFRKGVLF

SEQ ID NO: 1672 - protein, 1374 aa, unidentified
  REGION 1..1374: note = Description of Unknown: Cas Enzyme sequence
MKKILGLDLGTTSIGWALVNQAENKEEKSSIIRAGVRIVPLDSTEKDNFEKGKEIQTNAGRTAKRSARRNLDRFQQRRSKLIGLFVANKWIESDALLSENGNRTTFETYMLRSKAASEPISLQELARVLLMINKKRGYKSNRKTDSGEEGHLVDGMQVAKILSETSMTPGQYGLKCIKEGQNYIPEFYRSDLQKELDLIWDFQRQFHNDILTEEFKRQISGRGRQDVSKIFYAKYKISTADNKGKTRKLQAYTWRKDALEKELEKEVLAYVICDLSAAIRASSGYLGEISDRSKELLFSGKTIGQYLYDGIKSDSNFSVRKKVFYRQDYIDEFNRIWDCQSKSHKELTPELRDEIRDRIIFYQRPLKSQKGLVSICELEQKTIEINKNGVKVKKVVGPKVAPKSSLVFQEFKIWQILNNISITDRNTGEIRSLEIEEKRKLAKELQTRDRISASEALAILFGKAKGFEINYKNLEGNHTFYQIAKALVDIVNRVEGLIPEFDIDKRPTEEVIYVIEKFLCKRGLRKGILDFDASLEKKEYEAQPLFKLWHLLYSYEGDNSRTGDESLIQKISAITGLPEELSGMLSKVAFKDDYASLSHMAMRRILPYMKDGNKYDVACAYAGYNHSRGSRTREQIDNAELVDKLDVLPRNSLRNPVVEKILNQMINVVNAVGEEYGRPDEIHIEMARELKQNRQQRESTYNRILETDKENRSIVDILQKEFGIKNVRKTDIVRYKLYQELKDNSYKAKTLYSNKYISREILFSNEIDIEHIIPQASLFDDSFSNKTLEFKEVNLQKGKMTAYDYVASKGEEELHEYIKRVEDLYARKVISQGKRNKLLMSQDKIPEDFLNRDLSMTQYIARKACEILESYVREILPTNGAITARLREDWQLVDVMKELNLPKYDAVGMTHYEERNGKMVKKIDLWSKRDDHRHHAMDALTIAFTKKQHIQYLNNLNARSDKSSSIYGIEQNETIKRGTSRIFIPPMPLNELRAAFKKELESILVSNKASNKIVTRNVNKTKKNGGVNKRTELTPRGQLHKETVYGQIKVPEKYMIAVGAKLTEEEIARVTSKKVQDALIARLSEFGGDPKKAFTGKNSLQKNPIYLDSSHTQSVDAKVEGIRFKTLFTVRKPISPDLNIEKVVDAKVRNILLERVKEYGDARKAFSNLDENPIWLNKDKSIQIKSVTIGENFDLDAIRVKRDNNGRAILTSDGKEIPTDFVNLRNNHHVAIYETANGDYEEKVVSFFEALQRVSNGMPAVDRTYRKDDGWKFVFTLKKGEVFVFPNSSTGFDPSKIDLMDKANYPDISKNLFRVQKFSSNDYNFRHHLETSTENPKELQNITWKRLKNTNALKGAIKVRINHLGEIVHIGEYD

SEQ ID NO: 1673 - protein, 1454 aa, unidentified
  REGION 1..1454: note = Description of Unknown: Cas Enzyme sequence
MSFLYLFKKILTKFGIDCKDLAMKYILGLDLGSNSIGWALIEQDFDNKQGKILGLGSRIIPMDQGILGEFERGNKVSQTAERTGFRGVRRLRERHLLRRERLHRVLHLLGFLPAHYDAQIDFTKRFGKFIGDSEPKLAYNNEGFIFLESFNEMVEDFKKHQPQLFYIKSNGEESKIPYDWTIYYLRKKALQEKISKEELAWIILNFNQKRGYYQLRGEEEEKSTKNVEFYSLEITDVIADTPNNKGEIWYSIHLENGWVYRRASKISLEDWKGKVRDFIVTTELNEDGSVKLDKEGKEKRSFRAPSEDDWNLLKKKTEQNITFSGKTVGEYIYDHLLQNPNQKIKGKLVRTIERKFYKEELKAILEKQVAFQPELFTEELFVDCVRELYKNNEIHQNSLSSKDFVHLFLNDIIFYQRPLRSQKSNISSCSLEYRFCIDEETKQRRKTYLKVISKSNPYYQEFRVLQWLSNLKIYRKEDDKDVTSEFISSIENKEILYEFLMSEKEVSNKSILEFLLMKSLREIYPFAKETELKKELKKEITKYRWNYVYEEENDSKKYPMNETGYEIKKRLKEVKNIPDNFLTKDIEYQIWHIIYSVTDKYEYEKALMKFAQKHNLDAESFVENFKRIKPYPSDYGAFSEKAIKKLLPLMRFGKYWNYSDISEPVQVRISDIINGVDNENIKTIVREKAEKYQLNQEADFQGLPLWLAQYVVYGIHSEAADIQRWTSPSDLEEYLKGFKQHSLRNPIVEQVVTETLRVVKDIWEYYGKGERNFFDEIHIELGRELKKTAEERNRMTREINENEETNLKVKKKLQEFFEDKSAENVRPYSPIQQEKYRLWLEQEKESPYTGQPIPLSKLFTDEYQIEHVIPQSRFFDDSLSNKVICEAAVNAEKGAQLGLEFIKKHGGEIIEIGLNKKVTILNEKEYKELVNKHFANNRAKKAKMLMEEIPEKMVERQLNDTRYISKFISQILSNIVRSPQEDDGVNSKNIIPYTGKITAALKQDWGLNDVWNDLILPRFERMNNLTQTELFTTYSEKYQKKIPTVPLEHAKGFQKKRIDHRHHALDALVVACATRSHINYMNNKHALDKHKAKEEKQNARIDLRTVLCEKKYNDNAEDKYNWTFKKPWNTFTQDVRSALEMIVVSFKQNLRVINKATNYYEKWVEEKGKKVKKKVKQEGINWAIRKPLHKETISGKITLERVKVGKGKILTATRKSIDSSFTEKTIASITDTGIQKILLNYLAHKGSPELAFSPEGLEEMNKNIAKYNDGKDHQPIYKVRIFEEGSKFPLGEIGTKSQKYVETAKGTNLFFGIYQGKEKRSYATIPLDEVIERQKQGLTSVPEHNEKGEKLLFSLSPNDLVYVPMEGEDVESINFTNLSKEQRERVYKTVSFTGSECFFIKSSISSLIKNYDAKTKIGELGSLNKLEITIPDHIRIKEFCIKLKIDRLGNISKV

SEQ ID NO: 1674 - protein, 1029 aa, unidentified
  REGION 1..1029: note = Description of Unknown: Cas Enzyme sequence
MEYILGLDLGARSLGWAAVAVRGDDEDRLLGAGVRIFEAGMEGNLERGQEESRAVQRRTARLQRRGTRRRRDRARRLYRLLAEAGLLPALPETGVQPQARSIQTALNGLDGALRAKYSTETNVDQLPYLLRARALDHTLEAYELGRALYHLNQRRGFQSNAKALAKDDEERGKVYAGIAELRSRLEGKRTLGEYFAACDPHEARIRNRYTHRSMYRHEFARIWEAQQPHHAALTGSLRASLEALMFDQRPLQSKEDEIGQCEWIPEEKRAPAWSMEFQRFRLLQNVAHVRVRDVTGRETALTGLQRTALIEELERRSELTFKAARKLLGIPREWSFSIEEGKETRFKGNGVQARMAEHSSGLWERLNGEERHRLLLQTATASNDEALAGLLVEEWGMSREAAETFAAKVTLPAGYCSLSLKAMRAVIPLLEQGLSVQEARKTAGFDIVRRTPVHDELPPVADCVPHGVDVRNPAVIRALTELRKVVNAVIRQWGKPRQIHIELARDLKKNRKQRAEENDRNQKQKGLRGRIRTRIATELGIDAARIGRSMIEKGLLFEECNGHCPYTGQSLGSFASLFNDGARAQVEHIIPRSRCLDDSFHNLTLATVEANREKGNRTPFEAYGANSARYDEILERVRAFAGEPGRRKLKRFLMESTDTLLEEFTQRQLNDTRYTSRVAGDYLALLYGGRNAEGRQKIFNLTGQLTADLRGLWNLNSILSSDGSKSRNDHRHHAIDAVVAAVFRQKWMTLLSSAAEASWQERKRRYASLPPPWVGFKEDVEAAIKAMHVSHRTDHRVTGALHKETLYGVVGKTDTGGDIVRTRKPVHLLKPGDEEKIVDEGVRKAVQAALAAAGGDAAKLENNWPVLPNANGAPVKIKSVRIDLNRSVKQVGRGWKARYAEGGETHHVAVFETAKGKNRIWEGEVVPMSEALQRIRTGQPVVNRRNDEDGKGFLFSLCKNDVLELRGERKGLWVVKKIKMNGQIALTPETDARLEKDRVNFAPTISGLRKLNARKVSIGPLGEVWPSHD

SEQ ID NO: 1675 - protein, 1039 aa, unidentified
  REGION 1..1039: note = Description of Unknown: Cas Enzyme sequence
LTYVLGLDLGARSLGWAAIARDGDGYRQILGIGVRVFEAGVEGLIEKGREESRAAQRRIARLARRQTRRRRQRARQLYHALAGAGLLPPVSHAPSRPEAIEIQRTLNELDCDLRRKYADCPGIHQLPYLLRARGLDEELAAFELGRALYHLGQRRGFKSSRKAKVKKTDTKTAEDENGAVYAGIHELEARMAGKRTLGEYLASLDPAEERIRSRYTHRSMYEAEFEAIWAAQAPHHSALTDDFKQRVYHMAFDQRPLRDSSELVGRCEWDPEMKRAELWRPEYQRFRILQTANHLRVADPDGVEHRLTGEQRQRLIDALEFAKELNLTRAKKIIGIPLNWKFSLEKGGETKFKGDAVACHMSQWLGEAWDAADAAGRTEILEGIDGCETDESLAQFLERRCSMTPGEARRAAEGISLPTGYASLSLESLRRVLPYMEQGLSVQEARQAAGFALSRETPMVDFLPALKDSRIEVRNPAVARALTETRKVVNAAIREWGKPDEIHIEMARELRKTQDQRRKDVKTMRDRGQERDAARTKIETEAGLTRIGRKEIDLVLLYEECGGICPYSGQPLGGLASILNGTAAVQVEHVVPRSVCLDDSFANSTLATVEANREKGNRTPWEAFGADEERFAEIIGRVKSFRGAFARRKLERFQMRETGKEKLLSEFSDRQLNDTRYSSRLAAEYLGVLYGGETAGGKRHILKSTGQLTAELRGLWRLNEILSGDSRKSREDHRHHAIDAAVLAVLGQGWIQRLSEAAERAWAEGKRRYASVEPPWLGFKEELREVIGATHISYRPEHRISGGLHKDSNYSYMGKNERDGDVVRIRRPVHLLTVDDVDRIVDAGVREVVRAKVAAVGDLKKLESDPPFLKNQNGAPVPIRKVRIELNRSVRKIGKGHKARYAEGGESHHVEVCEVTENGRRAWRGDPVPMSDAMERLVAGKPVVDRSDAGGRGFLFSLCKDDTVELQDPLGSRSGIWVVKKIKGNQQVVLVPERDARPEGAAQGKEKREVYSPTVSGLRGLSARKVVVDPLGRVFQAHD

SEQ ID NO: 1676 - protein, 1067 aa, unidentified
  REGION 1..1067: note = Description of Unknown: Cas Enzyme sequence
MSEYILGIDLGSNSLGWAILGLIDGEPAQLIRAGARVFEAGMDNTKGLGNEESRNKARREARLHRRLLWRRRRRLTKLFNLLQRFGLLPAAPVAPLPSSSNGHRPPLLPEQRQDFLNELDKQILSSAWFQAKASLFPEPKHTMPYILRASALDEPLEPYFLGRALYHLAQRRGFLSNRKQVAKKDDDEGAVKEGIAELRKAMQEKQAHTLGEYLSHLDPAVERIRCRWTARDMYEKEFNAIWDAQALHHPDLLTLERKKQIYNAIFYQRPLWFDPNTIGQCELESGQRRAPRSSFVAQRFRLLQAVNNLRIELPDRSERSLTLEERDELVQELEIKGDRTYAQARKLLKIPKEARFTIEHGGEKTLRGNRTTAEFCAVFGQQRWLEEMSAAEHDQALHDVLSIQKEDVLQRRAIKHWKLDEESAKKFARISPEPDYFNLSRKAIEKLLPLLETGTTYAEARKHIYPESFEAQEPKALLPPVERSLTEIRNPAVMRSLTELRKVVNAVVQQYGRPSYVHLELARDLKKSKKQRVAISEKNRRNEKSRAEAAKKIMAEASISEPKPDDIRRFQLAEECHWMCPYTGRSISMRSLFGPEPEFDIEHIIPFSRSMDNSFQNVTLCYVPENRSVKGNKTPHQAYSGDEQRYEAILDRVRKFSGDRQTAAAKLKRFAMNGDELEAYLEDFRNRQLNDTAYATSVAAKYLGLLYGGLTDPDGNRRVQATSGQATSYFRSLWKLNSILNDGPTANGGYVPKSREDHRHHAVDALVIGLTDAAMIKRLSDAAQRAPIEHRRRFASLQSPWPNFTDTVRAEVEKIVVSHRVSKKVSGALHEESIYSRPAGENGEVRIRKPLASLTKPEIEKIADEGVKKLVQRKLEELGGDPKKFPPPEDRENLDRFPSFVTSDGRRIPIKRVRISKAVPTFALGEGRTARHVTSESNHHVEIIATLDDRGKEIDWEGRVVPMRDAYMRAKKGAAVIERMCKQGEEYKFSLCPGEVIECHRGGTEPELLVYKGVSQYTAGQVVVSLLALNDARKNPKLIRVVPNRVRQWHARKVVVSPLGEAAEAYD

SEQ ID NO: 1677 - protein, 1073 aa, unidentified
  REGION 1..1073: note = Description of Unknown: Cas Enzyme sequence
MDTQPSPDYVLGIDLGSNSLGWAMIGLEDGQPAKLLRAGVRVFEAGMEGNIESGQEESRNLKRREARLHRRQLWRRARRLRRVFNLLQRFGLLPPGEGSLPEKRQDFLNELDKTILSSPWFAAKKISGVYPEPEQTLPYILRSAALDERLEPHFLGRAVYHLAQRRGFLSTRKKAKGAKKEDEEGVVKQGISDLRRKMEEAKARTLGEFFARIPPSEERIRGRWTARAMYEEEFQQIWNAQAKFHGELPTDERKKLLFQAIFYQRPLKDQPELIGHCELEPQERRAAAYLVTSQRFRLLQTVNNLTILPPGEPEKKLTPADRAKLIEALELHGDQTFPHIRKLLGLTRNYGFNLERGGEKSIKGNRTNADFYAVFGERWSRMSPEERQRAILDVRSIQKPETLLRRAREYWKLDEEAAQRFCDISLESDYLNLSRRAMEKLLPLLEDGITYGEARRQLYPERFQAVEPLPLLPPVQDALTEIRNPAVTRCLTELRKVTNAIVRQYGKPAEIHIELTRDLKQPKKRRQDRADRMRANEKARKAAAKRIVEEAGISDPSPDDIRKVLLAEECRWECPYTGKSISMRAVVGHESQFQIEHIIPFTRSLDNSFLNLTLCHVEENKVKANKTPYEAYSGDPERYERILERVKRFQGDKGAIAQKLRRFTMTPEQVEEFLAGFTARQLTDTAYASRLAADYLGLLYGGVVDQAHARRVQATSGQVTAYLRNLWLLNTILRDGETTHGGYATKPRDDHRHHAVDAVAIALTDAGTVKQLSDAAQRAPLEHRRRFAALQAPWPDFVDSVRQEINRIIVSHRVSKKVSGALHEETIYSAPVAAGFSPPGAALKGGATDVRHVRKPLASLTKTEVEDIVDPGVRQRVQDKLEELGGDIKKFAKSENLPFLLAKDGRRIPIKRVRIKKKLPTFELGSGRTLRHVTPESNHHLEVFAELDEQGNEVEWDGAVVSMAEAYHRQKLGLPVVQRDHGPKRAFKFSITPGEMLQCDGPHGGRRLLVVRSTTQLSAGGIIIGLAPVNDARPKKEMQADKSWVWKGPDTLRKLNARKVAVGPLGEVSEAHD

SEQ ID NO: 1678 - protein, 1086 aa, unidentified
  REGION 1..1086: note = Description of Unknown: Cas Enzyme sequence
  MOD_RES 1031..1042: note = Any amino acid
MNTQLARDFILGIDLGSSSLGWAMIGLDDGKPSGLIRAGVRVFEAATEGDRESGQEESRNRARREARLRRRQLWRHARRLAKVFSLLQGWGLLPPHALPFTAISDLKSQISNGPRSLRPQHSEQRQNLLNELDQQILSSDWFKQKSSAHGHRDHQRGCAECDRLRQVLPYLLRAAALDEPLEPYFLGRALYHLAQRRGFLSNRKQTRMPKEKERDDEGVVKKEISELREKMKEAGARTLGEYFSRLTPAEQRIRDRYTHRTMYEDEFNRIWEAQAKHHSDLLTEERKKSLHKAIFFQRPRKYPRHLVGKCQLEPGRQRAPMYLLTSQRFRLLQRLNDLKILPPGETERELSDDERTTLLRALEQQRDLTFNQIRKLLGLPRSYKFNLEAGGEEKLPGNRTGAQFYNVFGERWLQMTSEERDRLVEYVYAFEKPDKLKQAAKKKWGLTEEAAEKLSEISFEADPLNLSRQAVEKLLPLLEQKVQYAAACKQVDPESFRPSEPVSMLPPVQEELEEVRNPAVMRSLTELRKVVNAIIRRYGKPAEVRIELARDLRKTKKQREAIGEKNRENERLRKSAAKRILEETGINNPSPEDIRKVLLADECGWKCPYTGKSISMRKLVGPEPEFQIEHIIPFSRSLDNTFVNLTLCHVDENKVKGNRTPYEAYGGDPERYRQVLARVREFAGSRSIVAEKLRRFQMRPEEVESLLADFSKRQLTDTAYAARLAARYLGSLYGGVVDAGGNRRIQATSGQVTAYLRNEWKLNSILKDGPSEHGGTVPKARDDHRHHAVDAVVIALTSPATVKQLSDAAQRAPLERRRRFASLPAPWPNFVDEVRAEVEGIVVSHRVSKKVSGPLHEETIYSPRGEGDDERRVRKSLAQITKAELDDIADEGVKRRVLEKLAAVGGEDPKKVFSNPDNLPYFETKDGRRIPIKSVRIKKKVPTFLLGAGRVERHVTSGSNHHLEIFAELDEQGNEIEWDGKVITMAEAYQRVKSGQPVVQTEFGPDRRFKFSLCAGEVVEVLAGPEAPRLXXXXXXXXXXXXYDGRHKVDIIKAKQFVRIGPDALRKWHARKVVVSPLGEVTEAHD

SEQ ID NO: 1679 - protein, 1073 aa, unidentified
  REGION 1..1073: note = Description of Unknown: Cas Enzyme sequence
MTEQPCGEYVLGIDLGTNSVGWAMIGLVDGEPAKLLRAGVRVFEAGMEGDIESGQEQSKNLKRREARSHRRQLWRRARRLTKTFNLLRQFGLLPTGDTSTPEGRQDLINKLDQDIRASDWFKTKASSGAYPQPEQALPYILRAAALDEALEPYFVGRALYHLAQRRGFASNRKTAPRKGEDLGLVKKQIGELWDKMKGAGARTLGEYFSRVDPLDASGHEHIRRWHTHRDMYEQEFQAIWAAQAAHHPTLLNDERGKQIRQALFFQRPLWFDPGTIGQCDLEPGERRAPAYLLTAQRFRLLQRVNDLQIEEPGKVPRYLTPEERAKLSDALELHGDLSFHKERKASGRVLPSVRTLLDLPRNVSFNLERGDEEKMPGNRTTCAFHAAFGERWLEMSAEEHNQAILDVLSIQKPETLKRRALGHWKLDEPAADGFCEISLEPDYMNLSRRAIDNLLPLLEQGIPLQTARKQVYPESFKVSDAKPLLPPVQEALAEIRNPAVMRSLTELRKVVNGVVRRYGKPTYIRIELARDLKRSKRQRTALSEINRRNEKARAKAAEEIVKGDVGVKEPKPEDKRKYQLAEECHWQCPYTGKTISMQGLFGPEPQFDIEHIIPFSRSMDNSFQNLTLCYVPENRSVKGNKTPHEAYLGDPERYQAILDRVKKFAGERAMVSAKLKRFMMNEDELEDFLSDFRSRQLNDTAYAARLATRYVSLLYGGLADAEHQQRVFAPSGQTTAYFRNLWKLNAILNDGPSTEGGRVEKVRDDHRHHAVDAVVIALTDAGMVKRLSDAAQCAFSAGRKRFAALEGPWPNFVDTVRQAISGIVVSHRVSKKVSGALHEETIYSSAKADGSVRVRKPLAELTRKEVEGIADESVKALVLSKLGGGDPKKVFASEENLPCFETSDGRRIPIKRVRIKKAVPTLPLGTGRTTRHVSSESNHHLEIFAELDKDGKEMGWDGIVVPVHEAYRRLKAGEPLVNRGPRAGGLYKFSLGQGEVVECDDKHRGRSLFVFRKVTEFSKGGIQIGFAPLSDARKAREMQISRAWLWTTPNTLGQRHARKVVVSPLGEVSEAHD

SEQ ID NO: 1680 - protein, 1062 aa, unidentified
  REGION 1..1062: note = Description of Unknown: Cas Enzyme sequence
VPSIETKEYVLGIDLGSNSLGWALIGLIDGEPAQLIRAGVRIFEAGMDGDLESGQEESRNKARRDARLHRRQLWRRARRINKVVHLLQRFGLLPAGNLHSPDARQDYFNRLDAQILASPGFFAKKQSGAFPEPHHTLPYILRACALNEPLEPYFLGRAFYHLAQRRGFQSNRLRPARKDEDLGVVKQSIRNLRAQMQAAGARTLGEYFARMSPAERPFEEHIRGADRWTARDMHKEEFEMIWEFQASHHPNLLTAERKKALYDAIFYQRPLWFDENTIGACELEPDCRRAPAYLLVSQRFRLLQTVNNFKVIPPGETERPLTPEDRQRLIDELELKGDLTYAKIRKLLGLPKDYAFNLERARNESIKGNRTYADFYSVFGERWLKMTPEERDQTVEYVHAFQKPDKLRGAAQKRWGLSDEAAEKLSEITLEADYMNLSRRAMEKLMPLLEQGMTYGEARRLLYPEKFSATQPAAFLPMVKAALPEVRNPAVLRSLTELRKVVNAVIHHYGKPQEIRIELARELRKSKKQRETLTRKNRENEAARKQAAKRIDEITGDKNPSRDDIRRVLLLDECGCHCVYCGEPISGRNFLGKESQIDIDHIIPFSRSLDDSFTNLVLCHSHCNRLKGDRTPYEAFAGDPERYERILDRVRKFSGDSRTRAEKLRRFKLNDEELTKFLEDFRNRQLNDTAYAARLAAQYLSLLYGGVADTEGRRRVYATSGQATSYLRSLWKLNSILGDGTTSNGGRISKERTDHRHHAVDAVVIGLTDAGMMKRLSDAAQRAPLEGRRRFAGLEAPWVNFVDTIRQQIDQIVVSHRVSKKVSGALHEETIYSPPFPDKKVRVRKPLNDLTRSEVEDIADPVVKKRVLEKLGDGDPKKVFANEANLPCFETRDGRRIPIRRVRIAKATPVFPLGEGRTVRHVTSESNHHVEIYAALDERGNETRWDGEVVSLHEAYQRKRAGQPIVQGDHGPLVKFKFSLAPGEVIECDEGQGQHSLLVVRSITQLSAGQIVIGLAPVNDARKKSDMQKSRAWVWKVPNTLRECHARKVSVSPIGEVTEAHD

SEQ ID NO: 1681 - protein, 1129 aa, unidentified
  REGION 1..1129: note = Description of Unknown: Cas Enzyme sequence
MNHTANDTLPASNFLTLGLDIGIASVGWAVLCETRIVDNGVRCFDKAETAKEGESLNLARRQARLLRRRLYRRSWRLTKLARVLKQEHLIDSAAFFKQQPSASVSTWQLRAQGLDRLLSAQEWARVIYHLCKHRGFHWASKAEEVQAEGDAKGENGRVKKGLADTAAKIAAKGYRSAAEMVLTEFPHAQRNKRGEYDKALSRVLLDQEFASLFEEQRRWGNPHASAEFEQRVRGNGDRKSGLFWKQKPALAGADLLKMLGHCTFEKTEFRAPKASFTAERHVWLTRLNNLRVVVDGTSRPLTQDERTLALLLPYQIEQFKYKTLKGVLVKAGHIPDSARFGGLAYPSEAQKEAGKAKDPEDQPLVKLLAWHDLRKALSKAGLQAAWQQISVTALDGKPQWLDSIGWVLSVYKDDAEVERELTALELPQAQAVIPVLLGLRFDKFHALSIKALRQIVPHMERGLRYDEAVAQIPAYGHHSQRVVLGTGTRCYLPSFYKDERSSTGSMVFRDDIDVPRNPVVLRALNQARKVVNAIIKKHGSLSAVHIEMARDLSRPLDERREVKKLQEEFRDRNDKARESFEADHGYRPKGIVFEKWMLYREQHGKCAYSLESLDIDRVLNDANYAQIDHALPYSRSYDDSKNNKVLVLTRENQNKGNRTAYEYLTSFAGGEDGDRWRNYAAWVNSNKSYRMAKRNRLLRKNYGPDEASGFKDRNLNDTRYICKFFKNYVEENLQLAPRSDGNANKRCVVVNGQLTAFLRARWGLSKVRSESDRHHALDAAVVAACSHGMVKALADYARNKEVAYLKEGFPDPETGEIVNPEAHARGVQHFPEPWAHFRHELRARLYTDDLQALREDLQRLGTYSEQDLLGARTLFVSRAPQRRNDGAVHKETIYAQPEALRKQGGVVQKVPLASLTLKDLDNLADPHRNAKLYAAIRARLEAHGGKADKAFGPDQPFYKPDKDGNPTGPIVRTVKLVIDKLSGIPIRGGIAKNDTMLRVDVFTKAGKFHLVPVYVHHRVTGLPDRAIVAFKDEDEWTLIDESFEFLFSAYSNDLLEISLKKEKYVGYYSGCDRSTGALNLWVHDRASHVGKDGLIRGIGAKTAQSIRKLNVDVLGVTHPARSEQRNGLA

SEQ ID NO: 1682 - protein, 1024 aa, unidentified
  REGION 1..1024: note = Description of Unknown: Cas Enzyme sequence
MEKYRLAVDLGTNSIGWAALKLRDGTPAGILKMGVRIFSDGRNPKDQTTLASARRLARQMRRQRDRKLQRRKLILNTLCRMGLFPYEKAEREKLKKLDVLRLRSMAARGEELAPYELGRVFLHLSKRRGFQSSRKETKEARDNKLTAAMSALKEQLSSENAITYGDFLYQRMLKGLSTAATVEAGFYPARDVVKSEFDEIVEKQKKLHPDVTAQQWQALRDKIFYQRPLRPVEVGKCSLYGEESRAYQYSPSFEQYRLLTELFNLRIINDDHSETELSYEQIERCFNELQLKKEIKYSDVKKVLRLDSSVQFSIEANTKKEKFKGCPVAYFFGSKRSVLGAKWAELTLEQRDQLAEAYFESGDQDLNDNLQKLGFLDDEQIRKLSESEVPIFSDVTAAFSTKALREIVKRTLEERNSPLSILSKLRRGEGEVILSSELGYYGKEIPESVIPIPQHILRHGRSINEDEKNWGKIANPTVHIGLNQLRKVVNELVRELGKPESIHIEFTRDLKLSKARKESLAAQNKRNEELNKKAREFIEERGLKATAFQMEKVKLWFEMERFQCECVYTGQKISQDMILTEKVEVDHILPFSRTLDDSFSNKVLVTAEANRIKKNRTPYEAFGKNDPVQWAAILDRVAQFPWAKRKRFSPQAMVDFEKNSGFLARQLTDTSYLAKIAKKYLATLIPQSQIVVLPGRLTALVRGKLGLNSILSEGNQKNRTDHRHHVIDAVVIGIVDRSLLLKMSNASEEGRGRISVPEPWDDFRNSVQSSIHNVVVSHKVDHSPFAAFVSQTGFGLREPQTPHQIKNDFKMVTSWGLDKFKTEKHFSSIVSDQLRSIALSEGIEGLVKAGVRKSVRVYQANSENFKDIGGLGSYVVKVTHGPQGEHYVCYEKDGTHKVTVWKVPYRKDSKEYAKGETHYLDFVFHYYFDSMQRPEAKKPHPSAKFIMEIYRGDTVEMNIDAKRNLYRVVTMSPSKNQIGFELLHDTKGQKSKSFFRKSSRKLKTLNFRKMKVTPAGKILPGPRL

SEQ ID NO: 1683 - protein, 1361 aa, unidentified
  REGION 1..1361: note = Description of Unknown: Cas Enzyme sequence
MTKLGKPYGIGVDIGSNSIGFAAVDENSHLIRLKGKTVIGARLFEEGKAAADRRASRTTRRRLSRNRWRLSFLRDFFESHITPTGPNFFMRQKYSEISPKDKARYKYEKRLFNDRTDAEFYQQYPTMYHLRNRLLTDPSKADVREIYFAIHHILKSRGHFLTSGYAKDFNTNKVALNEIFPALQDAYAQVYPDLDITFDENKVNEFKTVLLNEKATPSDTQRALVNLLLAEDGDKDILKQQKQVLTEFAKAVVGLKTKLNVALGTEVDSSEATVWNFSLGQLDDKWAGIESAMTDEGTEILDQIRDLYRARLLNGIVPAGKTLSQAKVDDYAQHHEDLELFKDYLKQLEDDGTAKAIRQLYDRYIDGDDAKPFVREDFVKALTKEVTAHPNAKSPELLERLAQPDFMLKQRNKANGAIPVQMQQRELDQIIKNQSVYYDWLAAPNPVEKHRKSMPYQLDELLNFRIPYYVGPLVTAKEQKAAQGGVFAWMVRKDPDGNITPYNFDEKVDREASANTFIQRMKTTDTYLIGEDVLPKQSLLYQRYEVLNELNNVRVNNEKLSIEQKQQVIRELFERHNSVTIKQFAENLRAHGDYAHIPEIRGLADEKRFLSSLSTYRQLKSLLPDAIDDPAKQADIENIIAWSTVFEDAAIFKTKLKEINWLDSQTITKLSNIRYRGWGQFSHKFLNGLTLGNGHTIIQELFLSNNNLMQILTDETLQKKMTELNADKLKAANINDAIDDAYTSPSNKKALRQVLRVIEDIKRAADGQDPSWLYVETADGGGTPGKRTRARQHQLQEIYANAAHELIDSAVRGELEDKIADKADFNDRLVLYFMQGGRDIYTGTPLNIDQLSSYDIDHILPQSLIKDNSLDNRVLVHAIINREKNATFASTIYAQKMNATWRQWHEAGLISGRKLRNLQMRPDQIDKYASGFVARQLVETRQIIKLTEQIVAAQYPETKIIAVKAGLSHQLREELEFPKNRDVNHYHHAFDAFLAARIGTYLLKRFPNLQAFFTYGKFKKADVKKLRGFNFIRDITHAEDKIVVKDTGEVIWDKKRDVDELDRIYNFKRMLITHEVHFEKADLFKQTVYGAKDSKEAGGKKQLISKKKGYPVDIYGGYTQETGSYLSVVRLTKKAMYAVVKVSTRDAAKLAVAKSISEQKENETLNDIIDEKLSKISKNGKITHELFEVVLPRVGQKTLFKNSKYNLFLVNSDTYMHNYQELWMPREYQKMWKDISLSKYGDAQTEDQLDQIFGFIVSQVNSYFNLYDINQFRKKLNDAADKFATLPMRDTDDMQGKIATIGQLLIGLQANAARSDLRNLDIKTSLGLLQIPNGISLDSDTSVVYQSPTGLLEREVHLSDL

SEQ ID NO: 1684 - protein, 1360 aa, unidentified
  REGION 1..1360: note = Description of Unknown: Cas Enzyme sequence
MTKLDKPYGIGVDIGSNSIGFAAVDENSHLIRLKGKTVIGARLFEEGKAAADRRASRTTRRRLSRNRWRLSFLRDFFESHITPTDPNFFMRQKYSEISPKDKARYKYEKRLFNDRTDAEFYQQYPTMYHLRTRLLTDPSKADVREIYFAIHHILKSRGHFLTPGYAKDFNTNKVALNEIFPALQDAYAQVYPDLDITFDENKVNEFKTVLLNEKATPSDTQRALVNLLLAKEGDRDILKQQKQVLTEFAKAVVGLKTKLNVALGTEVDSSEATAWNFSLGQLDDKWAGIESAMTDEGTEILDQIRDLYRARLLNGIVPAGKTLSQAKVDDYAQHHEDLELFKDYLKQLEDDGTAKAIRQFYDRYIDGDDAKPFVREDFVKALTKEVTAHPNAKSPELLERLAQPDFMLKQRNKANGAIPVQMQQRELDQIIKNQSVYYDWLAAPNPVEKHRKSMPYQLDELLNFRIPYYVGPLVTAKEQKAAQGGVFAWMVRKDPDGNIMPYNFDEKVDREASANTFIQRMKTTDTYLIGEDVLPKQSLLYQSYEVLNELNNVRVNDNKLSFDQKQQVLGELFERHNTVTIKQFVDNLLAHGGYDRIPEVRGLADEKRFLSSLSTYNQLKGILHEAIDDSDKQTDIEKIIAWSTIFEDKAIFKTKLNEISWLNAGMINSLANIRYRGWGQFSHKLLNELTLSTGRTVFEELLISSHNLMQILTDEVLKQKIAELNAHELKASGIYAAIDDAYTSPSNKKALRQVLSVIDDITNAAGQAPNWLYIETADGDGVPGKRTNSRQRKIQEIYANAAQELITGSVRGELEDKIASRADFTDRLVLYFMQGGRDIYTGEPLNIDNLSSYDIDHILPQSLIKDNSLDNRVLVHPLVNREKDTIFASTRFAKQMNGMWRQWHAAGLISSRKLRNLQMRPDEIDKYASGFVARQLVETRQIIKLTEQIVADQYPDAKIIAVKAGLSSQLRKELDFPKNREVNHYHHAFDAFLAACIGTYLLKRYPNLEPFFTYGKFKKTEVKKLKSFNFIRDMTHAKDKIVAKETGEIVWDNASDINELDRIYNFKRMLITHEVRFETASLFKQTLYAAKNSKNRGGSRQLIPKKKGYLVDIYGGYTQETGSYLSVVRLTKKAMYAVVKVSTRDAAKLAVAKSISEQKENETLKKIIDGKLSKTSKKGKTTHQLFEIVLPRVGQKTLFKNSKYNQFLVNSDTYMHNYQELWMPREYQRMWKDILLSNHGDAQLEGQLDQIFKFIVSQVNSYFNLYDINQFRKKIADATDKFAKLPTHDTDNARGKIATIGQLLIGLQANAMRSDLRNLDIKTPFGLLQIGTGITLDLDTSIIYQSPTGLFEREVPLTDL

SEQ ID NO: 1685 - protein, 1228 aa, unidentified
  REGION 1..1228: note = Description of Unknown: Cas Enzyme sequence
MSKTLGIDLGSNSLGWAILDDITLDVVDKGVVVFPEGVDLDAGSSLETPAAVRRAARMGRRMKFRRKMRKWHLLKLLIDAKMCPLTHEGLEEWKKHGRYPLANRAFLDWLKATDVSNPYCDRDAASRKKVGPLVLGRALYHLCQRRGFKSSRKDEAAFVDDETGEAKKQDKAMGAVKSDIAALTDEINKAGCRTLGQYFYKCLESEKGKLAKTRIRCRYTGRLEHYANEFDVIMDVQGYAQNDKLREKLYDAIFYQRPLRSQKHLVGNCPLEPHNPRAQIGHPAFEEFRMLAFVNNLTLEDEDGNYRDEQGNPRYPLTQADRKAICEEVTKVKKPTFKTLKKLFRKDPRFAKQGLWFHYYAEDDVVPSCPTRQRIAAAFGEMPYDEQMVFDALTFFDDSDKLAAWFKKHYPKLGEKEIGLLVSIHPKEGNANYSLKAINRMLPFLRRGFELSHARFCAKLPDIVSDYAKHEAEILQHLEEIRFCHRREKAERADMKPQLRKNAPELPMLHDRYREYLSTEWNVSEADWNRLYLRGDEEYQPETCYYPHGKNGECVKLAHPRLPPVQLGMMRNPLVQRSMTTLRRLVNYLGEHGKLDAGDTIRIELARSVNDFATRKAYQEWQKGRKAVRDEAAVEIARHGKAVTPDAVERYVLWKEQDGVCLYTGRTISIAELLNGNAFDIEHTLPRSLSGDDALVNKTICEAAYNRKTKQGRVPRDCPNWDEIDTRLRPWRDRLEELDKTCRAQMRKARGVSDPAAKSSARVKALVTRMERDYWRDKLRRFDMLADKLTARDGEGLGFKRRQLVDTGIMCSHAVDLLKCVYPKTFAVNGAATAFARKAWGVQADEAKDRTEHTHHAKDAMVIAALTPARFTAICTALKDDGAERRRECDVCPPPCEGFAEKVRHAADEILVKHILRQTTLRQSSKRNALAHAHSQKNDPTKIVKHVLSRGDTVRGQLHKDTFYGCIMDPTSFSLQKVVRKSLVGPVKDAEAILDKIVDPAIRAIVSDVVVNLKEKGVKFIENGMVKMPSGVPINKVRVFAANATNAQTLHDHAMQSEKEYKRPYYVTSAEGSNFRLAVFNVDGKMTVKVDNSLVWAQGHKKADYVPYERRPGFIGYIMPGAMALTYAEGNPDEVTGLSQRELVARLYKVVKFENNGRITFRRHIEARASVVLSKDLKASGKHATGESKIDLEHPHELLYVSPSVYLGQLLFEGIHFRMMLDGTIKFI

SEQ ID NO: 1686 - protein, 1551 aa, unidentified
  REGION 1..1551: note = Description of Unknown: Cas Enzyme sequence
MGKILGLDLGTNSIGWALVSIDETNDPYKIDGMGSRIIPMSQDILDTFSGGKPLETQTSARTGYRGIRRLRERYLLRRERLHRVLHVLDFLSKHYTEQIDFEKRLGQFFEEKEPKLAWKENESGKFEFLFQKSFLEMTDEFNASGQETRIPHDWTIYYLRKKALERKIEKEELAWIILNFNQKRGYYQLRGEDDEDTTKTAKTRKYFDKQIVVDIVDTNEVYRGLKILIAELGNGSKGKIFKKDIPQWIGQEKSIIVTVDIDKDGNDRYEDNGLLSQRFSIPTDAEWETEWKLIKLKTEKDLKDSLKTVGTYIYETLLSDPNQKIRGKLVRTIERKFYKDELKQILEKQIELQPELFTDDLYNDCIRELYRNNEAHQLILSKRDFVHLFLEDIIFYQRPLRSQKTAIENCSLEYRPMKNDKGVLLKDDQGKQVVKPLKVTPKSHPLYQEFRVWQWLSNLKIYRKVDDVDVTSQFIKEIDDIAKLFEFLMQKKEVNHKDILQHFLAKEGLKGKYLNAEIAKYRWNYVFDNSKEKEEDKSKKYPCNATGYEIRRRLEKVENVPANFLTPENEQKLWHIIYSVTDKTEFESALKTFARKHNLNVDSFEENFKKFPPFKSEYGAYSEKAIKKLLPLMRLREYWKWDAIDSRTKERISKILNGEYDEKIRNRVREKAINLTEQSHFQGLPLWLASYVVYDRHSEADIAGKWNSVDDLEKYLADFKQHSLRNPIVEQVIIETLRVVRDIWKQYGAGAKDFFKEIHVELGREMKNTAEKRKQMTERTSNNENTNLRIKALLMELKENSDGKLSAEDVRPYSPMQQDALKIFEEYALQNSERYDEKENKFVYAPIEDDILKISKSAQPTKTELQRYKLWLEQRYRSPYTGQMIPLGRLFTEDYQIEHIIPKSRYFDDSFSNKVICESAVNQLKGRQLGLEFIHNHYGEKVQLGMGKFASIFTEDEYKAFVEEHYTKNDLKRKNLLLNEIPEQMIARQMNDTRYISKFVSGILSNIVRAEKEDDGINSKNLIPVTGKITTILKHDWGMDDVWNELILPRFERMNELTNSQKFTSWNSNHQKYLPTVPLELSKNFQKKRIDHRHHAMDALVIACATQNHVNLLNNQSAKSENSRYDLQNKLRRKEKSSWIDKETNKKVERDVFKEFEKPWINFTVDAKNALKKIIISFKQNLRVIEKTTNYIQSYKDENGVLQTDKNGKLIKIKRKQIVGDNWAIRKPLHKDTVAGIVNLRLKKTVNLSIAIDEWENIVDKNIKTKIKQLISKGLDKKKIKKIFVQQENKWQGKDISKLEVYYFSNEKEVLVASRTTLDVSFDSKKIKSITDTGIQKILFRHLEKYNEEKDEKIIEHPEFAFSPEGIDDMNKNIIQLNKGKYHQPIFKVRTFEPKGNKFNVGSSGNKKTKFVEAAKGTNLFFAIYANDEGNRSYETIPLNIVVERLKQGLKEVPDINEKGHKLLFHLSPNDLVYLPTEEEMEHEINNERIYKMVSSSGIQCFFVKNEVANTIVNKLEYSPLNKMEKSLDGIMIKQYCKKINVDRIGNIVEQ

SEQ ID NO: 1687 - protein, 1479 aa, unidentified
  REGION 1..1479: note = Description of Unknown: Cas Enzyme sequence
MTKKILGLDLGTNSIGWALVIESETPTESCIKQIGARIIQFDNFVSTETGKESKEPLKDFSGGKGISPNAGRTLKRGARRTLDRYQLRRQNLIEALKHTGIINEGTKLCEDGKNTTFQTWELRAKAAKEEIKLEELARVFLAINKKRGYKSSRKAKNDEEGKAIDGMAIAKKLYEDNLTPGQWVFNHFKLGKRTIPDFYRSDLQAEFDRVWIFQKQFYPEILTDEFYKALKGKGLRATSALFWNTYNFNTADIKELEESLKNINTIKLHIRDQKKLQGYKWRSDALSKQLTKEQVAFVLSEINSNLNNSSGYLGDISDRSKELYFNKETIGQYLFKKLMADRHSSLKKQVFYRQDYLDEFEAIWSIQAQFHPQLTKELKEEIRDIIIFYQRKLKSQKGLISFCEFESREVEVDGKKKIIGNRVTPRSAPLFQEFKIWQNLNNLLIKKPGSKKSVAKKESQITLFEEESEVFELNLEAKQQIFEELNLKGNLSASDIIELLGYKPKEWEINFSKLEGNKTNQALYNAYLKILELEGYNEELLKLSDKDEINIAELKTPASEIKSMVKTIFEVLKIDTAILDFDAELDGKEFENQPSYRLWHLLYSAEDDTKKYSDEDKLIYGIDNIGLKKQLCEKFGFKPEHAKILASVTFQDDYGSLSTKAMRKIITHLKEGFSYAGRKDRPNEPSACELAGYRHSKNSLTKEELQTRVLKSKLELIPKNSLRNPVVEKILNQMVNVVNSIIDKENEDLAKEGKEKNFQFDEIRIELARELKKNAAERAEMTSNINAAKLVHEKIHRLLQTEFGIPNPTRNDIIRYKLYEELKNNGYKDLYTNTYIPREILFSKQIDIEHIIPQSRIFDDSFSNKTVVFRKDNLEKGNHTAIDYIEVKFGEEGLKNYLERIEDLFIQGKKNKEEGISKAKYQKLMKKASEIGEGFIERDLRDSQYIARKAKEILFGITRSVVSTSGSITDKLREDWGLINVMKELNLPKYRVLDLTEMEERKYGQKVEIIKDWTKRNDHRHHAMDALTVAFTKHSYIQYLNYLNARKDEKHKLHGNIIAIEAKETEIRVDDNGNKKRVFKEPIPNFRQVAKEHLEKVLVSHKAKNKVVTKNNNKISGKDKPQATLTPRGQLHKETVYGRYHYYQKKEDKVSSKFDKETILRVANPIYRQFLLHRLEENGNDPIKAFGGKNALSKTPIYLNNEKTEVLPEKVKLVWLEEDYSIRKDITPDNFKDEKAIEKILDEGIKRKLVARLKEYNGDAKKAFSDLDKNPIWLNEAKGITIKRVTISGIKNAEALHYKKDHFGKVILDSTGNKIPVDFVSTGSNHHVAIYRDKNGNLQDNVVSFYEVVTRVNQGLPIVDKSLNAHEGWQFLFSMKQNELFIFPNDKTGFNPNEINLLDSKNKNLISPNLFRVQKFSKVTYGNSAIRDYVFRHHLETAIEDKKELKDVTYKNFKSLGSFDNLVKVRVNHLGDIISIGEY

SEQ ID NO: 1688 - protein, 1264 aa, unidentified
  REGION 1..1264: note = Description of Unknown: Cas Enzyme sequence
MEKKILGLDLGSASIGWALISEITDKESAKCSIIDFGSRIIPYEGTEGKDFAKGTGETKNSLRTTARTARKGYDRYQLRRKYLSELLAKHGMQPDEMLFTIPKLNLWQLRSKAAIEQISINEFGRILLWLNQKRGYKSSRSDTNKDKKDTDYVANVKSRHQKINELNLTIGQYFYLELQKNEYFRVKDNIFPREAYIEEFDKICKKQQEYYPELINNELIKKIKNEIIYFQRPLKSQKGLVSICEFEGFYKKSGDGKEYFVGPRVSPKSSPLFQTAKIWESINNVKISDFKGNEVVISLDQKKLLFDYLDNHEKLTQTELFKILSLKKENYIVGKQVVNGIQGNITKCQILNCFENPELFLQLTQFNLKPEQVPELINGVNPKTGEIKEKIQINPIVENEPFYKLWHVIYSIDNLEECSNAIHQKFLLPLSESKKSGDGLPKYPALSDEKLKEIANRLAGLDFKKFGFTNKSAKVLRKILPYLMEGDKYSEAMSFAGYDHSHSITKDENLLRPVLEKLKPIEKNSLRQPIVEKILNQMINLVNAVIDKYGKPDEIRIELARELKQSKEERSKAEKDINQRNRENEFISKRLAEYGLRATRNNILKWRLYEEINNQDKKLNAICIYCGQPISLLEAIKGHDVDIEHIIPKSRLFDDSQSNKTLAHRHCNKNKNDRTAFDFMKSKSDQELQDYIIRVNDLYTRRVIKKSKRDKLLMTESKIPDDFITRQLRESQYIARKAREILQTVCRHVWSTSGSITAELRRLWGWDDITMNLQLPKYKELGLTEWVEWETNNGEQKHKKEVISGWTKRDDHRHHAIDALTIACTKQGFIQRFNTLNSTKTREDIYVEIQNRSIQYNDKLSNIEKYIISQQPIPTEIVQQAVSKILISFKAGKKVAILGKRKIGKHGNKTVVQSGIVVPRGPLSEASIYGKINRLEIQKLKYLFENPDHIFKPYIKKLVTDRLELFEFDIKKALASVKKDPIYLNKNNSTILEYASCFREEFVIKYAVNTDFTKTEKVIDKKIKAILEARLAKFGNKPKEAFKDVLNNENTPIKWYEDEGISRPIKSVRCYTGLSEVVPLKMDNNGKVRGYVKPGNNHHIAIYRDQEGNMSEHVCTFWHAVERKKHKFPVVIQNTNEIWDKILSAPEGTYTQDFIEKLPGADLNQIISIQMNEMFILGMSNDEIEQAMQNRKFEEISLKLYRVQKLGSKDYTFRHHLETQLIDDDNSVKCQRFIRIRSIGSFYSFNPQKVRVDLLGGIRKIENI

SEQ ID NO: 1689 - protein, 1366 aa, unidentified
  REGION 1..1366: note = Description of Unknown: Cas Enzyme sequence
MEKILGVDLGTNSIGLALREENEFDWFGVYTFKKGVGFGKSGEFSFAAERTKHRSSRRLYNARRYRKWETLKILIENDYCPLTIDELNKWKYYLKGKGRVFPRNNEIFNNWIKLDFNNDGVADYTSPYQLRRELIKETLNINEQINRHKVGRAFYHIAQRRGFKSSRKGGDNEKTSVHKGSTKTKTIGRNEYENLILQEGTLGAAFAFLEDNGIRVRNRYTLRSDYYSEIIEISKKQRLTSEFAEQVTKAVFFQRPLRSQKGLVGKCTLEKNKYRCPISHPKFEAFRAWSLINTIKYKNEETNKFLPLPFELKQKIFDEVFFRKSKANFDFADIRKFIDKNSGENWQLNYNKKLDKNNVSGCPVSARLKSVFGNNWENIKITANRKNKKGETKQVTYSIDDIWHILFSYEDEEAFQEFTSKVLKLNEDQCKDMNTLWNSFPVGYANLSLYAISNILPFLQKGLIYTEAVLLAKIPRLIGWQLFEQNKQVITDAIRDEIKINRKEKEIITIANNLISKYKVLNFEHQFAYKNTEYKIDSSDLKDVEANTIKYFGEKKWGKISANEKNTILDQVKEKYQEFFYSGKRAYFKPPHLLEQVKDFLRDNFNLADNELEKMYHPSQIDIYPKDEEKQFLKSPKTAAFKNPMAYKTLYRLKDVINHLIEIGKIDSETRVVVEIAREMNDANRRSAYETYQRRRENENKEFAIAITELLKDPGFNGNANSNSKTDLNKMRLWTEQMENNDDLFKNILATKEDVKKYRLWKEQSSRCIYTGRVISITDLFNPNTIDFEHTIPRSKSFDSSLANLTVCYADYNRNIKKTRIPRELPNYKEATNDYSAIEHSLEKWKDRIDDLKKQIEFWKLKSKIAKDKESKDTAIREKHLRNFEYEYWKDKVDRFTREDIPQGFVNSQLRDTQIISKYAFHYLKTIFNKVEVQKGTVTSQFRKIFEVQEKYEAKNRSKHHHHAIDAAVLTLIPEPAKREEILRKCYEYEELYNKQYHEKPFPGFHQSSITEIENTILINNIPNKDQALTKSKRIVRNRGKVVWLRDKNGVLLRDENGDKIAKIAQGDSIRGQLHEASYYGKIRLPKYDENGKFLRDISGSIIMSDEYRVVKREAIDKLKIEKGQIKDEVVDKLLKLHIEEQLAQGKEITKVVDFNGKIIRHIRIHPKASRAESLIALKPHCYESSYDHKKDIYVKTGDNYAFALYISKDGKKKIVSRNLFDVKGFDAETSVKEIFEPTINLTKTKIASLHHVFQVGQKVLFYENSPQELKDLGNVTDRMYYVHTLFSAVDGRIRFQHHLEARSDEQLLLDFSKDIFGIKGKNGFSKFTTDFIQPRLLLSPSNFNFIIEGLDFEFSLDSTITYLFQ

SEQ ID NO: 1690 - protein, 1237 aa, unidentified
  REGION 1..1237: note = Description of Unknown: Cas Enzyme sequence
MKILGLDLGVTSIGWALIEKNNENGEIDLIKSGVRIIPIETKEANQFSSGNTASPNIERRKKRMQRRMYFRKKNRNQSLIKTLIDKGLWDESLINIEKNKLWELRNKAVNEQISLSELGRILYHLAQRRGYKQMRIEQDESDANSKSDYKKNIYTRYQIIKNENITVGQYFYRELKNNEHYRVKEQIFPRKAYEEEFEKIINKQKEYYPDILSEDFVNKIQHIIFYQRPLKSQKHLLGVCTLEGKTIKIKNNDGNIIEKYVGPPVVARTNPLFQIHRIWQTINNITIKNKKTYKIYELSIDEKNKIFNELQVKDSLSIEQLYKILNLSKDEWYFDKLSKNGIKGNNLLALIRKALKDEYYSPDIFKLDIKIINYQKQILDKSTGEIKETTLEMIDPNVVNEPLYKLWHILYSVVDKEECIKALIKNFNFSPSAANKLSDINMTSLKYGSLSMKAIRKTLPYLMKGMIYSDACQIAGYNFSNAISKDENYIRPLKNKIPLLPKNSLRQPIVEKILNQMIHVVNEIIDDNNGLVSRQERENNNFAIHIELARELKTSKEEKQGITKAIKRNTKENEEIENKLKNEYNLTPTRKLIEKYKLYKELSLEGTNILQPQCIYCGDFISLTEALTGDAIDVDHIIPQSKLFDDSRSNKILVHANCNRTKGNMTAYDFMQSKGQEQFKTYLALVEKLKEKKSITYKKYKYLLMSEKDIPQDFIDRDLRISQYITRKAREICMDISKDVLVTSGTITARLRELWGYKDIITEINTELINNIELSDEDKSELDEIFKNKRSDHRHHAIDAITIASTTRSIIQRINTLSSAESKDKINEYLKQLNQETLDTVYNPNEKSLRLLHKYLANQPHPSREQVKQSIKDILISFKPGKKVATYSKRIVYIGNKPKILQTRILTPRGALHEESYYGRIPIYEFKDLKYAIENPNLVVNNHIRNQIKELLDKYNNDTKKLWNDINKEKVFIYSDINNSNAIKDVKCYHYEYVIKKSVQGDKVDQKAIDKKIKEILTNSKNVKEEVYFNYAKHIPIRSVRVFTGLNESSMRPIRLNDKNEPITFVKLGNNHHIAIYQDKNEKYQEHLCDFWHAVERKKYNIPVIIENPDKIWDEILENPDSYPQDFLNKLPDPSWHLVLSFQANEMFVLGLSNEEFDQYFVDKNYAILSNHLYRVQKLSTNQYFFRKQNDTSSDLSSLYRKIEYLKQLSIQSLLKENPIKVRINYLGEIVDYKKTF

SEQ ID NO: 1691 - protein, 1247 aa, unidentified
  REGION 1..1247: note = Description of Unknown: Cas Enzyme sequence
MERKILGIDLGVASIGWALVKLDDNHPENREIVKLGVRVIPLDANEANEFSKGSGETRCRQRTMRRGMRRLYSRYVMRRKCLTNELIRLNMFDPGLFSLDRINLWEIRSKAVTAEVTLNELGRVLYHLHQKRGYKSNRRDISAKKEDTDYVKEVKGRHETIKDLGQTIGQHFHEKLLENPYYRIRANVFPREAYEEECRLILSCQQKFHPDVLTNEIVDNLFHIIYVQRPLRSQKGLVRICEFEGRWIMKEGKEIFMGPRVAPRSSPLFQIEKIWENVNNIRLKNRYGEEYPFNPEERRMLYEFLNQNEKLTGPKLIELLGLKKTDGWYYDKMLQKGIEGNRTYIVLKNKLKPFSYNPDILRLNLSYIKNPKLQGYVDTSTGEVYEACELSPDVEKEPLYQLWHLLYSVHDPEECKNALMRKFDFSEQAAEELTTIDFTAGGYGNKSHRMMRRIIPYLANGIKFSEACTMAGYRHSFHINSEENLARTLKDKLELLPRNSLRQPIIEKVLNQLIQLVNEIMDEKSGLMSREERITNRFEIRIELARELKQNKEDRNETWRRLRDVESENKKYADELENLGVKITRNNIVKMRLFYETTEDPNSKINAICLYCGKAFGKHQAILGKEIDVEHILPRSLIFDDSQGNKILVHQRCNQDKDNMTAYDYMCAKGDAEKERFVTLVNFLHKNKAISTGKRNRLLMPKEKIDKDFIERQMRETQYISRKAVEILNDICFSVNTTQGKVTSKLRHLWGWDRVLLELQKQRLQYLKNSGLSEADEEKYEKALQDLEDDFAKRNDHRHHAIDALTIACTRQGFIQRINTLYSDHTRDDMYLAIKQQKESGECEKNELNHKLSMLEEYLRLQKPFTTYQVKEKAAEILVSCKPGKKVAVRGRNIVKLPEGKKFIQKNIIIPRGPLSEDSVYGKILQYDGIKPFRYMFANPALIVDEQIRQLVVERIALHQGDIKKALQSVKKEPLTDLNGKLISEAHCYRVEYVIRKSLDIQNFKKVSDIEDIVDEAIQQKIRDHILLHGGEGKMKEALSVPVYSDENHTMQIRAVRIKTGLKAVVPVSYNDDNIPAGFVKPGNNHHIAIYADHEEKLTEHICSFWHAVERYKYGLPVIIHHTDSFWDAVMQSRQKFPDAFLEQLPPSGQTLKLSIQANEYFLLYLPQEKAHDAIRRNDIALLSHHLFRVYNISKSDYNFAFQFITMSPGGENDKVSYMSRRFQSISALIEANPIKVRINRLGNIEL

SEQ ID NO: 1692 - protein, 1067 aa, unidentified
  REGION 1..1067: note = Description of Unknown: Cas Enzyme sequence
MNTHNYILGIDMGVASIGWGAVSVESKWLDCGVRVFPAGVDNFNSPKEKHPNLDRRSARGMRRRIRRKAERKAIICGFLQELGWMPPAGAERDDWYALDVYALRSRAISEKISLAELGRIILHLNQRRGFLSLRKSETSAADKETQGMLGSITELQREIDASGHRTLGKYLHHLYLKKGLSVRLRNRHTRRGMLHHEFSLIWETQEAFHPELSDSLRYGRVGRLANPTTVVKPAPRQKGVSLLEHFGFENLTFFQRKVYWPPNSIGRCELEHEERRAPVADRRFQEFRMLQEVNNLRLIDNSEPGIPTERALTPDERQECIDYLSGRKEAALIGLRKHLCKQRKFRGSLPESPDQISFNLESGGRTKISVLATDYLLARAYGKGWEMLDEAKRNEISAALLAPAATDDDIRAALEAIGEVSPEQIDMLLGVSLTTSYGHLSVKALEKLLPHMRDGKLYMARDGSDSAMHAAGYRRRDEIEASELDVLPSFQSLLNPDSPDYDPLQSEINNPVVLRSLTELRKVVNAIIRKYGKPERIHLEMARDLKMSPKQRAEYQKRIRDFEKERDDAAKELELLRIVPNRDAIELYRLWKEQDHVCIYSGKTISSSDLFSGDLDIDHIYPYSKSADDSMSNKVLCYAIENREKGNRTPCEWLADRDADRFEQVLQRAKNLSRGKYKRFLSREVPEGFVNRDLNDTAWMARAARQYLARLFPKPHHVLGVKGAHTALLRDRWELHSLLRDDGLNLKNREDHRHHALDAIVIALCDQTAIQRLTRACAFELRRKEARESGKRIYHLRATGDGFDAPWEGFREAVGTALNGIWVSHRPRHKVSGPLHKETNYGKKPDGKLVVRKKVKDLSKKEIEGICDPAIKGIITAYIERKGGEIAALKEIPENQPLCMPSGIPIRKVRTAISYAHITIRSGTPHEAHVQSAATHHLSIFALGDGKYHFEPVTLFEATRRLRVKESVVQKQYEGMPPEAKLMFYLCSGDSMMATIDGKDELFVFNTMAVTSKQVWFAHHTDAAKAHKPEKTDKSILRSCMESTFGQNFPQARKVTVLPTGEIRDAS

SEQ ID NO: 1693 - protein, 1122 aa, unidentified
  REGION 1..1122: note = Description of Unknown: Cas Enzyme sequence
MNYILGLDMGVASLGWAAISEEDQFIDSGVRIFPAGIDKFGTGKDTHLNQQRRSARGARRRVTRKAKRKMAIREIFSELGWIPTDSNELQCWERLDVYELRHRALREKVTLLEIARIILHFNQRRGFLSLRKSEVDAAEGEDKKKLEGMLGEIESLQDEIDSTFAAPSDRTLGNYLHHLRQKKGGPHGNLIRLRSRHIRRSMLHHEFSLIWDEQSKHHSELTDDLRYGTHGPQENPTIVVKPIPREKGRTLLQQFGLENLTFFQRRVYWPTSSIGKCELEKDELRSPIADRRFQEFRMLSELNKLRFIDNSINGKPTERKLTPAERDLAIGYLSSTQKPTLKSLKRKISKLPESPTANQITFNLEADGRNNIGGLDTELKLAKAFGEKDWGELTNDQKNQIVEILTMPEPGASKVIQRTDDETKELLLQIPTLTELQIESLLRVSLPAGYCNLSTKALEKLLPHIRNGFNYQGKTEEDSALHLAGYKRRDESSDRLLKKLPLLAELTTPKLSHYDPHFPHVNNTLVLRSLHELRKVVNGIIAKHGSPSRIHLEMARDLKMSAKQREDHAKKNNQHKKSRELATTKLEENGIVPTRDAILLYRLWEEQNERCIYSGKTISFKQLISGDVDIDHIYPRRANDDSYMNKVVCFRQENADKKDRLPIDWLGESSEKFQNLTKRVETLPYPKRKRLLAESVPEGFAARDATDTAYMTKVARHYLTYLVEKDHHVFCTKGKHTAFLRKQWGLNFLLRHDLLDLKNREDHRHHALDAIVIAACSPSLLQKISKELTFQNNWKDKANDQGHPVRIYRLKPVADTITPPWASFAHDTEVALNQIWVSHRPSRKVSGPLHEETNYGPTETPGILVRRKSISSLKDTELKKIRDPEVSKAVSQYLEKEKCLYRSDIGGKQFKEELDHLFSTQESLVQTDIDLIEDPKLRTTLTAKLKKKNPLQDAELGKITLPSGIPIKKARLLIANKTAIPLRRRQPKELLIPGNTHHLAIFSLGDGKYHFEPITLLEASRRKRQKEPIVQKHYPNMPPEAEFVMSLCSGDLISTNDGQTTLLFVFVTIAATISQARFVEHTDARDSKSRKLFTAGPGSFANNFPNAQKVEILPSGKLRPSN

SEQ ID NO: 1694 - protein, 1047 aa, unidentified
  REGION 1..1047: note = Description of Unknown: Cas Enzyme sequence
MASELIFGFDIGTTSIGSSVVRMDTAAEAGEILHLGVRVFPEARDPTGVPLNQERRSRRMMRRQLRRRRTRRRELNGLLSAQGLLPAFSKEEGASWASAMAQDPWRLRARALTEPLEAYELGRSLYHLAQRRHFRGRDLEAGAVGSESETEASAEERKAASQRQLDRRALAASGLTLGAFLAEIPERASRRRGHHFAREDVAGEFRAILAAQAPHHPCLRDPQFLAALEHAVFDQKPVFWRKATLGACRFMPERELAASASWVAQEKRMLEKLNNLRIDDGNGRPLDPNERGAILALLRKQDTVSWAGIHRRLKLYWRSQDQSEKPTFNLQRGGEKGLVGNRLENRLAAILGERWTMEPELREALRSSLHARLYAADYGQIGGRIVIRREKERTIERAKAREALKTDFALSDEQADQLAALTFPTGWEPFSEAALWALLPRLEEGAVFGALLNGPEEEEWRAATFPNRSQPTGAWVDRLPTPGNSQEEIERQKSVRNPTVLRVQNELRKVVNNLIAAYGRPDRIRVEVAREVGRSARERAEDLKRNRDREKVRKAAVADLQSNGIAQPSRDDIDKWLLWKECRHVCPYTGADIGFADLFGPAPRFDIEHIWPRWRSLDDSFANKTLCRKDVNVRKSNRTPLELYESDPQALETVVDRIKSFDVRYGPGWRKARRFREPVPDDFAARQLTDTGYAARQAVSFLKMLFPDLGQVGEVRVATLTGRVTARLRRHWGLNNILSDSGEKTRADHRHHAIDALVVALAHPGYTQRLSRWFQAKDAAIPQAAPELEPPFAGVRAKAEAAVAAIVVSHRVRRKVSGPLHKDTTYGDAGPAESAGAIAYRWFVTRKPVESLTKALLANEEAWPDGHVRERVRAWIEAHGGDPKTAFALGYPTVSEGGAPIRKVRIRVKQQQTLMAPLKNGYADLGNNHHMAIFRRADGRAAHRVGSLLDAANRVRKGDTPVNRMMDGAKFLFSLSAGDTVRLNGDRAGLWIVRKLAANGQVTLWPINDTDAEAHKTKFEPTVAGMLSRGLEKVAVDPIGRIRPARD

SEQ ID NO: 1695 - protein, 1049 aa, unidentified
  REGION 1..1049: note = Description of Unknown: Cas Enzyme sequence
MASELVFGFDIGTTSIGSAVVKMDSSLETGQILHLGVRIFPEARDPDGIPLNQERRKRRMMRRQLRRRRVRRRELNRLLCISGLLPEFSKSEASAWADVMGLDPWQLRTKALSDKLTAAELGRAIYHIAQRRHFRGRDLEIADVQAAEKHDATAAEEEKAASQREKDRSALRESGLTLGAFVASIPERSERRRGYHFARDDVAAELRAIVDAQAPHHEQLRDPELVAAIEQTIFEQKPVFWRKATLGSCRFMPGAELAGSASWIAQEKRMLEKLNNLRIDEGNGRPLDDQERSAILKLLRKQDSVSWAGIHRHLKLYWRKHDLPEKPTFNLQRGGEKGLLGNRLENRLATIIGDRWDAEPDLRQRMRGEIHARLYAADYGQIGDRIVIRREAERRQARGSARESLKADFALTEQQAHDLAKISFAPGWEPFSSAALWEMLPRLQRGVAFGTLLAGPEEEGWRASTFPHRLMPTGSWVDRLPTPGNSREESDRQKTVRNPTVLRVQNELRKVVNNLISVYGRPDRIRVEVARDVGKSARDRADDLKRNRDREKERKKAFEELQKSGIAQPSRQDVEKWLLWEECNRQCPYTGRMIDFAGLFHHGEFQVEHIWPRWRSLDDSFANKTLCHRDFNLKKSNRTPFEAFEHDTEGWEAALKRVREFAGPPGRVGVKAKRFAATEVPSEFAARQLTDTGYAARQAVGFLKMLFPDLGQSSEVRVATLSGRVTSRLRHNWGLSHILHDSGEKTRADHRHHALDALVVAIAHPGYTQRLSLWFKARDAATPMPEPFLDPPFADVRAQLQSRMSGIIVSHRVRRKVSGPLHKDTIYGDAGPAEGSGGIAYRWFVTTKKIEDLSAKILANDDAWPDAHVRDRIRDWVKKSGGNAKKAFLNGYPTVSEGGPPIRKVRIREKQQAKLMAHLKSGFADLGNNHHALVYLKPNGKSECRIVSLFEAATRLRQGLPPIDSSDLTDLKFKMSLAAGDTVKLGGDRAGLWIVRKMSANGQITLWPINDADAEKNKTIFEPTIGGMISRGLEKIAVDPIGRIRPARD

SEQ ID NO: 1696 - protein, 1046 aa, unidentified
  REGION 1..1046: note = Description of Unknown: Cas Enzyme sequence
MASELVFGFDIGTTSIGSAAVRMDGVAGTGDVVHLGVRIFPEARDPDGMPLNQERRKRRMMRRQLRRRRTRRRDLNQLLLEAGFLPEFSKAKDSAWAEAMARDPWKLRTKATDEPLNSIELGRALYHLAQRRHFRGRDLAEASETADETADKASAEEQKAASQREKDRSALRASGRTLGAYIAAIPERDQRRRGHHFAREDVASEFRAIIAAQAPHHARLGEADFVAALERAIFDQKPVFWRKATLGACRFMPGSELAASACWIAQEKRMLEKLNNLRIEEGNGRPLDEQERAALLALLRRQDSVSWGGIRRHLKLYWRKNDLPEKPTFNLERGGEKGLVGNRLENRLAAIMGERWAADPNLRERMRRDIHARLYTADYGQIGGRIVIRREAERRQARAAERDRLEADFGLSDDQADKLIGLTFAPGWEPFSEDALWQFLPRLQQGAVFGALLAGPEEEDWRASTFPNQLQPTGSWVDRLLTPGNSKEEIDRQKSVRNPSVLRVQNELRKVVNNLIAAYGWPDRIRVEVAREVGKSARERAEDLKRNRDREKVRKAAAADLQSKGIAQPSRDDIEKWLLWKECRHICPYTGDEVSFGDLFGASPRFDVEHIWPRWRSLDDSFGNKTLCRKDVNARKSNRAPLELYEADTAALDDVVARVRNFDDRYGPGWRKARRFREPVPEDFAARQLTDTGYAARQAVGFLKMLFPDLGQAGEVRVATLSGRVTSRLRHNWGLNNILSDTGEKTRADHRHHAIDALVVALAHPGYTQRLSRWFQARDAATPQPEPALDPPFADVRHQAERKVAQIVVSHRVRRKVSGPLHKDTTYGDVGPAEGTGGIAYRWFVTRKPVEALTKSLLADGNAWPDPNVHDRVRAWVEAHGGDPKKAFVSGYPTVSDGGAAIRKVRIKVKQQQKLMAELKNGFADLGNNHHMAVYRTPDGRVDTEIVSLLEAADRLRQCQPVIRKERDGSPLIMSLAQGDTLSFPDGKLKGLWIVQGVWSAGPIVLWRAEDATGSSVFRPTAASILKSGGRKVSVDPIGRIRPARD

SEQ ID NO: 1697 - protein, 1043 aa, unidentified
  REGION 1..1043: note = Description of Unknown: Cas Enzyme sequence
MATELVFGFDIGTTSIGSAVIRVNSSAEQGDILHLGVRIFPEARDPKGVPLNQERRGKRMARRQLRRRKQRRMDLNSMLGDSGLLPPFAKDKNSAWATVMAIDPWETRTRAVSGPLTQQEFGRALYHLAQRRHFRGRDLEVAQEAEEDAKTEEASAEEKKAASLRENDRKALRASGQTLGTFLATIPERAERRRGHHFAREDVLAEFKAILTAQAPHHQQLTNPDFVNLLEETIFAQRPVFWRKATLGACRFVPGAELAASSCWLAQEKRMLEKVNNLRIEAGNGRPLDDQERRAILELLRKQDTVTWSGIHRHLKLYWRKNDQPEKPEFNLQRGGEKGLVGNRLENKLSHILGERWQAEPELRDALREQIHTRLYAADYGQVAGRIVIRREAERRAERATERDRLKADFALSDEQADEIAKFSFAPGWEPFSTEALKTFLPRLQAGAVFGALLASPEEEAWRATTFPNRAQPTGSWVDRLPTPGNSREEIDRQKSVRNPTVLRVQNELRKVVNNLIAVHGKPDRIRVEVAREVGKSAAERAEDLKRNRDREGERKRATAELRAGGIAEPSRDDIEKWLLWQECNRQCPYTGKLIDFASLFHTGEFQVEHIWPRWRSFDDSFGNKTLCHRDFNLKKSNRTPAEAFEHDEEAWHTALDRVRKFNGPPGRVNLKARRFAAIEIPADFASRQLNDTGYAARQAVGFLKMLFPDEGQAGEVRVATLAGRVTARLRHVWGLNHILSEDGTKTRADHRHHAIDALVAALAHPGYTQILSRWFQSRDSATQLPLPALEPPFPLPHHVVQAKADAIIVSHRVRRKVSGPLHKDTTYGDAGAADGKYRWFTTRKPVEALTSALLNNDDAWPNPHIRDVLRQWVADHGGDPKKAFVSGYPVVSEGGPPIKKVRIRVKQQGKLMAKLKNGFADLGNNHHAAIFRMTDGGIETEIVSLFEAADRLRRREAVIRRHRDGGQFVMSLGAGDALQFPYGDRKGLWIVQGVWASGQIVLLNALDAEGTSVFRPAAPSILKAGGVKVAVDPVGRIHVARD

SEQ ID NO: 1698 - protein, 1046 aa, unidentified
  REGION 1..1046: note = Description of Unknown: Cas Enzyme sequence
MTSELVFGFDIGTTSIGSAVVRMDSTAGTGEVVHLGVRVFPEARDPDGIPLNQERRKRRMMRRQLRRRRARRRDLNQLLCKAGLLPEFSKQAGSEWAEAMKLDPWLLRAKATSERLGPVELGRALYHLAQRRHFRGRDLEDETAVADEKSEAVSAEEQQAASQREKDRGALQASGLTLGAFLAAIPELEQRRRGHHFARNDVAAEFRAIVAAQAPHHAQLRDADFVSALEQTIFDQKPVFWRKATLGKCRFVPDADLAASACWVAQEKRMLEKLNNLRIEEGNGRPLDEQERAAVLALLRKQDSVSWGGIRRHLKLYWRKHDLPEKPTFNLERGGERGLVGNRLENRLSSIMGERWNADPDLRDRMRREIHARLYACDYGQIGGRIVIRREAKRREERRKAREALKADFTLTDDQADQLAALTFVPGWEPFSEVALWRFLPRLQEGAIFGALLASPEEEGWRDATFPDRERPTGSWVDRLPTPGNSREEIERQKAVRNPTVLRVQNELRKIVNNLIAVYGKPDRIRVEVAREVGKSARERAEDLKRNRDREKQRKKATEELQKSGIAQPTRDDIEKWLLWQECNRQCPYTGGTISFDALFRHGEFQVEHIWPRWRSLDDSFANKTLCHRDFNQKKSNRTPFEAFENDPDGWEAALTRVRAFAGPKGRVDIKVRRFAATEIPADFAARQLTDTGYAARQAVGFLKMLFPDLGQTGEVRVATLSGRVTSRLRHNWGLNNILSDSGEKTRADHRHHAIDALVVALVHPGYTQRLSRWFQARDSATPQPEPPLDPPFADVRAQAESKVADIVVSHRVRRKVSGPLHKDTTYGDAGPAEGSGGIAYRWFVTRKPVEALTKSLLANDEAWPDTHVRDRVRAWVEAHGGDPKKAFANGYPTVSDGGTPIRKVRIRVKQQQKLMAPFKNGYADLGNNHHMAVFQHPDGRVETEIVSLFEAADRLRRRQPVIRKSLNGAPLMMSLAQGDALSFPDGKLKGLWIVQGVWSAGPIVLWRAEDATGSSVFRPTAASILKSGGKKVSVDPIGRIRPARD

SEQ ID NO: 1699 - protein, 1075 aa, unidentified
  REGION 1..1075: note = Description of Unknown: Cas Enzyme sequence
MHRILGLDIGVTSIGWAVIDYNSARETGQILRLGCRIFPEARDPDGTPLNQNRRQKRMMRRQLRRRRERRRALNEYLAEIGLLPAFCSRNAQGQATETDAWHLLMRSDPIALRKRGLTEMLTPHELGRALYQLAQRRHFKGRDLDNDEDDQDVEATTTEKSKSKGKRKKTATEETADSSEQSADEKAAKAGRDSTLAALKKSGETLGEYLSAKAAAHERQRGTHANRATVLNEFERLWDAQAVHHETLRDPAIRERVQEAIFAQRPVFWRKNTLGTCRFMPGETLCPRGSWLSQQRRMLEKLNNLAIAGGNARPLDKEEREAILAILQTQGSMKWTAVRKALKSLYKARGEAGAENSLKFNLELDEKGTLLGNPLEAKLAGIFGNAWANHPRKQAIRDATHQRLWEADYSEVGTQRVVIRPLSERKQRRAAAAEKLMADFGVTAEQAAALQDLKLPTGWEPFSVAALQEFMPHLEAGVRFGTLTNSPERKWQAWREETFPEREQPTGEIHDRLPSPTRKHPEELKRMASLRNPTVVRVQNELRKVVNNLIRLYGKPDLIRVELAREVGKSKREREEMQVGQRRQEKRRKDARADLESKGIKEPSREDIEKWLLWKECDRFDPYSGQPISFDALFGTPEFDVEHIWPRSKSFDNSFANKTLCEKSYNIRKANRIPFDAFREDPEWEDMKDRVWALVKNGRMNAGKAKRFCREKPLEDDFTARQLTDTSFAARQAVAFLKRLWPDVGIGAPNVQVVTGRVTGQLRRLWGLNHILSDDGEKTRADHRHHPVDALVVACTDPGITQRLSRYWQARDSGTAQQPHFNPPWSTIRADAEKAVAEIVVSHRVRKKVSGPLHKDTIYGDTRKDVTTKTGTYRLFVTRKPVSSLSKGEIEGICDDRVREIVTQHVVERGGDPKKAFPPYPTLGPDGPPIQRVRLTIRQQTSLMASVSTGYADLGSNHHIAIFRQPDDKADYEVVSLFEAARRLAKREPVVRRRHENGAVFVMSLASGDTLEYPDGDKKGYWIVQGAWANGQIVIESANDAAHKTTTRPAPGALLRDNVRKISVDPVGRVRPAND

SEQ ID NO: 1700 - protein, 1038 aa, unidentified
  REGION 1..1038: note = Description of Unknown: Cas Enzyme sequence
MQRIFGLDIGTTSIGFAVIDHDRDQGVGRIHRLGARIFPEARDEKGTPLNQHRRQKRLARRQLRRRRLRRKALNELLSARGMLPRFGTSAWHDAMALDPYALRARGTEEALQPVEVGRALYHLAQRRHFKPRDEAAEADEQEVGDQEAETKREKLLQALRRSGRTLGQELAARGPHERKRHEHALRSTVETEFERLLTAQARHHEILRDPEFVEELRETIFAQRPVFWRTSTLGTCPFVPGAPLCPKGAWLSRQRRMLEQVNNLAITGGNARPLDHEERRAILAVLQTQASMSWGAVRTALKPLFKARGEAGAERRLRFNLEEGGGKTLLGNPLEAKLARIFGEAWATHPHRDAIRETIHDRLFAATYNAKGAQRIVILPASQRAERMRGVIAGLQADFGLSHEQAMALAELPLTPGWEPYSSEALRALMPKLEEGVRFGALVVAPEWEDWREATFPQRERPTGEVLDLLPSPKCHDESRRQTRLRNPTVLRTQNELRKVVNNLIRAHGKPDIIRVEVAREVGLSKREREDRYNGMRRQERQRQAAIKDLQAKGFAEPSRADVEKWLLWKESKETCPYTGDKICFDALFRRGEFQVEHIWPRSRSFDDSFRNKTLCRRDVNLAKGNQTPFEFFESRPEEWEAVKRRLDGLQAKRAGGEGMARGKVKRFVASTLPDDFAQRQLNDTGWAAREAVAFLKRLWPDEGQAAPVRVQAVTGRVTAQLRHLGGLDGVLSDGARKTRDDHRHHAVDALVVACTHPGMTERLSRYWQQKEDERAERPQLDPPWPTIRADAEAAKDLIVVSHRVRKKISGPFHKETVYGATDEREVTRGLEYEKFVTRKRVEDLTKSMLADIRDDRVRQIVTAWVAERGGDPKKAFPPYPTLGSSGPEIRKVRVLIRRQPTLMARAATGFADLGANHHVAIYKTADERFAFEVVSLLEVARRVDRGEPPVKRQRGDEKLVMSLAQGDLIRFAKTPDAEAAIWRVQKIATKGQISLLHHDDASPKEPSLFEPMVGGLMARNPEKLAVDPIGRVRKAGD

SEQ ID NO: 1701 - protein, 1037 aa, unidentified
  REGION 1..1037: note = Description of Unknown: Cas Enzyme sequence
MERIFGFDIGTTSIGFAVVDYSPEQSAGNILRLGARIFPEARDPDGTPLNQQRRQKRMMRRQLRRRRMRRKALNEALRDAGLLPAYGSPDWPIVMGGDPYDLRRRGLEEKLSAYEFGRAIYHLAQHRHFKGRELEDSDTPESDADDEKEAQSERDATLKALRNEQTTLGAWLARRAPSDRKRGVHAHRTVVLEEFERLWTTQSEYHPVLRSEELKAKIGDTIFAQRPVFWRKNTLGDCRFMPGAPLCPKGSWLSQQRRMLEKLNNLAIAGGNARPLDAEERAAILSKLQQQASMSWPGVRGALRPLYKQRGEPGAEKSLKFNLELGGENKLLGNVLEAKLADIFGSDWPSHPHQQAIREAVHERLWAADYGETPDKKRVIILSDKERKAHREDAAKSFVADFGVAEEQAAQLQVLKLPTGWEPYSIFALNLFLPELEKGERFGALVNGPDWENWRREVFPNREQPTGEILDKLPSPASKEERERISQLRNPTVIRTQNELRKVVNNLIALYGKPDRIRVEVGRDVGKSKREREEIQSGIRKAERRRSEATKDLQSKGIPSPSRDDVEKWLLWKEGQERCPYTGDQIGFAALFREGQYEVEHIWPRSRSFDDSPRNKTLCRKDVNIEKGNRMPFEAFGHDEDRWSAIQTRLQGMVSAKGGAGMSPGKVKRFLAKEMPDDFAARQLNDTRYAAKQILAQLKRLWPDMGPEAPVKVEAVTGKVTAQLRKLWTLNNVLADNGEKTRADHRHHAVDALAVACTHPGMTNKLSRYWQLRDDPRAAKPTLSPPWDAIRADAERAVNEIVVSHRVRKKVSGALHKETTYGDTGDDVKTKTGTYRQFVARKKVEALSKGELEEIRDPRIKEIVTAHVADRGGDPKKAFPPYPRVSPDGPEIRKVRLTTKQQLNLMAQTGNGYADLGSNHHIAIYRLPNGKADFEVVSLFEASRRLSKRKPVVQRTRADGATFVMSLSAGDTIEVPDGDRAGHRIVQSIWSSGVVVTLAHIDANGDTIWRPNAGSLLKGRARKVSVDPIGRVGTAND

SEQ ID NO: 1702 - protein, 1089 aa, unidentified
  REGION 1..1089: note = Description of Unknown: Cas Enzyme sequence
MRRIFGLDIGTTSIGWAGIEHDPATFEGNILGMGVRVFPEARDPEGTPLNQTRRMKRLARRTLRRRRQRRRALNELLADAGLLPPFSKDKASAWAELMKTEPLTLRSKGVAPKDGTADRLTPHELGRALYHLARLRHFKGRELAETEEEPGETPDEKKAGEARQQTIQALKASGQTLGQMLAGRGAPKGEVPRQQTRRIHALRSHVESEFNRLIQSQEAYHPILRDPKFAARLHTTIFAQKPVFWRKNTLGHCRFLPEAPLCPRGSWLSQQRRMLEKLNNLTVVGGNFRPLDKEERAAILARLGSQASMSWSGVRSALKPLYKRRGEPGAEKALRFNLELGGEPKLLGNAVEAKLAAVFGNDWMSLPHRDAIRYEVQERLWRADYDEIGQQRVVIRPESDRRERREEAARDFVRDFGITEAQAKSLSDLQLPAGWEPYSTEALSLFLPKLEEGVRFGALVAGPEWEEWREASFPDRERPTGEILDRLPSPADPEEQKRLGTIRNPTVVRVQNELRKGVNNLLRVYGKPHLIRVELAREVGLSKSQREEMRNALRQQEQRRRTAADDLRSKGIDQPSRAVIEKWMLWKEGLERCPYTGDQIGFDALFRNGEYEIEHIWPRSRSLDDSFRNKTLCRRDVNGQKGNRTPFEYFRSNPDEWDAVVKRLQSMVARKGSPGVPVSKFKRFTAEVIPEDFTNRQLTDTGYAARQAVSFLKRLWPDLGPEAPVNVEAVSGRVTGQLRRFWELNNILSEDGEKTRADHRHHAIDALVVACTDLGTTNRLSRYWQQREDPRAERPRLPPPWPGIRRDAERAVEGILVSHRVRKKVSGPLHAEMPFGDTGEEVEKNGVRQRVFVKKMPVGKLSSTTLEIGSPSEISRTAKFVVRDKAVREALKRHLDHAGGDPKKAYVSYPSVSGAGPEIRKVRTLSLQQSRLMAPVSVKREGSGEGGPTGFADLANNHHLAIRRLSDGSVGFEIVSLFEAARRLAKREPVIRRRFGDGASFVMSLAPGEAVEFLDGPREGVWIVQGAWANGQVVLTRHTDARPTSKGEAESLGMDGVRQEFRPAASTLVSDAVRKVSIDPIGRVRPASD

SEQ ID NO: 1703 - protein, 1048 aa, unidentified
  REGION 1..1048: note = Description of Unknown: Cas Enzyme sequence
MKRIYGFDIGTTSIGWAVIEYDVIQCLGRILAMGARIFPEARDPKGTPLNQNRRQKRLVRRQIRRRKQRRRALNELLARNSLLPPFSKDKSSAWAKVMALSPLPLRKKGLTEQLAPHELGRALYHLARLRHFKGRDIEESDKPEEKESAEEKEAKSARDITIKELKASGQTLGQMLAERVPAEGEVPKLQTRRIHALRSHVEDEFSRLVKVQESYHPALRDPAFAESLHETIFAQRPIFWRKNTLGQCRFIPGAPLCPKGSWLSQQRRMLEKLNNLAIVGGNMRPLDPEERAAILDKLQTQASMTWAGVRAALKPLYKKRNEQGEEKALRFNLELGGESKLIGNALESKLTDIFRDSWVNHPHKQAIREAIQERLWKADYGEIGEQRVVILSATERHKRRAEATESLVRDFGISGQEAKALGELKLPAGWEPYSNDALNLFLPKLEEGIRFGALTAGPEWAEWRDINFPNREQPTGEILDRLPSPADREEQKRQTAIRNPTVVRTQNELRKIVNNLIEAYGKPDLIRVELAREVGLSKREREEMQSRLGKQEKRRRDAEADLKSNGIPLPSRADIEKWLLWKEGQERCPYTGDQISFDALFRNGQYDVEHIWPRSRSLDDSFRNKTLCRRDVNIAKGNRIPFELYNARPDEWSAVAKRLQGMVAGKGTPGMPLGKIKRFLAESMSDDFANRQLTDTGYAARQAIVFLKRLWPDIGPEAPVTVQAVTGRVTAQLRKLWELNNILSDDGKKTRADHRHHAIDALVVACTDPGVTNRLSRYWQQRDDRNAERPHLPPPWPNVRKDAEHVVAGIVVSHRVRKKVSGPLHKETTYGDTRSDVKTSNGTYRLFVTTKAVNTLSKSEIDDIRDTEVRNIIAEWVASHGGDPKKAFATFPRLGTDGPEIRKVRLTSPMKFSAVASITTGYAATGNNHHIAIYRTTDGKVESEVLSLFEAVKRINRRESIVRRTSSSGAGLLMSLSLGDTFLIPSGEQAGYWTVKTIAGNGQVFCKPLNSADPSSSGQWGPSPGPLIKLGARKVSIDPIGRIRSAND

SEQ ID NO: 1704 - protein, 1068 aa, unidentified
  REGION 1..1068: note = Description of Unknown: Cas Enzyme sequence
VQAAHEQTKKRHQLNYRLSLDIGTNSIGWWIYELDQHDRPFRSHDGGVRIFSDGRNPKDQTSLASTRRLGRSQRKRRDRYLRRRAKLLRALIELGLLPKDETQRQALVIHDPYALRAAALDGPLPLAELGRALFHLNQRRGFKSNRKTDRADSERGVVRSGVNRLKEQMAAAKARSLGEFLHQRHQSGDWVRARKRPLPNDKGKLVPQYDIYPDRQMVEAEFDLIWEAQAAHHPAILTTAARRRLKDIIFFQRRLKPQEVGLCTFEHEAGERRLYWADPLSQRRRVFEQANQLMIVPPGQASIGLTKAQRDLVADALLANPRRTFIQLRRLLKLAPDTRFNLEDEKRSDLKGDETAAILGGDKYFGDSWRHLPIDEQRAIVARLIEDEDEQQLAHWLQSTFGFDAERALAIALAPLPDGTAALGETASRKILAALERDVVVYSTAAELAGYHHSDFRTGEIFDELPYYAAWLPQAVKPGTNDPDDDEATRYGRIANPTVHIAVGQLRRLVNGLIERFGAPKQIVIELARELKASRKQREEMDKRHTANKQRADRHRQILAELGQPETGENRLRLRLYDELEPLEHRCPYSGQQISLAMLFSHAVEIDHILPFSRSLDNRVDNRLLVLHDWNRRKGNATPYEAFGHGADWADIASRAEKLPSAKRRRFQPDAMDWFQRNEADFLDRHLVDTQYLSRLARQYLMAVCDPNQVWAIPGGLTALIRGKWRLDSLLGDNAKNRNDHRHHAIDAAVVGLTDRGLLNAMARASAQAADRGELEQITVELPWPHLKDELRAQLDRIIVSHKPEKGQPGDGRIGKFFKDTAYAIIGDPDKRGVPLVAHRVPLESLTSAEDLDGILAPNVRQALQQATAGKTGKDFTAALTAFREADGPLKGLRRVRIGERLGVIPIADKQGRVYKAYASDGNYAFDIWRLPAKGGKDGATGKWVVEVVSLFNAAQGKLVSAIKQQHPTARKIMSLRQNDLVAIETKEGRAIMRVVKFSTNGSLQLAAHQEAGNLKARDADKDDYFKYLNSSASGLQKLAARKVRVTADGKIYDPGPLDKAAATADVR

SEQ ID NO: 1705 - protein, 1067 aa, unidentified
  REGION 1..1067: note = Description of Unknown: Cas Enzyme sequence
LQLNNVKATSHYPRYRLALDIGTNSIGWWIYELDQQNRPCRSLDAGVRIFSDGRNPKDQTSLASTRRLGRSQRKRRDRYLRRRAKLLRALIELGLLPSDETLRRALVNHDPYALRAAALDGALSLAEIGRALFHLNQRRGFKSNRKTDRADSERGVVRSGVNRLKEQMAAVAARSLGEFLYLRHQSGDWVRARKRPLPNDKGKLVPQYDIYPDRQMVEAEFDLIWDTQAAYHPAILTTAARRRLKDIIFFQRRLKPQEIGLCTFEHEARERRLYWADPLSQRRRVYEQANQLMIVPPGQAAIGLTKIQRDQVADALLANPRRTFIQLRRLLKLAPDHRFNLEDERRSDLKGDETAAVLGGDKYFGDQWCRLPLDAQRSIVSRLIEDEDEQQLAHWLQSTYGFDAERALAIALAPLPDGTAALGETASRKILAALERDVVVYSAAVQQAGYHHSDFRTGEILDELPYYGAWLPQAVKPGSNDPDDDDATRYGRVSNPTVHIALGQLRRLINGLMTRYGPPTQIVVELARELKASRKQREEMDKRLTANKQRADRHRQILTDLQQPETGENRLRLRLYDELEPLEHRCPYSGQQISLAMLFSHAIEIDHILPFSRSLDNRVDNRLLVLHDWNRRKGNATPYEAFGHGADWADIAARAEKLPSAKRRRFQPDAMEWFQKNEADFLDRHLVDTQYLSRLARQYLTAICDPNQVWAIPGGLTALIRGKWHLDSLLGDNAKNRNDHRHHAIDAAVVGLTDRGLLNAMARASAQAAERGELEQITVELPWPSLKDDMRAQLGRIIVSHKPEKGHPGDGRIGKFFKDTAYAIIGDPDKRGVPLVAHRVPLESLTTAEDLDAILAPEVRLALQRATAGKTGKDFTTALITLREAEGPLKGLRRVRIGERLSVIPVTDKQGRIYKAYASDGNYAFDIWRLPAKSGKDASVGKWVAEVVSLYNAAQGKLISAIKQQNPTAKKIMSLRQNDLVAIATREGRAIMRVVKFSTNGALQLAAHQEAGTLKARDADPDDYFKYLNSSASGLQKLAARKVRVTADGKIYDPGPLEKTAAQADDR

SEQ ID NO: 1706 - protein, 1144 aa, unidentified
  REGION 1..1144: note = Description of Unknown: Cas Enzyme sequence
MARISDYKNTVFAFDIGTNSLGWCVLSGERDADGLLIPNRIIDIGVRIFSDGRDPQSGASLAVARREARGARRMRDRYLKRRQQLLNRLTEYGLMPADEAARKALLRETSDRQQNTTGSDIEKTDPYNLRARALTEKLPLHYLGRALFHLNQRRGFKSNRKTDRRDNDKGKIAIGVEELQAQLHLSKAPTLGAWLAQRYNQGKVVRIRQDSEAFTGDKQENYLFYPERSMLEKEFYEIWQKQQEFYPDALTEERQEQLFDDIFYQRPLKEPKIGKCAFNPEEERLPKAHPLFQEFRLYKEVNELTIETTGKASGQKLSKEQRDTLISLLRPQKKMAFSAIRKNLKLHGTTFKKEKNAREGLAGDEIYAEMADKSRFGNQWADFSREKQWEIIKKLRDEENPEKLDKWLIEQFPKLTKEQRDKIADAKLPEGYGRLGHTALAHMLEEMKNGTITKEEVEKRFGRKAAEYWPELKGTVITEADAAARCGYDHALLGRKREELDTLPKYQAVPNVARSIPPGEGGKTVAENDPDYDRIMGRITNPTVHIALNQLRRVVNALIKKHGKPQEMAVELARDLQLSDEKKREKNKEIADNTKAAILRSEKLKEQGKEDNGYNRQLLKLWEELNENPQDRCCPYSGKPINITTLLSSAVDIDHILPFSRTLDDSNANKIVCLKEYNRQKANFSPAEAANRHGWNYEAMLARVQNLPKTKRWRFAKDAMERFEQEDNWLARQLTDTQYLSRLAREYLSALYPGEEADKHGELRMRYHIRTIPGKLTELFRRNWGLNDILHDRTETNDTAKPKNRQDHRHHAIDAAVIGITTRSQLQRISTASGQMEARDLENFVKNSVRDTPPWPDFRRDLQAAIDTIIVSHKADHGTLPKAKDNKAGKGKTVAKLMKETAYGLPVDDKGERLKDEKGNELVVWRVSLRSLKAKDLDNIRDPHLANALKEHISAEAEELKDGKGFEQALLSFAKTHKHYKGIRHLRLIGARNTIPVRNAAGKAYKGYWNDGNYRYDVWQTLDGKWKQEVISMYDAHQPSYRSPFHQANPTAKKVLSLQQNDMVAYNDPETGRRIIARVVKFDQAGSIYLAPHNEANVDKRNSDKNDPFNYLKKMANPMKAIQLRQIRIDEIGQIFDPQQPSNT

SEQ ID NO: 1707 - protein, 1045 aa, unidentified
  REGION 1..1045: note = Description of Unknown: Cas Enzyme sequence
MPLIFGFDIGTTSIGFAAIEFDPAKGEGRILRMGSRIFPEARDPKGTPFNQTRRQKRLMRRQLRRRKDRRRRLNEALLTFGLLPRFGSPEWTEVMAGDPVALRAKALNEALSPHELGRAFYHLAKRRHFRGRDLEESEDGQAVVEGAEGEEAADEKTARSGREATIQALKVSGGTLGQYLASRPPGERQRGVHALRRHVEEEFRRLWESQARFHAELRNDAFRETVTGIVFSQRPVFWRLNTLGECRLDPGQPLAPKGSWISAQRRMLEKLNNLEIAGGNARPLDEAERDSILKSLQVQQSMSWAGVRKAIEPLFKSRGESAKTVKFNLELGGDPKLLGNPVEARLAVIFGETWHNHPRKDEIRMAVHERLWSADYGRIGDQRVVIKRAAERATDRRSAAISFETDFGATPQQVAELERLNFPTGWDAFSISAIQKCLPELEEGVRFGSLLASAEYAEWRRSRFPNRVQPTGEIFDRLPSPANPEEQKRIASLRNPTVVRTQNELRKVVNNLIDLFGKPDLIRVELAREVGKGKADREEMLAANRRQEKRRKEAQKRLQENGIASPARADIEKWLLWKECQERDPYTGDAISFDALFQQGAFEVEHIWPRSRSLDDSFGNKTLCRKDVNLAKANRTPFEHFRGDPDVWAAVKVRLEGLVASKGGEGFSPGKARRFLVEAIPDDFASRQLNDTGYAAREAVTFLKRLWPDVGPTAPVTVQPVTGRVTAHLRRLWGLNNLLADTGEKNREDHRHHAVDALVVACTHPGMTKALSDYWSRRDNPLSVAEKPTLPPPWPTIRTDAGNVIPHILVSHRVRKKVSGGLHLETVYGDTGNDVETKSGVFREFVRRKKVENLTAAEYGAIRDPHIRSVLQEWLARQGGDPKKVNWNAYPRVSPGGPEIKSVRILIRQQLELMAPVSTGFADLGANHHIAVYQRPDGRGAFEVASLFEASRRLTRREPVVRRDRSDATFLFSLSPGDAVEVPVEHEKRGIWIVQGAWASGQIVLVHHQDASGASVWRPTAGSLVNLKCRKVSIDPVGRRSVVSD

SEQ ID NO: 1708 - protein, 1047 aa, unidentified
  REGION 1..1047: note = Description of Unknown: Cas Enzyme sequence
MELVFGFDIGTTSIGFAAVEFDAKNDKGRILRLGSRIFPEARDVDGTPLNQTRRTKRMMRRQLRRRKARRQELNHALADMGLLPKHKSSEWDKIIQLDPLQLRSKALTEKLSPHELGRALSHLSKRRHFRGKDLEETEDGMSVDGDGAPLSPSEIAELGIRQATIATLAATGETLGQHLAKRPKQERKRGVHALRSHVDREFQAIWAAQSTYHPDLLTEASKAHLHDIVFAQKPVFWRLNTLGACRLEPGAPLLAKGSWQSAQRRMLEKLNSLRIEGGNARPLTEAERAAILSKLQTQQAMTFPAIRKALEPLFQVEELSTKYIKFNLENGGETKLPGNPIESKLAAIFGEAWDAHPQKQAIRETIYDRIGRADYGQIGDQRMVILRAAERAKSRAAAVAAIAKDFDLEETIASKLMDLSFPTGWDAFSAKAVAKLMPELERGVMMGQLLASPDWADWRNATFPNREQPTGEILDRLPSPADKDERARQTRLRNPTVVRVQNELRKVVNNLIDFFGRKPDLIRLELARDVGLGKSEREEKSKGMRQAERRRAAARADLISKGFSEPAHRDIEKWILWKECQEQCPYTGDSISFDALFRTSDFEVEHIWPRSRSLDDSQANKTLCRKDVNISKGNRTPYEFYKAKPDEWENLKARLWKMLAPKGKDGMTAGKIKRFLKEELPDDFASRQLNDTGYAARQAMEQLKRLWPDVGPTGKVYVQPVNGKVTAHLRKFWELNHILGDTGEKNRADHRHHAIDALVVACAHPGMTQKLSSYWQAKDDPRAAGPEKPKLNPPWATIRADAVQAANEIVVSHRVRKKVSGPLHEETVYGDTGDDVTNSNGTYRIMVRRRKVEALTKGDYDSIRDPHIQQVMKHWLSDHGGDPKKINWTKYPRVSENGPEIKNVRVLLPKKLDLMVPITTGYGAAGSNHHIAIYRRQDGKIEAEVVSLFEASRRLAKREPVVKRQRDGCQFVISLSQGDTLLIEAGERKGYWTPKSIAGNGQIHLRKIVDAGTEDKDLWKPSPAPLIKLGAQKVSVDPIGRVRPAND

SEQ ID NO: 1709 - protein, 1041 aa, unidentified
  REGION 1..1041: note = Description of Unknown: Cas Enzyme sequence
MRQLIFGLDIGTTSIGFAAIDYDEAGEFGAIRRMGVRIFPEARDSEGTPLNQTRRTKRMMRRQLRRRKQRRRELNEAFCAMGLLPKFGTIAWDAIMQQDPIALRSRGLTEKLQTQELARALYHLAKRRHFRGKDLEENDDGSAVDGAEHKSPTEDKELGVRKSTIAALDQSGDTLGAYLAAKPPGMRTRGAHALRRHVVDEFNRLWEAQKVYHPEILTETHKAHLSDIVFAQKPVFWRLNTLGECRLEPAQPLAAKGSWLSAQRRMLERLNNLEIEGGNRRPLDAAERAAVLAQLQVQGSMTFGGIRKLLEPLFQARGESAKKIKFNLEAAGEKNTPGNPVEAKLADIFGDEWANHPHKSAIRGATEELRSADYGRIGAQRVVIKREQERAQCRRAVAETFATRFGATAEQVAALSKLSFPTGWDAFSVSAIEKLMPALKMGVKMGAMLNSPDWAEWRKDHFPNRIDATGEILDKLASPADPDEAARIKQLRNPTVVRVQNELRKVVNNLIDFCGRKPDLIRIELARDVGKGKAERDEISNAMRDQEKERKRAVKALQECGFAEPPRRDVEKWLLWDECGKICPYTGDNISFDQLFRTGDFEVEHIWPRSRSLDDSFKNKTLCRKDINAAKGNRTPFEFFKSDPDKWAAVHNRLLKMMAPKGGPGMAQSKVKRFLADAIPDDFASRQLNDTGYAARQAMAQLKRLWPDVGPTAPVTVQAVNGKVTAHLRKLWGLNNLLGDSAEKNRGDHRHHAVDALTIACAGPSVTQRLSRYWQVKDDPRAAGAAAPHLSPPWASIRQDAERAVAEIVVSHRVRKKVSGPLHMDTVYGDTGDTGGVYHYFVRRKKVEALTKGEYDNIRDPHVRQVMLDFLAAQGGDPKKIKWTAYPRVSQNGAEIKSVRLLVKQQLSLMTPVSTGYADLGSNHHVAIYQRPDGKVEFEVVSLFEASRRLAKREPVVRRMREGGKFIMSLSAGDTIEFAGGEMKGCWTVTGAWSNGQVVIQRSNDAIGDTTTRPNPTSLLKQGARRFPSIPSAVFARPTTD

SEQ ID NO: 1710 - protein, 1026 aa, unidentified
  REGION 1..1026: note = Description of Unknown: Cas Enzyme sequence
MQRIWGFDVGTTSIGFAVIQFDESRQTGHIERMGVRIFPEGVTEKDREPRNKARRTARLLRRQYRRRRSRRKKLGDLLSEAGLLPPFDPAPNSEWSNLMSAGDPQKREGPYDLRARALSEKLEPHQLGRALYHLVRHRGFLSSRIIDENDTDKEQEEGKVKESIERLRSEMHDQTLGQHLAGQDKKRGRYIGREMVNDEFERLWSAQAKHHPTTLTDDLKLQFETVAFHQRPTFWRLGTLGNCWLEPGEPVCIKASWKAQRYAMLEKLNVLRFAGSNEPELDEHERTTILGLLDQSPKVSFGAIRKALKKYWQSRDLPAQRKFNLEVGGDEGLPGNATESELRRVFGDAWDSHPHRARIRSEIADRLFAVDYRRIGNKRIEIRRSADRENQRNAFAASVAADWGIDNATADALSRLKLPGGWTRHSEAAIDKLLPHLEDGISYGKLVNATEPEFADLRERLFPNRFRSNSSVSAERLPSHPRQMPDLRNPTVARALTEFRKVANNLLAAHGKPDLIRVELARDMTRSKRKRSEHQKIIRQREAERKKAIADLAANGISDPSGKVVDTWLLWKECRETCPYTGQKIGFDDLFRTGRFQVEHIFPRSRSLDNNFSNKTLCDVEENIRKGNRTPYEMYGADAVVWGRIVQSTKSIFWPHAEKKMRRFLATDFAEVGSDEFSERQLRDTAYIAVQARDFIARLGVPVETCNGQITRQLCRHWGLDAILNTDGENRKNRGDHRHHAIDALAVALTTRSFSKRLGDYFAREKLGQRPKLELPWADLWSDAKSTVGSIVVSHRVQRKTSGAMHAQTHYGDTGEDVVERDMTYRLFVTRKPLETITASQVESIRDPEIRRIVKDHIARAGGKLKEAFKTFPKLPNRKGGADREIRRVRVLVKRQEALMIPVNSRNKAYSDADTIHHIAIFVSGDNGNISFDVPKLARVKNAGIESKKRPLLTLSIGEAIKIPSENGQSEVYVVQKLGSNGQIFMRPHFDSSDAKPFSLMPRPLLSKNARKVRIDPIGRVSPAND

SEQ ID NO: 1711 - protein, 1085 aa, unidentified
  REGION 1..1085: note = Description of Unknown: Cas Enzyme sequence
MRILGLDLGTTSVGFAIIDRNDAGDDGRILRMGVRIFPEGVAPGTPGKARETRNKKRRSARLLRRQLRRRKWRRRELGSLLHELGLLPAYGSQAWLDAMQSDPYELRRRALEGVLTAPELGRAFYHLHKRRGFSGGRIASDEPPVESTTRKKSAKAATEETSGSDGDEDTRKIKEEIADLGRSIGASTLGAYLAQQGKKRGRHLGRDHVEAEFDRIVAAQAAHHTEALAAARVARLRALLFEQRPTFWRLNTLGECPLIPGAMLCAKGSWAGQQFVALEHLNKLRIVGQNARVLDQHERGIVYDLLMRQRSVTFGAIRKALKSYWRQHDLPLDAAFNLEREDKTIPGNGIEARLRELFGPAWEEHPAKETIRRTLGARLHQADYRQAPGGKRIEIRSARDSDAARADLSIAFRSEWQVDANTALALSGIEPQPGWLRFSQAAVDTMLSEMERGVGVGDLLMSPTCGAWRDEHFPERERPTGELSDKLPSGPDAMGDLRNPTVNRTLNEARKVVNNLISLYGKPDLIRVELARDLRKSGKRRAEMERENAERERARKKARAALEEIGLAQPSRGDIEKWLLWKECNETCPYTGGKIGCRDLFFDGIYQVEHIFPRSRSLDNSFANKTLCHVEVNREKGERSPHEAFGTDATRWETVTNALKSAKLPERKAQRFVKPRYLEVSDGEDFAERQLRDTAYAARAARDFLRRLYPDVGPSGQDVETCNGSITAELRHQWGLESILSAAGASGKNRDDHRHHAVDALAVALTDRSAVKQLADWHAADRQGRKPDFRKPWPSLLEDARRSVGEIVVSYRVQRKLSGPLHEERPLGKVVDEQSGTVRYVRRKPISALSASEIADIRDEGLRNQIQAAFGHLLTTIAEAKPQSRSGAGHRNLSDAKGTKKKAEQELKLALSTPFSFLQRDGGRRIVNKVRIWVDRADNAVVQVRKLDERSLHAQKTYAELGSALHGFAVYSDNAGGSAYKVLSRAEVVARTASGDAPYPASLPGGFRLKVVLYPGDVLRRQGQGECLEYFMVRKFNQAGRVFYKPHTMAVVPKPEISFGVSQFTDGTVVKVAVDPIGRVRPASD

SEQ ID NO: 1712 - protein, 1064 aa, unidentified
  REGION 1..1064: note = Description of Unknown: Cas Enzyme sequence
MPYRLGIDLGTNSLGWCAVELGADGAPMGVRDGGVRIYSDGREAKTGASLAVDRRNARAMRRRRDRYLRRREVLLDELVCLGLLPADEADRKALAQLDPYHIRAVALDDKIPLHFLGRALFHLNQRRGFKSNRKADRAADPAELGVVAPAIDNLDAAIEAAGVRTYGEFLAMRHARDPEKHDASERRTRIRRDDAESEYAFYPARRHLEAEFDALWLAQQPHYPTVLNDATRARIERVIFYQRPLKSPAVGRCAYTTELRVAKAHPLFQRLRLVKSINELTVEEIGQAPRPLTREQRDNVLRAWRAPTETKRSMTWGAIRKAAGLPRNSRFKGEDRRGKGLVGDEVEAELVKLYGPSWRGLSLDAQWRIIERLKEEEDEALLLAFLTEEIGLDEDKACVVAKARLPEGHGRIGATAATRILAELEAEVIPESEAVARSGWHHSDHRTGEVWDRLPYYGEILDRQIPPGTQDPDDAPEECYGRITNPTVHIGLGQLRRVINAIIDRHGLPHDIVVELARDLKLSEDEKAEINRTIKRNTDAAIRRGKMLEDIGIANTGENRVILKLWEDLHPDPKARVCIYTGRPIGVEILFSGETDIDHILPIRLTLDDSEANKLVCVAAANRRKGRRSPFDAFGTTAEWDAILSRAQHLPPGKRWRFAPDALSRFGDESGFLARQLTDTQYLSRLAKEYLGALYPERGDGSQRVRVIPGRLTEMLRRNWGLNSLLPDHNYAQTAKHKNRLDHRHHLIDAFVAALTEQRLMQKVATAAGHNDDQGLAHIFKDMPEPWSDFRDDLKALLDRTVVSHKPDHGTIASAADKAIGKDCTAGRLHNDTAYGLTGETDAKGNAIVVRRVPLLSLDNDQKVAAVRDSYLRTELERALHGAVGKAREAALRRFASEHPVYRNIRRVRVIEPLKTVPVRDATGRAYKGYKGDANYRYDVWQLPDGKWVANVVTMFEAHQIAGDGQEWRPHPAAKRVLRLHQNDMVGLDHPQYGACICRVVKFSEKGQITLARHNEAGALKARDSDPNDPFKYFSPTAGGLKKVRIRQVRIDETGRVWDPGPRD

SEQ ID NO: 1713 - protein, 948 aa, unidentified
  REGION 1..948: note = Description of Unknown: Cas Enzyme sequence
MQVWGFDIGTTSIGFAVIERDAARAAGRILRMGVRIFPEGVTEDKKEPRNKTRRLKRLMRRGVRRRKLRRRLLNETLASVGLLPKFGTPEWHRTMAADPYVLRRDGLSHALQPFELGRALYHLAKRRGFAGRAFEKVIERKNENADEQAAKEDAARLAKEKGSLTLGAFLADQPKKRGRHHTREMIAEEFDKLWTTQKAYHPILHDAKFQARIRNLVFYQRPTFWRLSTLSKCQFCPDDLPEPKGTWLGQEFLLLEQLTKLRIAGANARPLSDAERTLLREHLHQHKSATWNGVRKTLRNHWRERGEPEDQRFNLEVSGAEKGLRGNTVEVELRKIFGKAWDAHPHRDEIRRELHAYLWNADYLQIGNSRVEIRCDDDARAQRRNARDEMQGRWNLSDNEADALAALDLPPEWLGWSHTAVAEMLPLMEQGHGVGELTRSPEWEAWRARTFPNRSQPTHKGLDRLPSHPRAMPELRNPTVHRALNELRKVTNNLLRLYGRPDVIRVELTRELKESRKGRSERLSRNKDRESERRKAIADLEAHGIANPSRDDIEKWLLWKESSERCPYTGDHIGFEALFREGKYQIEHIWPRSKSLDNTFANKTLCRTDINILKGNRTPYEVWGSDPDAWHALKQRLADCKLPEHKVRRFIKEMIAEAGTEEFADRQLADTGWAARAARDFLKCLWPDPDKAPVETVNGRITAQLRYQWGLDSVLNPDGEGKTRADHRHHAVDALAVALTTRAYVKRLSDWYQVRDTGLRPPQFERPWPSLLDDAKAMVAQIVVSHKTRRKASGPLHAETVLGDTRQDEKSRGEVYRLFVTRKPVERLSKSEIETIRDSEVQKLVENHIAERGGDPKKAFPPYPRLPASNGRQGPEVRRVRLLTKQQLNLMVPVGTGYADRPTTIIWRSICRLRGKRCSASCRFTRSPGGFPRGSRSCREPPTMAERF

SEQ ID NO: 1714 - protein, 992 aa, unidentified
  REGION 1..992: note = Description of Unknown: Cas Enzyme sequence
RIFPEGVTEDKNKKEPRNKTRRVKRLMRRGVRRRKLRRRLLNETLASVGLLPKFGAPEWHQAMAVDPYLLRCDGLTRALQPFELGRALYHLGKRRGFVGRKFEEAIEQKSKNPDDWVAKEDAARLAKEKGELTLGEFLASQPKKRGRYHTREMIEEEFEKLWTAQKAYHPILHDAKFQARIRDLVFYQRPTFWRLSTLSKCQFCPDDLPEPKGTWLGQEFLLLEQLTKLRLAGANARPLSDAERDLLREHLHQHKSATWNGVRKVLRNHWRERGEPEDQRFNLEVSGAEDKLRGNAVEVELRKIFGKTWDGHPKRDEIRRDLYKYLWTADYLQVGNARVEIRRDEDARAQRRKARDEMQRRWSLSDKEADALAALNLPPEWLGWSHTAIAAMLPLMEQGHGVGELTRSPEWESWRAHTFPNRTRPTGEVLDRLPSHPRALPELRNPTVHRALNELRKVTNNLLRLYGRPDVIRIELTRELKESKQARSERLSRNKARESERKKAMADLEAHRIANPSRDDIEKWLLWKESNERCPYTGDHIGFDALFREGKYQVEHIWPRSRSLDNTFANKTLCRTDINILKGKRTPYEVWGSDSDAWHALKQRLADCKLPEHKVRRFIKDMITEVGTDDFADRQLADTGWAARAARDFLKRLWPDDGMQPPVETVNGRITAQLRYQWGLNAALNPDGDGKTRADHRHHAVDALAVALTTRAFVKRLSDWYQAREIGVRPPQFERPWPSLLDDAKSKVEQIVVSHKTRRKASGQLHAETVMGDTRTEEKSRGVVYRFFVTRKSVELLSKSEIEDICDRAVREILREHIAERGGDPKKAFPPYPRLPNARGDHGPEIRRVRIYVKKQPELMEPVGTGFAFAAANHHMAIYRMPDDTIDGRVVSLYEAARRLSRRQQIVQRERGDGARFVMSLCPGDTLEFPDASGSSRYRIVQSIWANGQVVLIDHTDAGKESKNQPGIAAIIRAGARKVSVDPIGRVRPARD

SEQ ID NO: 1715 - protein, 1071 aa, unidentified
  REGION 1..1071: note = Description of Unknown: Cas Enzyme sequence
MDRIWGFDIGTTSVGFAVVEFDEEKSEGRIIHEGVRIFPEGREERKLEPRNQARRAARLLRRQVRRRRLRRKFLREAFAEAGLLPRFNTPEWDISMCPRRPAGGRLLRPGPYELRARGLRERLEPAELGRALYHLCHRRGFLSARRVEERKDLSKAREKEEGKIKGEIKGLEQKLEGRPLGEFLYLASLEKTDRDRLMSEWKVENTYLRNLDKPERIRGRHIGREMVTEEFDRLWETQARFHPDVLTNELKEELQSILLYQRPMFWRLQTVGRCWLEPGEPVCPKGSWLGQQFLMLQHVNNLRVRFMGRPPRPLDPEERKVLLQKLQRQQDMTFAGVSSALKKLWKERGLPGKPEMNLESGGETRLLGNAVEARLAMVFGDAWDSHPMRERLRIELYPRLFAIYNRQVGKKRIELHRKDAFKDEVTPARARFVEEAQRDFSITREQAEQLSEFEPPSGWLRFSEKAIRKLLPFLENGLGLNEKGGALDLAYPGWRSASSHTLDRLPSNPKVMPVLRNPSVNRALNELRKVANNLLRTYGKPTLIRIELLRELKKTKKERLEISSRYSRNRRSREEAKSDLKEKGIPASPEAIEKWLLWKQSDEYCPYTGAKISFDALFRRGDFQVEHIFPLSRSLDNNLLNKTLCATDVNKAKGNQTPYEYFRSRPEEWEAIKDRLERWVEKGTFPEEKMKNFLREDYPPGQEFLEDRQRADASYIAVEARKFLARLGVPVEVVNGQVTAQLRSRWGLDAILNPGNPEVKNRSDHRHHAVDALAVALTSLAFVKRLSDYYARGKRGEKPRLPQPWENFFLDAKEKTEAVIVSHRVQRKVSGPLHALTYYGDTGKEETNGGITYRKFVFRKRLKDISKSEIEDIVDPEIRRIVREHAEPYGGDLEKAIAEKGLPVLPDNKTGEKRDIRKVRLWVKQQKRLMVPVWPKAKAGIEPMTFADPAGNHHMAVFRLADGDVHFETVTLFEAARRLRAGEPVVRRTSENGGEFVMSLAPGDALELPAENGAKAYRIVTSVWASGQIVLEDHTEAAGKVWSRPNPASLLRMGARKVRIDPIGRVRPAND

SEQ ID NO: 1716 - protein, 1612 aa, unidentified
  REGION 1..1612: note = Description of Unknown: Cas Enzyme sequence
MKGVLGLDLGTNSIGAALLRLPERFEDYGRNGSIEWLGSRIIPMDGEDLQKFESGVPAETKAAKRRMKRGSRRLKHRYKLRRSRLTSVLKILGWVKEDFPLDNPKRIKEIIRENNGRFGFRISDYLPFSKDTISEAITQLGVKGKHNKKGNIIIPEDWIVYYLRKKALTQKITVQEFARILYMMNQRRGFKSSRKDLRESTVLNYEEFNKIKKQINSGELFEYTNGEGQELKTQFVSITKIKSVTLKNDERDKKGKLTFVIKAEDPRLETWEEKRIEKPEWEGKEFKLVVEQSIDKKGKFSQNKPQIPKNDDWNLLMVALDNQIDESGKHVGEFFWDKLVEARGKKQTYKIRQNVVRREKYEKELQAIWNKQLKLRAIDGAEEELLNTDKIEKIAAELYAHNTAKQNELKQKGLFHILANDIIYYQRDLKSQKGLIAECRYEKRIGTEKNETGEFVKTGIYGLKCAPKSSPEFQEFRIWQDIHNIRILEREKIIDGLKKVDVDVTRQFIDETNKDELYDLFDSETEITEKKIFDRINTIKPDAHLDSEKYKINLFSNRETLKGNETKTLFRRIFRKFDYESEGEKLLQNADTFYKLWHIVYSISSSDLKKSAKGIRTALKQFDLPDRIVEAFTKLEEFKKEYAAYSSKALKKLLTIMRCGKYWKWEAIERTEIKTPESPIDNPQRIRLSDRIDKIISEGWERDIRVDKRTGEIISERHFEKREQFSGLPVWMACYVVYGRHSERETSKKFSLEEIRKLDIMALVPHNSLRNPIVEQVVRETLCLVKDICKEYGQPDEIHIELGRDLKKNMEQRLAISENNAKNLEEKQRAKKLLQELLDGDFEHFDETGKKIKKPFTVKPNPNNPVDIEKFRIYKSLASFEYDTKERKTEDQVRLDKLFRDGKKERVPTNAEVKKYILWLSQKCISPYTGRVIPLSKLFDETQYEVEHIIPRSRMKYDAMENLVISETGVNKAKGNELAANFIARSNGKCTYGGIEYTLFTYEEYCNHCKETFRGKKYKNLMATEVPQDFIERQINDTRYIGKKLGELLYPFAKEKEGLVFTIGSITSELKGKWGLNKIWKQLLKQRFERLERITGNRYIFPNEDDQSDIVFNVPDIPDLDIKRLDHRHHALDALIVAATTREHIRYLNSLNAADTNEELKQYHYTLCKGKIREFRLPWESFTRDAKEKLSEVIVTFKSNKRIVSKPFNRYLKWIQKEDGTYEKQFIAQAPNERWLAVRKSLFRENPQGIIWVKEKRKVSVKEAFRIQIERMRVEHDKEKRKTAAYVYDQNARLAIKEIIQKMLDVTGIDLTSSNELLNAIEENYLKKNVKKAASAKRKAYSLGGKMYGEIEIAQFVMYKAKRVPLDSSFDHKKIDKIPYADTSRIPILLHNHLREYEKKKLGSAEAFSNEGLEQLAKKNNGMPITTVTIMDGKLKDEHLDNLFGNKYMESDAGAIAYFIIYENEKTKERSEMYSLSTHKALERIRKGMPVAEKREGYRTIILSPNDLVYVPTEDEWKRIKADEENVIDWSNKKAIGERIYRMVSADNAFFVQHHISKPIIPTILKGEDKTKGEIDWHNKSTKTMDGQTTIADCCIKIAVDRLGNIRPAYNA

SEQ ID NO: 1717 - protein, 1083 aa, unidentified
  REGION 1..1083: note = Description of Unknown: Cas Enzyme sequence
MPTTLGLDLGTNSIGWALVEDGKRIIRSGVRIFPVGVQEEDFLKNGTEVSKNIARRMARGARRRRFRYKLRRDKLCKLLTTNNMLPDDHDFFSTRGLYELRVIGLDKKLTLKQFGRILLMLNKRRGFKSNRKAAADPEKKKEEGVVKEGIAELQKHIEETGFRTVGEYFFFLFTQADKEKGWPNEYTPIERIRKRFVGRDMYRHEFNLLWKKQSEYYPEVLTDELQKKIADETIFYQRNLKSQKGLVGKCRFEPSKHCTQKSTLEFQEYRIWQQLWMVRFSTGDRIGQELTVEEKQKVCAVMMKQHKITEAEMKKVLGIPKTEHFNDVFGAKGMLGNRTNSDLIKVIGEEMYEQLTDRQKFEFWHILTYTDNDEKLKVIIRRKIEKKILPSLTEQQVEAYAEINLEEGFSNLSKKSLAKILPHLRKGLPLNEAVIAAGYDPYKKAVVGKLQEVNKIPALQPNELRNPIVQQMLSETFRVVNAIIEEYGKPDKVRIELARELKKPKKIREKIRNANIRKRKQREEYAEFLTKRLKNHVAPNSIEVRKYELWLEMGCEDPELDKLDEFIKRGRKIDPLKYRLWMECGRISVYSGKIIPLSKLFSPEIEIEHILPYSKTMNNEFGNLCLCERSINERKGKMLPIQYFESIRKLDDFKKNVARLQNDAKRRRFLTKEIPDDFLNSQLTNTSYAAQELAWRLSTVFPPLINEDKGSPRIQVVNGQAISDLRRLWALNSILSKGDIDTKNRGDHRHHAIDAIVIACTTPKLMKTLASASKFDRRGQLTCETIKEPWKKFLTDSAVSIGSIIVSYRNQKRLVGKKPNWIKIKDKANHQKGLLRQNTITIRGQMHEETLYGSIKSYDEQTYVTRWPLTKFTEDRQLDKVVDHKVREVLMKRVKKYGGIKKAFEENKNDPVLMYSKKKKIIPIRHVRVFNPGEHLEEIRENVFVEPGNNYAIAIYEDPETKKRAFETISFYTAVKRSLNNKPIINSNLDNKPLLFALKQRDIVIRYDSGPDEIDWEDMKYLRSRLFRVRKFDVVGQIFIDYLYASKINKEDRNTLFFQLRINTANIIKVEVDLLGRILNKMD

SEQ ID NO: 1718 - protein, 1054 aa, unidentified
  REGION 1..1054: note = Description of Unknown: Cas Enzyme sequence
MASLALGLDIGSSSVGWALVSLRDGAPEGLVGLGARIFEPGVVGSVEQGREESRNLKRRQQRQQRRQTGRRRARLRSVYRVLAEAGLLPALEHGRPWHLQIHEALESVDARLRAKHLAQGDHLGQQVLFYRLRAKALAEPLEAHELGRVLYQLAQRRGYRPHRQAEASAKDDDEELGQVKAGIEELQRRMSVEGQPTIGALFSTFDPDAERIRGPGRWTSRDWFRDEFKAICAAQKVHHAGLTPEVEDKLSPAIFHQRPLRSQAGLVGRCELEPGHVRASLARLEVQQFRIVQTVNNLRVLEEGREQRSLTAQERAMLRAGLDAQDSMTPTKIKQLLGLPARKARLNVELRAESGEAGKIPGNRTASRLRRVLSNRWDAMDEAAKATLVEDLLSIRDPDVLRRRLMGPAHGLDDTLARRVADVRLESGRAAISLKAMRHLLPVMIDDGTSFAEARMRLYGKDVKPPLPLLPPVDKDFPQLRQPTVHRALSEVRAVVNALVRKHGKPDVIRIELARDLKHPRAVREAMWKRIEARRREREGFARKILEQNAQQTGANIERWELAVECGFQCPYTGRSFSAQDLLSPASPLQVEHILPYSRTLDNSFENKTLCFRDENARKHNRSPWEAYGGTAQYDELIRRVREFKGSDKRTKASKLDRFLRQTLAGDIEEEFSARQLSETRYATRLAAEYVGKLFGGAGGVDDEGRLRVQTSAGGATAILRREWNLNRVLGLDGEKNRAHHGHHAVDAVVVALTDRRAVHEIARAAMDAAASGSTRRLRPIPLPWTSLEKDVRKAIDGLVVSHRTSHRLRGGLHQETNYGMSPGGATGVVRIRKEVQRLAAKDVARIADPGVRRAVEEKLRELGAESPAEAFKGAGTLPALKTRSGSSIPIKRVRLEVKKTTVAVGSHVARRQRLNEPGSNHHMAVVETVGHEGRPVRWEDHVVSRFMATERQRRGEPVVQQDWGPDRRLVFTLAAGDSVGRQKDDASWELRVVKAVSAGVVEMLANTDARSTRAIRTEGAAGGRFKLGAERLRLEFWQKVTVSPIGEVAPARD

SEQ ID NO: 1719 - protein, 1040 aa, unidentified
  REGION 1..1040: note = Description of Unknown: Cas Enzyme sequence
MMSPDIQGSLTLGLDIGTNSVGWALIKKSGRKNSQIIDMGVHVFPESVTGDVAGGRYETKNATRREKRLARRQTDRRRRRRQRILKILQNAELLPNDKNLAKAIAKIDAAFLAQHGGAEISKELMAHIVPYALRRRALDHRLEKYQLGRAFYHLAQRRGFLSNRKIPQTDEDGVVKVGISELNHEMAEASARTLGEYFAGSNPEERRIRSRYTHRDMFKSEFDAIWNAQKSDHPKVLTDDLYKALSNAIFYQRRLKSQKHLIGECLFESGQKRCPWYRPEAQRFRLLQTVNNLRVVDATGLHRAVSKDERAALLKLLETSARVTCAQARKAMGITGKGVKLNVEMGKAKTLYGDKTTASLLAVFGKRWGEFSGSKKEQVILDLVSIEKHKALKKRGEKVWGLSGEALARFTELVLENDYAGLSRKAILKLLPHLESGLSYSEAVQKEYDAFRANGKVYDLLPPVDLEYSDLRNPIVGRSLTYVRRVVNSVASRYGKPERIRIELARDIKQSKQEKQRRIKDIAERTRNREKIKEQLRGYGLADPGPDDVIKIQLAEECGWVCPYTGKPIGWEDLFGPQPEFDIEHIIPFAISLDNSFLNKTLCHHHENRHVKGRRSPYQAYAGDEEKYEAILTRIKTNFRGNCKNEKLRRFKLDDLSEFEDFSNRHLNDTRYASKLAVGYLALLYGGIVDVEHKRRVQAVSGPITVIVRRWYGMTGLLGSGEKTRNDHRHHAVDAVAIALTSASTIEALSSASTKMKNVSRLAFGETVEPWNGFLHELKTRLAFVRAVHHQGRKVRGRLHEDSIFSKQPNGMVHIRKPLETLTKDDIPKIADKAVRLAVKGKMNELEEDHPQKAFANPENFPKLKRKDGSDAHVIKRVRIERKQTTVSVGSGAAERAVVGGNNHHIEIVAALDEEGTEVKWEGHVVSMLEAYRRKQDCLRRKEHPDVIKKNYGPGKLYKFSLFCGDFIELDMPEGLREVFVIRAVPQSKQIMFVQCNDARLQKEIKAAKKWFSGYPDSLRKRNARKVHLTPFGEVRNAND

SEQ ID NO: 1720 - protein, 1128 aa, unidentified
  REGION 1..1128: note = Description of Unknown: Cas Enzyme sequence
MSTSSENIPGIRYRVGIDVGLKSIGFCAVEVDRHDQPIKLLNSMVFVHDAGVDPNENKAAKSRKLTAGVARRTRRLYRTRHQRLVNLDRVLSKEFGWPLPDLTAFKDPREPWHVRSRLLEGYIADEDQRKAALSIALRHMARHRGWRNPYAKVESLLQPAEPSDFLKGLNDRISKSLGKVFPADATPGQLVDAYLAHPDYVRKAGTPKLRGPQGILAGKLHQSDNAEEIRRICEVQQIDPADCDRLIRAVFRAKSPKGSAKERGLVGHDELPGQGKHVRAEKAHPAFQRFRIVSVLANLRIREGRAERPLTPEELQGLTDFLLIAGLKQEVTWQDLANNLGIERSDLRGTAKASFDGSPVLRNPPTDVTTEKILACKVKWLKEWWKDADDEQRGYFVDAFSNSGGSEDSADVNDEVVELLEQATEDDQLEFEKISLPQGRAAYSLDSLRRLTDRMLRDGVDLHTARRLEFNVGDDWKPAVEPIGAPTGNPAVDRVLKQVSRWLHATTERWGEPTVINIEHARDGLGSERVARELMRENDRRRSANAAAVAEMAAQLKLSGRVRRSDQIRYFALQRQNNECLYCGTGITFTTAEMDHIVPRADGSSTNDRSNLAAVCRTCNHKKGAIPFGAWASSDQANAGVSLRGALERVKFWVRDNGMSPKQFKQLQREVSARLKSRKPDEEFDGRSMESVAWMAVELRTRIEGFYRTRDEESVPSVGVYRGQLTAEARKASGFESRVNLIGGRGKTRFDRRHHAMDALVIALMNPSVSRTLALRVNMRDAQRLAGLKETWKNFYGKPGEASQRFESWRESMLRGVELFNIALSDNAIPFVENIRLRVGSSVIHDATVHSFCPPKTPDGEQIITKGYGEQHRLGDALPVELIDRADTPALWMALTCCPEFDPKKGLPENPNRTISVNGTRVGPTELLNFFGSSAACLKVRGGYVELGSSIHHARIYRIDGKKTAYAMVRVFQVDLLRLKDQDLFTTPLKPSTISMRTAEPKIRQALADGTAIQIGWLVEGDELQIDTSKYSGGFIGEVLERYPEATSWRVAGFPHPAKLRLRPYLLSAEGLDKEASKEMTDLLDGQGWRPAVNVVFSPGTVQITRRNALGELRSSEFSSLPITRVMR

SEQ ID NO: 1721 - protein, 1128 aa, unidentified
  REGION 1..1128: note = Description of Unknown: Cas Enzyme sequence
MIDSSANVQGVRYRVGIDVGLKSIGFCAVEVDQHDQPIQLLNSIVFIHDAGVDPNENKAAKSRKLTAGVARRTRRLYRTRHQRLVNLDRVLSKEFGWPLPDLVSFKDPREPWHVRARLLDGYIPDEGKRKEALSITLRHIARHRGWRNPYAKVETLLQPSEPSDFLKGLNDRISEKLGRAFPADATPGQLVDAYLAHPDYVGRAGTPKLRGPQGILAGKLHQSDNAQEIRRICDVQRIEPAERDRLIRVVFEAKSPKGSAKERGLVGYDELPGQGRHVRAEKAHPAFQLFRMVSVLANLRIREGREERPLTPDELQRLVDFIDQVSLKQEVTWQDLADYLGIERSDLRGTAKAAFDGSPVLRNPPTDVTTEKIMACKVKWLKEWWKEADDEQRGYFVDAFSNSGGSEDGTDVNDEVTELLEQATEEDQLEFEKISLPQGRAAYSLDSLRRLTDRMLRDGVDLHTARRLEFNVSDDWKPAVEPIGAPTGNPAVDRVLKQVSRWLHAATERWGEPTVINIEHARDGLGSEKVARELMRDNEKRRKANAAAVADMAQQLGLSGKVHRSDQIRYFALQRQNCQCLYCGAPITYATAEMDHIVPRADGSSTNDRSNLAAVCRTCNHMKGKIPFAVWASSDKANQGVSLTGALERVNMWQRDNGVSPKQLKQLQREVCARLKSKKPDQEFDGRSMESVAWMAVELRTRIEGFYRSRNEEFVPSVGVYRGQLTAEARKASGFENRVNLIGGRGKTRFDRRHHAMDALVIALMNPSVSRTLALRLNMRDAQRLTGVEETWKNFYGKPGEASQRFESWRESMLSGVELFNIALSDNAIPFVENIRLRVGSSVIHDATVRSFCPPKTPDGKQIITKGYGEQHSLGSAMPVELIDRAETPALWTALTRCSDFDPKKGLPENPQRTISVNGTRVGPTELVNFFGSSAACLKVRGGYVELGSSIHHARIYRIDGKKTTYAMVRVFQVDLLRLKDRDLFTTPLKPSTISMRTAEPKIRKALADGTATQIGWLVEGDELRLESDKYTGGFVGAVLASYPQVTSWRVAGFPDPAKLRLRPYLLAGEGLDGEASKAMKDLLEGQGWRPSVNVVFSPGSAVLVRRNCLGQERRNSGGALPNSSELR

SEQ ID NO: 1722 - protein, 1147 aa, unidentified
  REGION 1..1147: note = Description of Unknown: Cas Enzyme sequence
MTNSSENIPGIRYRVGIDVGLRSIGFCAIEVDDEDHPIQILNSVVHVHDAGTGGPGETDSLRKRSGIAARARRRGRAQKKRLKRLDALLEDLGWGVVSNEMLESHAPWHVRKRLLNEYITDEVERRQCLSIAAAHIARHRGWRNPYSKVDTLMLEHEPSDRMRGLKNRVEEQMGLCFSDQATQGELIATLLEHDKDVTVRGFVRKGGKATKELGVLQGKYMQYDLVAELRQICVKQKVSDEVFTQLVSTIFYSKEPQADKKNQRKRVGIDELQLAVDPQAVELRAERAHPAFQKFKIVATLANMRIQEDGVAERALRPDELRAVTAYLLDESGVGIPTWEEVAGQLGVPRHRLRGASKASLETGGGLRYPPFDETTARVAESEIDWLVDWWMQADDESRGHMIDEISNGCGSETNDIEDEEVIELISSAAAEDTAKLELLAKKLPSGRAAYSLKTLREVTSSILETSDDLSRVIERLYGVEPGWAPTPAPIEDPVGNPSVDRVVKQVARWLKFAEKRWGIPQAVNIEHTREGLKSASLLEEEKENRIKYEERREERLKKMYAQLGISGPFRRSEQTRYEILYLQECACLYCGCKIGFETFEIDHIIPRVDASSDSRRENLAAVCHNCNIAKGGIPFGQWVKLNDCPNGVSLEEAIKRVKRWDKNRVGLTEKAMRKRKGEVIGRLKAEKPYEEFDGRSMESVAWMAIELKKRIEGHFNSDCVTGKVVKVNAYSGRLTACARRAARVDKRVRLIRLKGDNGDHKNRFDRRNHAMDALVIALMTPAIARTIAVREDRREAQQLTHAFESWKNYLGSEERMQERWGSWIGDVEYACDRLNELIDANKIPVTENLRLRNSGKLHADQPESLRKARRGSKRPRPRRYVLGDALPAEIINRVTDPGLWTALVRAPEFDDQLGLPADPARSLSLRGSRISADFPINYFPTDSPALAVQGGYVGLEFHHARLYRIMGPKEKVTYALLRVCAIDLCGIDRSNLFSVELKESSISMRTADPKLREAMKEGNATQIGWLVLGDEIQIDPSKFPKQSIGKFLDECGPISSWRVSALNTPSKITLKPRLLSNEPLLKDRSGARKNDFTVSECVEKIMKKTGWVVEINALLKSGSIRVIRRNALGEVRTSPESGLPISVNLR

SEQ ID NO: 1723 - protein, 1138 aa, unidentified
  REGION 1..1138: note = Description of Unknown: Cas Enzyme sequence
MIDSSANVQGVRYRVGIDVGLKSVGFCAVEVDQHDQPIRLLNSMVFIHDAGVDPNENKAAKSRKLTAGVARRTRRLYRTRHQRLVNLDRVLSKEFGWPLPDLTSFKGPREPWHVRAGLLEGYIADEEKRKEALSIALRHIARHRGWRNPYAKVETLLQPSEPSDFLKGLNNRISEELGRAFPADATPGQLVDAYLAHPDYVGRAGTPKLRGPKGILAGKLHQSDNAQEIRRICDVQKIAPAERDRLIRVVFEAKSPKGSAKERGLVGYDELPGQGKHVRAEKAHPAFQKFRIVSVLANLRIREGRKERPLTPDELEDLVDFINQVSLKQEITWQDLADNLGIERSDLRGTAKASFDGSPVLRNPPTDVTTEKIMACKVKWLKEWWKAADDEQRGYMVDAFSNSGGSEDGTDVNDAVAELLEQATEDDQLEFEKISLPQGRAAYSLDSLRRLTDRMLRDGVDLHTARRLEFNVGDDWKPAVEPIGAPTGNPAVDRVLKQVSRWLHAATERWGEPTVINIEHARDGLGSEKVARELMRDNEKRRKANAAAVADMAQQLGLSGKVHRSDQIRYFALQRQNCQCLYCGAPITYTTAEMDHIVPRTDGSSTNDRSNLAAVCRTCNHMKGKIPFAVWASSDKVNQGVSLTGALERVKMWERDNGMSPKQFKQLQREVSARLESRKPDQEFDGRSMESVAWMAVELRTRIEGFYRSRNEEFVPSVGVYRGQLTAEARKASGFENRVNLIGGRGKTRFDRRHHAMDALVIALMNPSVSRTLALRLNMRDAQRLTGVEETWKNFYGKPGGASQRFESWRESMLNGVELFNIALSDNAIPFVENIRLRVGSSVIHDATVRSFCPPKTPDGKQIITKGYGEQHSLGSAMPVELIDRTETPALWTALTRCPDFDPKKGLPENPQRTISVNGTRVGPTELVNFFGSSAACLKVRGGYVELGSSIHHARIYRIDGKKTTYAMVRVFQVDLLRLKDRDLFTTPLKPSTISMRTAEPKIRKALADGTATQIGWLVEGDELVIDTSKYSNGFVGEVLARYPEATSWRVAGFMNGTQLRLKPLLLSKEGFVDEKQAERLSVEPTSEAIKKTADSPGWLPATNVLFGSGQVRVIRRNCLGEERYHSSASLPVSMTLE

SEQ ID NO: 1724 - protein, 1132 aa, unidentified
  REGION 1..1132: note = Description of Unknown: Cas Enzyme sequence
MIDSSENVPGIRYRVGIDVGLKSIGFCAVEVDRNDQPVRMLNSMVFIHDAGVDPNENKAAKSRKLTAGVARRTRRLYRTRHQRLVNLDRVLSKEFGWPLPDLTSFKDPREPWHVRAGLLEGYIADDEKRKEALSIALRHMARHRGWRNPYAKVETLLQPSEPSDFLKGLNERISTALRTTFSAEATPGQLIDAYLAHPDYVGRAGTPKLRGPQGILAGKLHQSDNAQEIRRICDVQRIEPAERDRLIRVVFEAKSPKGSAKERGLVGYDELPGQGRHVRAEKAHPAFQLFRMVSVLANLRIREGREERPLTPDELEDLVDFINQVSLKQEITWQDLADNLGIERSDLRGTAKASFDGSPVLRNPPTDVTTEKIMACKVKWLKEWWKEADDEQRGYMVDAFSNSGGSEDGTDVNDEVAELLEQATEDDQLEFEKISLPQGRAAYSLDSLRRLTARMLSEGVDLHTARRLEFKVSDDWKPVVEPIGAPTGNPAVDRVLKQVSRWLHAATERWGEPTVINIEHARDGLGSERVARELMRENEKRRKANASAVAEMAAKLKLSGKVHRSDQIRYFALQRQNCQCLYCGAPITYTTAEMDHIVPRADGSSTNDRSNLAAVCRTCNHMKGKIPFAVWASSDKANQGVSLTGALERVNMWQRDNGMSPRQLKQLQREVCARLKSKKPDQEFDGRSMESVAWMAVELRTRIEGFYRSRDEESVPSVGVYRGQLTAEARKASGFESRVNLIGGRGKTRFDRRHHAMDALVIALMNPSVSRTLALRLNMRDAQRLTGVEETWKHFYGKPGEASKRFESWRESMLRGVELFNIALSDNAIPFVENIRLRVGSSVIHDATVHSFCPPKTPDGKQIITKGYGEQHVLGSAMPVDLIDRAETPALWTALTRCPDFDPKEGLPENPQRTISVNGTRVGPTELVNFFEFSNEGIKACLKVRGGYVDLSGAIHHARIYRIDGKKTTYAMVRVFQVDLLRFKDQDVFTTPLKPSTISMRCADPKLRRALEGRFATQIGWLVRGDELVVETDVYREGKIAQIMERYPELKHWKVAGFPEAKKIKMRPYLLSKEGLDDDEQGPIRTVLDVKGWITTIHKLLGAGGVRVIRRNCLGEKRNRSSASLPVSMTLE

SEQ ID NO: 1725 - protein, 1128 aa, unidentified
  REGION 1..1128: note = Description of Unknown: Cas Enzyme sequence
MIDSSANIQGVRYRIGIDVGLKSVGFCAVEVDRNDQPVRLLNSMVFVHDAGVDPNARKSMETRKLTGGVARRTRRLYQTRRQRLANLDRVLSKEFGWPLPDFSSFKDPREPWHVRAGLLDGYIADDEKRKEALSIALRHMARHRGWRNPYAKVETLLQPSEPSDFLKGLNERIGIALRRSFPEDATPGQLIDAYLAHPDYVGRGGTPKLRGPEGILAGKLHQSDNAQEIRRICDVQQIGPADRDRLIRVVFEAKSPKGSAKERGLVGYDELPGQGKHVRAEKAHPAFQLFRMVSVLANLRIREGREERSLSPHELQGLVDFIDQVSLKQEVTWQDLADNLGIERSDLRGTAKASFDGSPVLRNPPTDVTTEKIMACKVKWLKEWWKDADDEQRGYMVDAFSNSGGSEDGTDVNDEVAELLEQASEEDQVEFEKISLPQGRAAYSLDSLRRLTERMLCDGVDLHTARRLEFDVGDDWKPAVEPIGAPTGNPAVDRVLKQVSRWLHAATERWGEPTVINIEHARDGLGSELVAYKLMKANEKRRKANAAAVAVMAEKLKLSGKVHRSDQIRYFALQRQNCQCLYCGAPITYTTAEMDHIVPRADGSSTNDRSNLAAVCRTCNHMKGKIPFAVWASSEKVNQGASLKGALERVKMWERDNGMSPKQFEQLQREVSARLKSRKPDEEFDGRSMESVAWMAVELRTRIEGFYRSRNEEFVPSVGVYRGQLTAEARKASGFENRVNLIGGRGKTRFDRRHHAMDALVIALMNPSVSRTLALRLNMRDAQRLTGVEETWKNFYGKPGEASQRFESWRESMLRGVELFNVALSDNAIPFVENIRLRVGSSVIHDATVHSFCPPKTPEGQQIITKGYGEQHALGAAMPVELIDRAETPALWTALTRCPDFDPKTGLPENPQRTISVNGTRVGPTDLLNFFGSSAACLKVRGGYVELGSSIHHARIYRIDGKKTAYAMVRVFQVDLMRMKHQDVFTTPLKPSAISMRTAEPKIRKALADGTATQIGWLVEGDELQIDTSKYRGGFIGEVLERYPEARSWRVAGFPTPAKLRLRPYLLSAEGLEKDADKAMKDLLEGNGWRPSVNVVFSSGTVKIVRRNCLAEPRYSSQASLPTSSVVE

SEQ ID NO: 1726 - protein, 1135 aa, unidentified
  REGION 1..1135: note = Description of Unknown: Cas Enzyme sequence
MCPMTTSSENIPSIRYRVGIDVGLRSIGFCAIEVDRNDQPVKLLNSMVFIHDAGVDPNENKAAKSRKLTAGVARRTRRLYRTRHQRLVNLDRVLSKEFGWPLPDLMAFKDPREPWHVRSRLLEGYIADDNERKAALSIALRHMARHRGWRNPYAKVETLLQPAEPSDFLKGLKKRISESLGRSFPADATPGQLVDAYLAHPDYAKKAGTPKLRGPEGILAGKLHQSDNAEEIRRICEVQQIDPADRDRLIRAVFQAKSPKGSAKERGLVGHDELPGQAKHVRAEKAHPAFQRFRIVSVLANLRIREGRAERSLTPEELQGLTDFLLLAGLKQEVTWQDLADNLGIERSDLRGTARASFDGSPVLRNPPTDVTTEKIMACKVKWLKEWWKDADDEQRGYFVDAFSNSGGSEDSSDVNDEVAELLEQATEDDQLEFEKISLPQGRAAYSLDSLRRLTDRMLRDGVDLHTARRLEFNVGDDWKPAVEPIGAPTGNPAVDRVLKQVSRWLHAATERWGEPTVINIEHARDGLGSERVARELMRENDRRRSANAAAVAEMAAQLKLSGRVRRSDQIRYFALQRQNNECLYCGTEITFTTAEMDHIVPRADGSSTNDRSNLAAVCRTCNHKKGAVPFAAWASSDRANTGVSLKGALDRVKFWVRDNGMSPKQFKQLQREVSARLKSRKPDEEFDGRSMESVAWMAVELRTRIEGFYRTRDEESVPSVGVYRGQLTAEARKSSGFESRVNLIGGRGKTRFDRRHHAMDALVIALMNPSVSRTLALRVNMRDAQRIAGLEETWKNFYGKPGEASNCFESWRESMLRGVELFNIALSDNAIPFVENIRLRAGSSVIHDATVHSFCPPKTPDGEQIITKGYGEQHRLGDALPVELIDRAETPALWTALTRCPDFDPKKGLPENLNRTISVNGTRVGPMELLNFFEYSKEGIKACLKVRGGYVELGSSIHHARIYRIDGKKTAYAMVRVFQADLLRLKDRDLFTTPLKPSTISMRTAEPKIRQALANGTATQIGWLVRGDELLVDTSAYPDGKIGRVMTKHPEAIHWKVAGFPEPKKIKMRPYLLSKEGLSEDMEESIRTVVDTKGWITTIQKLLEAGEVKVIRRNCLGEERWRSSVSLPVSMILE

SEQ ID NO: 1727 - protein, 1153 aa, unidentified
  REGION 1..1153: note = Description of Unknown: Cas Enzyme sequence
MAVTLPKDDVRYKVGIDVGLNSIGFCAVEVDDDDQPIRLLNSLVFRHDAGIAPVSRKDALTQKNVSGGARRNRRANRETKKRLVALDRLLSEEFGWPLPNLEEYPDPYEPWHVRARLLDSYIADDAKRKEMLSIAMRHIARHRGWRNPYMKPASLASLPYPSEFLTNLNQDVSRAIGRKFASDATQGQLVDAFILGSSSLATTPELQVLEESEKDNSKNKPRDIVLGRVRGDKGVIEGKLHQSDNAEEIRRICATQKISQDQVERLIEAVFKAKDPREVGAANKLVGHDKLPGQGKYIRAERAHPAFQKFNIVATLTNLRINEAGSKRTLSSKELQTLTNYLSNVGPNDEVTWFDVAEKLKINRSDLQGTARASYDGQAALKYPPIDVTSVSIKKSKVKALKDWWKQASEDQRGQLIDYLPNSGRSDTPQTDHELDDLTKLTQSFSKKDLEELEKISLPAGRAAYSVNSLTKLTQLMLEEGIDLHEARKRLFNIGDDWKPTPEPINSPVGNPAVDRVLKQVARWIDAATERWGIPVSVNIEHVRGGLVSEKVVRELIRDNEARHKKNMEVAKEIAKRLGLSGRALRSHTVKYFALRRQNCQCLYCGTKISFETAEMDHIVPRSNGGSNNKSSNLAAVCRTCNASKSNIPFAVWVSSGKAGPGVSLEGTKERVNSLLLTKTDLQKEDDSLVEIYSKKEGEKFKKEIIARLESKKPEEEFDGRSLESVAWMAVELHERILGYYESLLKDSGQKVPRVGVYRGAITAEARKASGFENRVELLGGKGKTRLDRRHHAMDALVIALMNQSVSKLLSWRMQLRDSQRISGMPETWKEFHGFNRNDYRHWDAWAKAMRIAVELFNDALEKDDVHFSENKRLGISLAKAHDDTIKSLCSYVLGGAFSAELIDRAETPALWTALTKQPDFDVKNGLPEDPTRCITVNGKQFGPTDEVNFFASGAPAIKVRGGFAGIGDTIHHARIYRIDGKKTTYAMVRVFQTDLRRMKHKDLFTEPLKPSAISMRTASKTIRKAFADGTATQIGWLVEGDEIRIETDRYPSNDIGVLLRKYPEASSWRVCSFKTPTKVRLRPNLISKEGLSEKYFDADTLKAGRKIIDYPGWIVAINALLEKGMVTVIRRNTLGEERWVSRAHLPVSVDLS

SEQ ID NO: 1728 - protein, 1128 aa, unidentified
  REGION 1..1128: note = Description of Unknown: Cas Enzyme sequence
MITSSENVPGIRYRVGIDVGLKSIGFCAVEVDRNDQPVRLLNSMVFIHDAGVDPNENKAAKSRKLTAGVARRTRRLYRTRHQRLVNLDRVLSEEFGWPLPDFSSFKYPTEPWHVRARLLDGYIPEEGTRKEALSIALRHIARHRGWRNPYAKVETLLQPSEPSDFLKGLNERISKELGRAFPADATPGQLVDAYLAHPDYVKEPGTPKVRGPEGILAGKLHQSDNAEEIRRICDVQKIAPAERDRLIRVVFEAKSPKGSAKERGLVGYDELPGQGKHVRAEKAHPAFQKFRIVSVLANLRIREGREERPLTPDELEGLVDFINQVSLKQEVTWQDLANNLGIERSDLRGTAKASFDGSPVLRNPPTDVTTEKIMACKLKWLKEWWKAADDEQRGYFVDAFSNSGGSEDRTDVNDEVAELLEQATEEDQLEFEKISLPQGRAAYSLDSLRRLTDRMLRDGVDLHTARRLEFNVGDDWKPAVEPIGAPTGNPAVDRVLKQVSRWLHAATERWGEPTVINIEHARDGLGSEKVARELMRNNERRRQANAAAVADMAQQLGLSGKVHRSDQIRYFALQRQNCQCLYCGAPITYATAEMDHIVPRADGSSTNDRSNLAAVCRTCNHMKGKIPFAAWASSDKANEGVSLKGALERVKMWERDNGMSPKQFKQLQREVSARLKSRKPDEEFDGRSMESVAWMAVELRTRIEGFYRSRNEESVPSVGVYRGQLTAEARKASGFENRVNLIGGRGKTRFDRRHHAMDALVIALMNPSVSRTLALRLNMRDAQRLTGVEETWKNFYGKPGEASQRFEAWRESMLRGVELFNIALSGNAIPFLENKRLSMNSSAVHEDTLFSFSHARPVEKGSKTLKEKGQQRELGSAISVELIDRAETSALWTALTRCPDFDPKKGLPENPSRSISVNGTRVGSTELVNFFGTSSACLKVRGGYVKLANSIHHARIYRIDGKKTSYAMVRVFQVDLLRLKHQDLFTTPLKPSTISIRTAEAKIRRALADGTATQIGWLVEGDELRIDTSKYRGGFIGEVLERYPEATSWRVAGFPTSARLRLRPYLLSAEGLDKDADKAMKDLLEGSGWRPSVNVVFSSGTVEVVRRNCLAEPRYGCRASLPTSFVVE

SEQ ID NO: 1729 - protein, 1087 aa, unidentified
  REGION 1..1087: note = Description of Unknown: Cas Enzyme sequence
MSAHHLRVGIDVGTHSVGLATLRVDDQGTPIELLSALSLIHDSGIGEDGKKTASTRKEISGVARRTRRLLRRRRKRLQQLDKVLLDLGFPIPDLGGQTDPYLVWRVRAQLVEETLPEELRGPAISMALRHIARHRGWRNPYSKVESLLSPAEDSPFMEALRERIMKGPGVLLDDDITPGQAMAQVALTQRITMRGPDGILGKLHQSDNANEIQKICARQGISPDVCKQLLRAVFKAESPRGSAVSLVAPDPLPGQGSFRRAPKCDPEFQRFRIISIVANLRISEAGNRDRPLTADERRQVVTFLLEDPREDLSWVDVAEKLGISRQALRGTATLTADGERSAAQPPVNVTDQIMRKTKISLLKTWWAKADAERQGAMVRYLYEGLEDSECAEVIADLPEEDQAKLDSLHLPAGRAAYSRESLTALSDHMLATTDDLHEARKQLFGVDDSWTPPAEPVGAPVGNPSVDRTLKVVARYLAAVENVWGKPEVIQVEHVRDGFASERAARERDRANNRRYEVNQRAIKDIQQSYGVEGHVRPGDVMRHHAITLQDSACLYCGGTIGYHTSQLDHIVPQAGTGSNNHRENLVAVCERCNRSKSNTPFAVWAQTCGIPDVGVKKAVERVRGWRNRPGGMTSGELKRLKKEVIARLQRTQEDPEIDARSMESVAWMANELRHRIAATYPDTDVMVYRGSVTAAARKAAGIDSRINLIGEKGRKDRIDRRHHAVDASVVALMERSVAKTLAERSSLRWAQRLTGQEETWKQYTGLTVGAREHFETWRNHMLRLTELFNAKLTADEVHVVENLRLRLGSGNAHDDTIRKYATPRLGDGLTANQVDRACSPALWCALTREKDFDEKNGLPAREDRFIRVHGQELTSNDHIQLFAKKPGNDAKEKPFGAIAVRGGYAEIGSTIHHARIYRIEGKKPVYAMLRVFTHDLLSQRHGDLFSAVVPPQSISMRCAEPKLRQAIAEGNATYLGWVVVGDELEINVSSFTKDTIGRFLEDYPNTTRWRICGYDANNKLTLKPRILAAEGLGNPSSAVSEIVEGKGWRVAINVLAKVQPTVVRRDALGRPRYSSRSNLPVSWTID

SEQ ID NO: 1730 - protein, 1097 aa, unidentified
  REGION 1..1097: note = Description of Unknown: Cas Enzyme sequence
MIPWVWYVFLMPAHHLRVGIDVGTHSVGLATLRVDDQGTPIELLSALSLIHDSGIGEDGKKTASTRKEISGVARRARRLLRRRRKRLQQLDKLLLDLGFPIPDLGGQTDPYLVWRVRAQLVEEKLPEELRGPAISMAVRHIARHRGWRNPYAKVESLLSPAEDSPFMEALRERIMTGPGEILDDDITPGQAMAQVALTHRITMRGPEGILGKLHQSDNANEIRKICDRQGISSDVCKQLLRAVFKAESPRGSAVSRVAPDPLPGQGSFRRAPKCDPEFQRFRVISIVANLRISEAKGKDRPLTADERRHVVTFLLEDPRDDLTWVDVAEKLGVPRQALRGTAKLTADGERSAAQPPVNVTDQILRKTSISALKSWWAEADTERRGAMVRYLYEGLEDSECAEIIAELPEEDQAKLDSLHLPAGRAAYSRESLTALSDHMLATTDDLHEARKQLFGIDDSWAPPAEPVGAPVGNPSVDRTLKAVARYLASVENVWGKPEVIQVEHVRDGFASERAARERDRANNRRYDVNQRAIKEIQQSYGVEGHVRPGDVMRHHAITLQDSACLYCGGTIGYHTSQLDHIVPQAGTGSNNHRENLVAVCERCNRSKSNTPFAVWAQTCGIPDVRLKEAIDRVRAWRNRPGGMSAGELKRLKKEVIARLQRTQEDPEIDARSMESVAWMANELRHRIAATYPEADVMVYRGAITAAARKAAGIDSRINLIGEKGRKDRIDRRHHAVDASVVALMERSAAKTLAERSSLRWAQRLTGQEETWKQYTGATVGTREHFETWRGHMLRLTELFNERLAADEVYVVENLRLRLGSGNAHDDTIRKYDTPRLGDGLSVNQIDRASSPALWCALTREVDFDAENGLPAREDRLIRVHGQELTSNDRIELFSKKRGNDAKEKPFGAIAVRGGYAEIGATIHHARIYRIEGKKPVYAMLRVFTHDLLSQRHGDLFSAVVPPQSISMRCAEPKLRQAIAAGNATYLGWVVVGDELAIDIDSFTSGQIANFLKEYPGTTRWRIRGFYNDRQLRLRPAYLSAEGLVDPSEAVSKTLSIPGWLPAINQVAATHPRVIRRDALGRVRKSSISGLPTSWIIK

SEQ ID NO: 1731 - protein, 1084 aa, unidentified
  REGION 1..1084: note = Description of Unknown: Cas Enzyme sequence
MRIRVGVDVGKHSVGCCAIAVDPAGAPVRILSALSLIHDAGIGEDGKEKATSRRELAGVARRARRLLRRRRKRLQQLDTLLVRLGYPIVDFAEQKDPYLVWRVRAQLVQEVFPEKTRRYAISMALRHIARHRGWRNPYARTESLLAPAPESDFMRAMRKRVMNTTGEVLDEGFTPGQAMAVVALNNRVAMRGPDGVLGKLHQTDNANEIRRICKTQGVSEQECRELILAVFASESPRGSSRSRVASDPLPGQGDFLRAPKCDPEFQRFRVISIVANLRIAGRDGAQRPLLPRERKKVVTFLLESMSEDLAWGDVAERLGVRRQNLRGTASMTADGERASAQPPVDVTNQVMGSCRIKPLRLWWADADAERRGAMVRYLYEGADDSECAEFLGSLSEEEQGKLDSIHLPAGRAAYSRESLALLSEQMLATDDDLHAARKHVFHVDDSWKPPAEPVGAPVGNPSVDRTVKAVARFLNGVADVWGTPEAIQIEHVRAGFSSERTARELDHDNNRRFRQNQTAVDDIKKAYGIQGEVRHSDVVRYTAVMVQDSVCVYCGGTIGYLTCQLDHIVPQAGPGSNNRRENLVAVCERCNRSKSNTPFATWAQDCGISGVSVEEAVARVRRWRNIQDGRAQSAQLRRLQKNVIARLRRTDEDPEIDARSMESVAWMANELHHRVQSAYPSAEVAVYRGSLTAGARRAAGIDSRVNLLGERGKKDRLDRRHHAVDAAVIALMNPSVAKTLAERSSQRWAQRLSGQEETWKSFTGATPGARDRFDSWRDHMLRLTELLNAALAEDRVCVTENLRLRLGSGNAHHEIVRPLARHRLGDGLTAVQVDRASSPALWCALTRQPDFTPRGGLPPSENRVIKVHGRRVTADDNITVFSQKPGDDAAEKPFAAIAVRGGFATIGLTIHHARLYRIEGRKPVYAMLRVFSHDLLPYRRDDLFSVPLALQTISVRCAWPKLRAALAEEAATYLGWVVVGDELEVPMESFTGGYIGGFRKEFPNITRWRIRGFESATVVKLRPNVLAAEGLTESVGDVAKIVGRGWRMSVNVLFSTHPTVVRRDALGRVRHSSAAGLPTTWTVR

SEQ ID NO: 1732 - protein, 1056 aa, unidentified
  REGION 1..1056: note = Description of Unknown: Cas Enzyme sequence
MRILSCLSLIHDSGIGEDGQKTASSRREVSGVARRARRLLRRRRKRLQQLDALLERRGYPIVDTSTQKDPYLVWRVRAQLAQEVLPNETRKHALSMVLRHIARHRGWRNPYANAQSLLSPSPESEFMRAMRQRVMEKTGEVLDENITPGQAMARTALSTMVPMRGPNGVLGKLHQTDNANEIRRICEQQGISAEECKELILAVFASESPRGSASKRVASDPLPGQGAHKRAPKCDPEFQRFRIISVVANLRIAESEKAARPLSPDERRRVVDFLLESTSEDLAWTDIAKLLGIRRQNLRGTATTTADGERASAQPPTDATNRIMSSCSIKTLRSWWKRADADRRSAMVRYLYEGAEDSECATFLGNLPEKEQGKLDSLHLPAGRAAYSPNSLARLNDQMLRTADDLHDARKHVFGVDDTWRPPAESIGAPVGNPSVDRTVKAVARFLNAVDDVWGTPDTIQIEHVRDGFMSERTAREIDRENNRRFKQNQDTVAEIQKIYGIQGDVHRSDVMRYTAVTQQDCACVYCGDTITYLSCQLDHIIPQAGIGSNNHRENLVAVCERCNRSKSNIPFAVWAEKCGIPGVSVEKAIARVRKWRNTQSGRAQAARLKKLQKDVIARLRRTDEDPAIDARSMESVSWMANELHHRVKAAYPSADVAVYRGSITAGARRAAGIDSRVNLLGERGRKDRLDRRHHAVDAAVIAMMTPGIAKTLGERSNLRWAERLSGGVETWKSFTGATPGARESFEAWRNRMLRLTELLNLALAEDQIHVTENLRLRLGSGKAHGEVQPLKLHQLGNGLTPAQIDRASSPALWCALTREPDFDIRKGLPASETRIIRVHGRRLTADDSASFFSKKSDDSKEKPFAAISVRGGFAEIGSTIHHARIYRINGRKPVYAMLRVFTQDLLPYRNSDLFSAPVPLQSISVRCAEPKLKTAISAGTATYLGWVVTGDELEVPMESFTTGTIGEFRKDFPTITRWRIRGFFSATRFRLRPSTLAPEGLSDANDSVKKILTIPGWLISINGICSVHPTVARRDSLGRIRSSSSVNLPVSWTIL

SEQ ID NO: 1733 - protein, 1138 aa, unidentified
  REGION 1..1138: note = Description of Unknown: Cas Enzyme sequence
MALMAKSSASRPHDPRTYRVGIDVGTNSVGLAAIEFDEAGSPVSVLSAISWIHDSGVLDPKTATTPLAAAGMARRARRLRRRRVKRLVALDNQLKEWGWSALADDGDPYQPWRARMRLATQCIRDETDRHAHLATALRHMARHRGWRNPYAPVSSLYEPALPSEFLVGVPETDSRPGTPGVKQRVEERSGVVFSDDVTVAELAVEAIDHDNRVPLRMGKTEIRREPREFSYLSGKLLQSDNANELRAYARVQGLSAETLRQMIDLVFMSKSPRGSWVGKIGKDPLDDGLRAPKASDAFQRYRIVSTLANVRVRDGGTERRLTRDEIVKAYEFLVNLKPGEQPTWGDLGAVIGQARRTLSGTASSNVEGDERLPQRPPVHATDQAIRASRKLSKVRDHWVESDGEERDALISLIVDGVNDEASPAEVAAGEVMNSLAERDLGELAKLDLPAGRAASSLASLRRLPAHILATGDDLHEARKAEFGIADDWVPPSEPIGAPVGHPAVDRVSKIIARFLLAAEAEWGVPQRVMIEHVREAFSSEAKVRRVDRENQRRFKAKLEQRESVSTKIKSSGRVRDSDVRRYEAVQRQNCTCLYCGATITYDTAEMDHIVPRKGIGSTNTRTNLVAVCIECNRSKSNTAFATWASRNPKSGVSMDEAVNRTKFWQKDNGMPQRQWVSFLKEVRDRLERTDEDPEIDSRSMESVAWMANELRDRIAAHLRGDNANSGPQRVFVHRGALTADARRIAGVEDRIPWIGGAGKTRLDRRHHAVDAAIQTLLDESVARTLAERISLRQSEQFLRSGVETWKTFTGSSPAAQARFATWTANMRQLTDQLVAHFEQDHIVVAENLRLRPGNGQVHDDTINPLTRRFVGDALTRDEIDAASTPQLWTALTRDPDFSETLGLPANPARRLRVLGARQHWYQASDEIEFFDKPRAALAVQGGWAELGDSTHHIRIYRWEERSKVKYGMLRVFAIDLLSHRKDDLFTVEPDPSWISMRAAHPSIGRVDLKDREYLGWLVKGDEVLVTMSALESDRMKDLMQILGLSDVMHWQFAGTDSPTKMVLRPRHLAAEGLDRLFESHVLSTTQRESLTELIDRRGWRISVNELFGKGHPAIVRRDALGRPRLTSRAGLPTSWRAK

SEQ ID NO: 1734 - protein, 1191 aa, unidentified
  REGION 1..1191: note = Description of Unknown: Cas Enzyme sequence
MRPSRAYGGHELIPSKASHVRMPECSAVRRQVAVTEGPRSPRALVNFMNRAYASDVRGNLPRMSVKAPPRDPRNYRVGIDVGTNSVGLAAIEFNELGRPVSVLSAISQIHDGGVLEAKTATTRLAASGVARRVRRLRRRRVKRLIALDQKLAEWGWEPLADNGDPYLPWRARARLATERIADESDRNAHLATALRHIARHRGWRNPYVRVSALYGVAAPSRFLAGEAATEKKDAVQGFKQRVESRVGRTFSDGVTVAELAVAALEYDSNVALRHGKRGGRGQRVERDFSYIGGKLLQSDNANEIHAYARVQGLAEETMRELIDLVFAAESPRGSWVGKVGTDPIDKAPRAPKASDAFQRFRIVTTLANVRLTESGSPRRLTRDELLKAYEYLINRKPGDQPTWGDIGEVVGKTRKTMAGAASANFDGEERLPSRPPVHQSDHTVRNLRKIGALRDFWVAADGAHRDALVGLLVDNAKDESSPAGVAAWEVLDGLAEEELAELDKLELPAGRAAYSLTSLTKLTDCILEKGCDLHDARKLVFGVGDDWVPPAEPIGAPIGSPSVDRVLKIVSRFLSAAEVEWGAPQRITIEHVRDAFMSESAVRERDRDNQRRFKAKLEQRESIGKSVRPEGRVRDSDVRRFEAVQRQNGQCLYCGDTITFDTAEMDHIVPRKGPGSTNTRNNLAAVCLPCNRSKSSTPFAVWAERSGRPGVSVTDAVARTKFWQRDNGASPKAWTAFLKEVRDRLERTEEDPEIDARSMESVAWMANELRDRIAEHFRGTNSSAGMKQVFVYKGALTADARRVAGVEGRIPWIGGGGKTRLDRRHHAVDAAVQTLLDESIARTLAERISLRQAEYLRRDGVTTWKTYSGSGQAAQARFAEWRSSMEDLAALLERAFVEDRVVVTENLRLRLGNGRVHEDTISPLERRLVGDAFTRAEIDAASTPQLWTALTRDPEFDETDGLPTNPTRRLRLKGTWLSAQDEIEFFDKPRAALAVRGGWAMLGDSIHHARIYRWEERGKTKYGMLRVFAADLLKHRNEDLFNVTPDPSWISMRVAHPSIGRGNLEDKEYVGWLVSGDELLLTMDDLLTGHVANASAALGWGSLQRWTVTGFFSSRQISMVPTLAAAEGLPRYLELFPATLEYEKSLAWVFNRWVTACDPLFSKGLPVVIRRDALGRPRLESRAGLPTCWRA

SEQ ID NO: 1735 - protein, 1295 aa, unidentified
  REGION 1..1295: note = Description of Unknown: Cas Enzyme sequence
MSGHLHRRLYQVGIDVGLRSVGLAAIEVDPDGTPISVLNMETIIHDGGVDPTANKSAGTRKAVSGATRRMRRLIRRRRVRLHELDRVLEALGWPDVPLEAPRGVGRIADTSGGKREALTDDPWFPWRARAELLAGYVHDDTRRLQLLSVAVRHMARHRGWRNPYMTVDALKRVEGPSKEFRSLVDAIASKLQMWTPPADGGQGTPNPLLELSVTEVVQRAQHLDIDSREVVSTKTGEVTTYWDVRRKLRGEPKTGKDGRLREGLLQGKIHQSDNVRELRRILEAQRMAGAPGLTKLGDGTWRPDDDVTLTDTLIDAVFAARTPKGSAKERVGIDPLDRYERRQLELPLDKTERRAEKASLAFQRYRIVSLVANLRLASASEPERALMPDERRKVVELLWNVRVDDKHEAPSWADVAETLGVDRRTLQGTAKQTTDGDRASAAPPFNVTEQRIQACGVKELVGWWNGAPELEREAMLEVLGNGSGSGAAEDAIARVEDVVASLPEDAMGKLDNIKLPAGRAAYSARTLRRLTERMLSSEDDLSAARQAIFGVPPDWKPPADPIGLPVGNPAVDRVLKIVNRYLLAATAAWGTPAVVNIEHAREGFLSESAARDLDRENNARYEANLLMRVEASLAEAHPGWTVGQVRDAALKAVTEKRAAQTERGDGSEVRRYEYVDSVARVRAWKRQNGTCLYCGTALVYGTFDLDHIVPRAGVGATNTQDNLAAVCRACNASKGKLAFAIWASSGVREGVSIAGALERVNQMQFFGQDNIGGRRSRAVRTRQAFRARLQQTAEDDAIDSRSMESVGWMANELRHRVEAWFVEENARRGAADGAPLETRVGVYRGGVTAEARRAAGIEGRILLIGGTPGKTRLDRRHHAVDAAVIAMIRQGAAQAAITKQKVAVMAKEAAERQDWVEAKTIAAAEGMLEWDVTSVLAVRDNLRRARALETRPGTERSGQEPSWQTYKGANPGLWDAWTGQMRVLADLISDELAADRVPVFELLRLKAGSSQAHEDKVRSFGTEPHAGCRSVGAAWSREDIDRSATPQQWLALTRHPDYSDAAGLPEDPTRRIRVKSRWYETTERLPLFPLGLGCVAVRDGYAELGASFHHARIYRCRKHLKSGGVKTFYAMVRVYQLDLLPFRNQASVDLFTVPLGPETISWRTAEPRLREASAHGDADYVGWIVAGDEVALDMSTQTNGQISEVLAAFPGTVAWVVTGFKDTKLCLHPRLLAGEGLPVTASAGVRAIVAGNDGWRPSVDVVFQDCHARVVRRDILGRLRRSGRDGLPRCWQAEP

SEQ ID NO: 1736 - protein, 1107 aa, unidentified
  REGION 1..1107: note = Description of Unknown: Cas Enzyme sequence
MSAVEGTKYSVGIDVGSYSVGVAAIEVDDAGFPIRILNSKVQIHDSGVDPDKAKYATTRLAASGVARRTRRLVRRRRKRLQELDKALETWGWLPVSESADPHAPWRARARLASEFVPDEAEQFELLGVALRHMARHRGWRNPWTRVESLMVEQPPSDQFNGFQQRVEERTGQSFDLDATIGQLATAAIDFAPKLPLRAGKTNKGLPASQRSAKEFSFIGTKLLQSDNANELLHIAKVQGLDPTRAREMIQLVFAAESPRGSALGRVGKDPLPGQRALPRAAKATDAFQRYRMVSVLANLRIVTAEGQRPLTVAERTDAFNYLLNVKTASDPSWLDVAGAIGVDRDDLRGTATPTADGERAAARPPVHVTDRVIRTCKVRALKDWWPGADKDAKNAIIAVLADGKFDEESAGGVLAQELIESLSDEELTALDTINVPAGRAAYSVDSLNRLTHRMLTEELDVHGARMAEFGVEPDWAPPAEPIGAPVGNPAVDRVTKIVARWLSAVEAEWGAPQKIVIEHVRSAFASEEEARRIEKEMGKRFEQNLEQRREISEQLDIGGEVRRSDLMRFQALTRQNGNCLYCGNTITFRSAEMDHIVPRAGQGSTNTRTNLVAVCSRCNQDKSNRVFAEWAESSNIPGVSVAEAIERTRHWNSGPGETAKDHRRFVSEVQARLKKTSKDPEFDGRSMESVAWMANELRLRIESHFRPSGTKVSVYRGRLTSEARRASGLEGRVPFIGGGGKTRLDRRHHAVDAAVVAMIDESVSMTLAERVNLRDAQRFTNDPETWKSHTGSKPAMQKRYATWLDQMDVLTDLLSEALTNDEIPVMEDLRLRLSNGAAHDDTIRPMDRYLVGDELPMELIDRASTPALWLALTRDPKFDPKAGLPADPDRKIRIHGTHLSASDEIGFFGSGAAAIAVRGGYAAIGSTIHHARVYRIDGGKKPVYAMLRVFTVDLLPHRHGDLFTAPIPPQSISMRTSPKKLREAIADGSATEVGWLVVGDEFEIEMDSFNSGQIAELTEFLGETCTWKLVGMSEPDRLKFRPVKTALEGLPGDAPAAVGLILGVKGWRPRLNGCFATLPTVIRRDALGRPRWHSDAGLPVSWRVEQE

SEQ ID NO: 1737 - protein, 1207 aa, unidentified
  REGION 1..1207: note = Description of Unknown: Cas Enzyme sequence
  MOD_RES 1184..1192: note = Any amino acid
MLSRQLLGASHLARPVSYSYNVQDNDVHCSYGERCFMRGKRYRIGIDVGLNSVGLAAVEVSDENSPVRLLNAQSVIHDGGVDPQKNKEAITRKNMSGVARRTRRMRRRKRERLHKLDMLLGKFGYPVIEPESLDKPFEEWHVRAELATRYIEDDELRRESISIALRHMARHRGWRNPYRQVDSLISDNPYSKQYGELKEKAKAYNDDATAAEEESTPAQLVVAMLDAGYAEAPRLRWRTGSKKPDAEGYLPVRLMQEDNANELKQIFRVQRVPADEWKPLFRSVFYAVSPKGSAEQRVGQDPLAPEQARALKASLAFQEYRIANVITNLRIKDASAELRKLTVDEKQSIYDQLVSPSSEDITWSDLCDFLGFKRSQLKGVGSLTEDGEERISSRPPRLTSVQRIYESDNKIRKPLVAWWKSASDNEHEAMIRLLSNTVDIDKVREDVAYASAIEFIDGLDDDALTKLDSVDLPSGRAAYSVETLQKLTRQMLTTDDDLHEARKTLFNVTDSWRPPADPIGEPLGNPSVDRVLKNVNRYLMNCQQRWGNPVSVNIEHVRSSFSSVAFARKDKREYEKNNEKRSIFRSSLSEQLRADEQMEKVRESDLRRLEAIQRQNGQCLYCGRTITFRTCEMDHIVPRKGVGSTNTRTNFAAVCAECNRMKSNTPFAIWARSEDAQTRGVSLAEAKKRVTMFTFNPKSYAPREVKAFKQAVIARLQQTEDDAAIDNRSIESVAWMADELHRRIDWYFNAKQYVNSASIDDAEAETMKTTVSVFQGRVTASARRAAGIEGKIHFIGQQSKTRLDRRHHAVDASVIAMMNTAAAQTLMERESLRESQRLIGLMPGERSWKEYPYEGTSRYESFHLWLDNMDVLLELLNDALDNDRIAVMQSQRYVLGNSIAHDATIHPLEKVPLGSAMSADLIRRASTPALWCALTRLPDYDEKEGLPEDSHREIRVHDTRYSADDEMGFFASQAAQIAVQEGSADIGSAIHHARVYRCWKTNAKGVRKYFYGMIRVFQTDLLRACHDDLFTVPLPPQSISMRYGEPRVVQALQSGNAQYLGSLVVGDEIEMDFSSLDVDGQIGEYLQFFSQFSGGNLAWKHWVVDGFFNQTQLRIRPRYLAAEGLAKAFSDDVVPDGVQKIVTKQGWLPPVNTASKTAVRIVRRNAFGEPRLSSAHHMPCSWQXXXXXXXXXVNHAKPVACNRLYRS

SEQ ID NO: 1738 - protein, 1044 aa, unidentified
  REGION 1..1044: note = Description of Unknown: Cas Enzyme sequence
MNQDNEDALFLGIDLGPNSLGWALVEIKDGDPHQVVASGVRAFEAGLGKLEIDGKGVSRNVARREARLARRGVDRRGRRLTKIAILLQRAGLLPAGDMADPPTRHKILEDLDRQLFVKLGEPVGDPYKLRARALDEKLSELELGRALYHLTQRRGFLSNRKSAPKKDEKKGKVKPKISELEKEIEASGSRTLGEYFSRVDRLNERVRTKYTSRAMYKAEFELIWESQRRFHADILADDFRKKLYRAIFHQRPLKSQARFIGRCELEPKHRRAPMALLCAQRFRYLQSINNLRVIEAPGCAARELAPAERSALIEKLEYEEKLDFKKVRKLLKLPDTSQFNLEQGGEKKIFGNKTAAQFARILGVERWKGFSEEEQNGIVDDWLAIRDDKTAVKWGRRKFNLDDASAHDLGDLRLDDSYCHYSRKALAKLIPGLRDGSSLYDAIMEVEEYRERLLRPHAAFSFLPPVKIHFKHLGNPIVERALTELRHVVNAVIREYAKPEVVRIELARELKQSSVDRGKTHVKIRDNEVERQGAAMTILDETGITDPSRNDILKVLLYEECRHECPYTGKPISVTDLLGDHPQFDIEHIIPLHRSLDNSYMNKTLCHRDENHHKHDRTPYEAYFGTDKWDEIVLRVSRFTGKAAGAKLRRFQMTPDDVSGLLDDFTNRQLNDTAWVSRWAREYLGLLYGGQAGRGVDTEGRTRVQTTNGQVTAFLRDVWDLNKILGDGPGKSRVDHRHHAVDAIVVALTDAGVVKRLSDAASRATKERRRQFGKVPLPWETFDQDVRQSIDKLVVSHRLDRRVRGPLHKETFYSIQRKDSKGKEYVHVRKRIDDLKPSDLKSVVDKGVRVAIEKKLVELGTDDPGRAFKDLANHPVMEGKNRSKLPVHKVRLKDVQATFEVGSGHRVRRVVLGNNHHIEVVEVLDKKGNTTGWDAEVISLYTATQRLKAKKPVVNRDHGPGKCFLFSLACGDIIELDQADSPRGLFVVRTVPQSKQVRWVGISDARKLEDIPKTGQTGYPNTLRKLGCVKVTVDQLGRVRLARN

SEQ ID NO: 1739 - protein, 1135 aa, unidentified
  REGION 1..1135: note = Description of Unknown: Cas Enzyme sequence
MYVRCDTMCPMTTSSENVPGIRYRVGIDVGLNSIGFCAVRVDLHDRPLELLNSMVFVHDSGVDPNQKDKHDTRKYVGGNARRTRRLYKVRRQRLFNLDKLLSRELGWPLPEMASFDDPREPWHVRARLLDGYIPEEGKRKEWLSIAMRHMARHRGWRNPYAKVETLLQPAEPSDFLKGLNDRISKSLGKVFPADATPGQLVDAYLAHPDYVNRAGTPKVRGPEGILAGKLHQSDNSGEIRRICEMQRVDPSVCDRLIRAVFEAKFPKGARRLVGHDELPGQSRHVRAEKAHPAFQKFRIVSVLANLRIREGREERPLTPAQMSGLLDFIQDVSLKQEVTWQDLADNLGIERSDLRGTAKASFDGAPVLRNPPTDVTAEKILACKVKWLREWWKDADAEQRGYLVDALSHSGGSEDEADINDEIAELLEQATAEERVACEEISLPQGRAAYSLDSLRRLTDRMLRDGVDLHTARRLEFNVGDDWKPAVEPIGAPTGNPAVDRVLKQVSRWLYAATERWGEPTVINIEHARGGLGSEKVARELIQANERQRKSNIKAAEEIAARLKLSGRVRRSDRIRYFALQRQNCQCLYCGTDITFATAEMDHIVPRADGSSTNDRSNLAAVCRTCNHMKGAIPFAVWASSDQANVGVSLEGALDRVRMWQRDSGISMKQFKQLQREVSARLKSRKPDEEFDGRSMESVAWMAVELRTRIEGFYRTRDDESVPFVGVYRGQLTAEARKASGFESRVNLIGGRGKTRFDRRHHAMDALVIALMNPSVSRTLALRVNMRDAQRLAGREETWKNFYGKPGEASNRFESWRESMLLASELFNSALSANAIPFLENKRLRVNSSAVHEATQFSFSHAKPIKKGSTTLKEKGEQRTLGAAMSVDLIDRAETPALWTALTRCPDFDPKNGLPENPKRTIRVNGTHVGPTELLNFFGSTSACLKVRGGYVKLANSIHHARIYRIDGKKTAYAMVRVFQVDLLRLKDRDLFTTPLKPSTISMRTAEPKIRQALADGTATQVGWLVEGDELQIDTSKYRGGFIGEVLERYPEATSWRVAGFPMPSNLRLRPYLLSSEGLEKDADKAMKDLLEGNGWRPSVNVVFSSGIVEIVRRNCLAEPRYGSYSSLPTSRVVE

SEQ ID NO: 1740 - protein, 1141 aa, unidentified
  REGION 1..1141: note = Description of Unknown: Cas Enzyme sequence
MCPMTTSSENIPSIRYRVGIDVGLRSIGFCAIEVDRNDQPVKLLNSMVFIHDAGVDPNENKAAKSRKLTAGVARRTRRLYRTRHQRLVNLDRVLSKEFGWPLPDLMAFKDPREPWHVRSRLLEGYIADDNERKAALSIALRHMARHRGWRNPYAKVETLLQPAEPSDFLKGLKKRISESLGRSFPADATPGQLVDAYLAHPDYAKKAGTPKLRGPEGILAGKLHQSDNAEEIRRICEVQQIDPADRDRLIRAVFQAKSPKGSAKERGLVGHDELPGQAKHVRAEKAHPAFQRFRIVSVLANLRIREGRAERSLTPEELQGLTDFLLLAGLKQEVTWQDLADNLGIERSDLRGTARASFDGSPVLRNPPTDVTTEKIMACKVKWLKEWWKDADDEQRGYFVDAFSNSGGSEDSSDVNDEVAELLEQATEDDQLEFEKISLPQGRAAYSLDSLRRLTDRMLRDGVDLHTARRLEFNVGDDWKPAVEPIGAPTGNPAVDRVLKQVSRWLHAATERWGEPTVINIEHARDGLGSERVARELMRENDRRRSANAAAVAEMAAQLKLSGRVRRSDQIRYFALQRQNNECLYCGTEITFTTAEMDHIVPRADGSSTNDRSNLAAVCRTCNHKKGAVPFAAWASSDRANTGVSLKGALDRVKFWVRDNGMSPKQFKQLQREVSARLKSRKPDEEFDGRSMESVAWMAVELRTRIEGFYRTRDEESVPSVGVYRGQLTAEARKASGFESRVNLIGGRGKTRFDRRHHAMDALVIALMNPSVSRTLALRVNMRDAQRIAGLEETWKNFYGKPGEASNRFESWRESMLRGVELFNIALSDNAIPFVENIRLRVGSSIIHDATVHSFCPPKTPDGEQIITKGYGEQHRLGDALPVELIDRAETPALWTALTRCPDFDPKKGLPENPNRTIFVNGTRVGPTELLNFFGSSAACLKVRGGYVELGSSIHHARIYRIDGKKTAYAMVRVFQVDLLRLKDRDLFTTPLKPSTISMRTADKKIRKALVEGTATQIGWLVEGDELQIDPSKFSGGFVGELLTQYPEIKSWRVAGFMNGTQLRLKPLVLSKEGFIDEKQAVRLGVEPTSEAIQKTVDSPGWLPAANVLFGSGGVLVVRRNCLGEERWQSLGSLPVTMMLE

SEQ ID NO: 1741 - protein, 1095 aa, unidentified
  REGION 1..1095: note = Description of Unknown: Cas Enzyme sequence
MSAHHLRVGIDVGTHSVGLATLRVDEQGTPIELLSALSHIHDSGIGKEGQKDHDTRKKLSGVARRTRHLLRNRRKRLQQLDKVLLGLGFPIPKPGEFLDPSEQTDPYRVWRVRARLVEEKLPEDQRGPAISMAVRHIARHRGWRNPYSTVESLLSPAEESSFMKALRKRIMTKTGEVLDDDITPGQAMAQVALTHKIYMRGPEGILGKLHQSDNANEIRKICARQGVSPDVCKQLLRAVFKADSPRGSAVSRVAPDPLPGQGSFRRAPKCDPEFQRFRIISIVANLRISEATGENRPLTADERRQVVAFLTGDSQADLAWVDVAEKLGVHRRDLRGTAVLTDDGERSAARPPFDATDRIMRQTKIRSLKTWWEKANSEQRGAMIRYLYEEPTDSECAEVIAELPEEDQAKLDSLHLPAGRAAYSRESLTALSDHMLATTDDLHEARKQLFGVDDSWTPPAEAINTPVGNPSVDRTLKIVGRYLAAVESMWGTPDLIHVEHVRDGFTSERMAEERDKADRRRYDDNQKAIQKIRQDYGKEGYISRGDIVRHDALELQGSACLYCGTTIDRHTCQLDHIVPQAGPGSNNRRGNLVAVCERCNRSKSNTPFAVWAQTCGIPDVGVKEAIGRVRGWRKQTPNTSSEDLTRLKKEVIARLRRTQEDPEIDERSMESVAWMANELHHRIAAAYPETTVMVYRGSITAAARKAAGIDSRINLIGEKGRKDRLDRRHHAVDASVVALMEPSVAKTLAERSSIRGEQRLSGQKQTWKQYTGSTVGAREHFEMWRSHMLRLTELFNERLAADKVYVTQNIRLRLSDGNAHTVNPSKLVSHRLGDGLTVQQIDRAYTPALWCALTREKDFDEKNGLPAREDRAIRVHGQEISSADCIQVFSKRKKTRSDCDEPPFGAIAVRGGFVDIGPSIHHARIYRIDGDEPSYAMLRVFTHDLLSQRHGDLFSAVIPPQSISMRCATTELRQAISTARATYLGWVVSGDELHVPVETFTTHKIGSFLKDYPNTTHWRICGYDSETILILRPKVLSAEGLSDSSSIAEYIIKDRGWRVTINKLAKVHPTVVRRDALGRPRYSSRSNLPVSWTID

SEQ ID NO: 1742 - protein, 1147 aa, unidentified
  REGION 1..1147: note = Description of Unknown: Cas Enzyme sequence
MSTYSANVQRRHYRIGIDVGLKSIGFCAIEVDRHGTPTKLLNSTVHLHDGGAEPGDRKEASRKQKAGIARRARRRGLRTKRRLKELDAYLSEQLGWPLPDLEEFTDQHEPWRVRAELLDSYVSDPEERKEMLAIAVRHIARHRGWRNSYTSVASLARAPYPSKALIAVNERVCEALGATIDPEATQGQLASAYVADGRYAFQALRGTQGLFRGRQYQSDTYHELTRILRFQCVESAQIDELLKRVFYVINPRDGVRRNMRVGCDQLPGQESKFRAEIAHPAFQKFRIVAALANLRIRSGRQERKLSADELRRVTQYILDSSITLEDIDWSDIAEQLGIERNSLTGTAKAVFEGEPALRRPPTDAVSVIVMSSKLTKLKRWWKSASEDDRGDLVKFVANSTLGEGEEFENDEVDGFLGSLNDEDLAKLEEITFPPGRAAYSLDSLQRLTDRMLADGCDLHEARKREFDVSDSWAPKPDPIGAPVGNPAVDRVMKEVNRWLVTAVNRWGVPEAVNIEHTRSGMMSTEKARELMDSNTARQKRIEALAQELGVQACVSGKLNQVTKLRLLAVQRQGCKCLYCGDPISFETADMDHIVPRSGLGSTNDRNNLVAVCRECNESKRNQLFSEWAKSGGRKDKVSIDDVIERVWSWERDPGVSPKQHKAFRAAVVARLKSKAPDQEFDARSMESVAWMAVELGKRISGYFASACSADEEVAVPSVGLYRGRITAAARVVSGFEGCVRFTGGNGKTRLDRRHHAMDALVIALLDDRIAQLLALRDNLRFAQLVTSGADEWRLYLHSHPSENALMYDWSQHMQVAAKKFNAALESGMVRFTMNQRLRLGSSRAHMDSVTSFEHAYLDRDSDRKSKVDKNGVRKVKEHGEFRFLSDPLPVDLIDRAETPALWTALVKNEKFDPKLGLPADSERTIVVHGRSIGPMDRIRFFGATSAGNWSASMAVRGGYVSISNTIHHVRIYKIADEPVKYGMLRVYQVDLQRARGKDLFSFPIPACSISMRTADKAIRELLRDSTKEPSAWLVAGDELRVNPKFYDEGKIGEFFAEKGYSDVVEWRIVGFESATQVNLRPLRISEEGFNDETPQAVKEIAGRGKSWRVSISALLEPGGVAVIRRNVLGEERWKSTCDRLPCSKVFE

SEQ ID NO: 1743 - protein, 1116 aa, unidentified
  REGION 1..1116: note = Description of Unknown: Cas Enzyme sequence
MNDKVITPKDKRRYRIGIDVGRNSTGFCALEIDDDDNPISFLNLSVLLHDAGVGKDGGKIQETRKAISGRTRRARRLIRNRRRRLAELDKILADLGWPLPDLEKYPDPHEPWKVRALLVEEYIEDERLRQEKLAIAIRHIARHRGWRSPWVSVSSLHVSHPDSDELIALRARVAEKTGRILPAGLTPGQLLYLLDSGEKIRGDAGILAGKLLQSDYATELNKIFSRQKISEDLGEQLINRVFASKSPKGSAAEKVGKDALPGQEHLDRAEKAHPAFQRYRIVTIIANLRIREEHEGQKERRLTGEEMTSLFKFLSDPDRKKVPTWIEVAQVLGIERQDLVGTGKLTADGERTGNTPPVDETNIRLTKCSIKSVQQWWRAASYLERCAFIEQISRASSPGEASSREEQIVADFVASLNDEDLEKLESSVRLPIGRAAYSVESLERITERILADNVDLQQARETEFGVSPEWKPPAVPVGEPVGNPVVDRVLKGVNRWLLRAEAEWGIPQQVNIEHVREAFMSKAKVNELQRFQAQRFRKNEEARQQIEGSQNLSGLPRIAAIRKQQALQRQHCECLYCGTHITFATAEMDHIVPRRGVGSTNTRDNLVAVCRRCNQEKSNIPFAVWAAQTNIPGVSQKEAISRVTGWFTDNSVKDDKRLRAGVIDRLSRTKADPEIDNRSMEAVSWMARELAHRIEQRYRTPQGQSATAIDVSGEKEAPSENKVKVRVFNGSIIAAARRASGFEGRVNLIGGRGKTRLDRRHHAMDAATIAMMRPAVAQTLVERENLRRGQIMSGGEENWKSWNGSTFAQRKIYSVWLEQMRYLTEIYNQALADDQIPVFSNFRLRLGDGKLHEEVKKLHRKRLGDAWSMNDIDRAETPALWCALTRLPDFVWAEGLPANPERKIVVNGSHFAADDSVGIFPTNAPMLKMRNGCVEVGTSIHHARIYRIAGSKKPVYVMLRVFTVDLPNKAGVDLFQVDLPEQSISVRNAEMKLREAFREGNAEYLGWLVVDDELELDLSAERKGAIAELLSEYPGISHWSVDGFPMNSKLRLRPLYLAGEGVPEDALPGTKEILQGRGWWPAINKIFSTCKPRVIRRDVLGNIREDSSRLPSSWSI

SEQ ID NO: 1744 - protein, 1096 aa, unidentified
  REGION 1..1096: note = Description of Unknown: Cas Enzyme sequence
MTTADVRVSADKKHYLVGIDVGSYSVGLSAVEVDEDRNPVGLLSAVSYIHDAGVDPTARKEAATRRAVSGVARRTRRLYRRKRKRLVNLDRFIEKCGWPVVDNEAFDDPLLPWRARMALAEGFIEDDKQRALYLSIAIRHIARHRGWRNPYTKVQSLHSPQEHSDAFKAIREDVEKELGRPLPENATVAQVIGQLMVAGRRLRGEGGVISARLQQVDHALEINTICAKQRIPDDLRKQLMDMVFAAESPKGAASGRVGKDPLSGRCRAGKASDAFQRYRIAALTANLRIRQGGDKRRLTQVEMTLVNDLLVNAKGAKQPTWVDVAEVLGIDRGQLLGTATMLDDGERAGATPPVHATNLMMASVRIAPLKNWWLEADQPARDAMIKALSLAEADDFDSQEGAQVQALFSSLTDEEHEKLDGLHLPAGRAAYSEDTLRKLTEHILAHGSDLYEARRAVFGVSEDWAPPAPDIAEPTGNPAVDRVLKIVNRWLSAAEAEWGAPLSVNIEHGRDAFVSELKSREIDRDIQRRTRRNYDLLKTMQEELGIDSKPSRADLWRYQSVQRQNGQCAYCGSSITYSNCEMDHIVPRAGQGSTNKRENLVATCARCNRSKLNIPFAVWAERSTIPGVSVKEAIDRTKMWLPDSGMRAADFRSFVKQVQDRFRRTTLDEPIDNRSAESVSWMANELRARIAQHFSSGDDQADTKVRVFRGEITARARAASGIQRDLNMIGGKGKQRLDRRHHAVDASVIALMQATVAQVLVERNDLKHEQALRRQAPQWKEYEGADEGTRFQFRQWKRRMHSLLRILNQALDEDRIVVMSNLRLRLGNSQVHEAQIGKLAAKKVGDAFSVVEIDRASSEALWCALTRDPDYDPKEGLPENPERTLRVHGTHLSADDQVYIFPVGAAAIAIRGGYAELGASFHHARIYRINGKKPSYGMVRVYSVDLQKFRQQDLFSVELKPQTVSMRYADPKVRKAIVEGNAEYLGWLVSDDELLLDASSFTGQVADTQAALGPIKRWRLDGLFSPSRLRLRPLQLAAEGLASDSEDYLKKTLDMQGWLPAVNKLLSVGRVTVVRRNALGRPRLESVANLPVTKSF

SEQ ID NO: 1745 - protein, 1087 aa, unidentified
  REGION 1..1087: note = Description of Unknown: Cas Enzyme sequence
MAASPTKYVVGIDVGSFSVGMAAIKVDDDGMPQEILSAVSHIHDSGLDPDNIKSAITRLAVSGVARRTRRLFRRRRRRLIRLDAFIQSKGWGLPKNDESDDPYLPWRVRAELASRPIPTEEELGAKLSIAIRHIARHRGWRNPYSRVSSLMADVPPSDAFEAIQEEFSKILGRSLADDTTLGQMVAACNLTNTKLRGEGGAISARLQQSDLAREIRKICSMQEIDENTVREIIEYVFVAESPKGANAARAGKDPLQPGEPRALKATDAFQQYRIAALIGNLRIREGRERRELSLDERRLVFDYLVHLKPKVEPDWSAVADTLKIDRGDLLGTATTTDDGERAGARPPVHETNRRILTCSVKPLVKWWQEAGDAERRAMLMALGNGSVEDYDSAEGAKVQAFFTDLSDEDMEKLDKLQLPVGRAAYSEDTLTKLTKAMLSGGIDLYTARRQVFGISEDWAPPAPEIGEPVGNPAVDRVLKVVARWLRAAENAWGVPESINIEHVRAGFMSESKSRELDRDNERRAKRNLELFTQMQQKFGQDIEPSRADLWRYQSVQRQNGQCCYCGTTITYQNCEMDHIVPRAGRGSTNTRDNLVAVCHDCNLSKGNIPFAVWAAKSTKPGVSVAEAQERLRHWVCDPGLKTPQFKRFVKSVNDRLSRKTIDEELDARSIESVAWMANELRGRIAHKYQDAKVRVFRGQLTAEARKASGISKKIAFIDGPGKSRLDRRHHAVDAAVIAFMSAKVAETLAIRGNLKFDQELRKDAPQWKEFTGSTDAHKIIWSKWHSRMTALSGLLQTALDEDRIVVMSNLRLRLGNGTAHEATIGKLKKLKVGDPISAVDVDRASTEALWCALTRHPDFDSKEGLPVDSDRTIRVQGRHLSADDAIEVFPIGAGSIAVRGGYAELGSSFHHARIYKIVGGKKPVFSMMRVYTVDLLKYENEDLFAVELKPQTMTIRQCEPKLRKALAAGQAEYLGWLVVDDELLLDTTKFNTGQVANTQAELGKISRWRVDGFYDSTKLRLRPLQMSAEGINEEMSADVKKILDTPGWRPSVNKLFDLGKVTVIRRDALGRVRLSSNAHLPITWAVG

SEQ ID NO: 1746 - protein, 1147 aa, unidentified
  REGION 1..1147: note = Description of Unknown: Cas Enzyme sequence
MDIESPKKYLIGIDVGLNSVGLAAIEVNDSGIPLEILSLETIIHDGGVDPTANKTAGTRKAVSGVARRMRRLVRRRRQRLLKLDKTLRSMDWPIIDLDSVSDPYYPWRARRDLLASKIDDQQELREKLSIAVRHIARHRGWRNPYASIESLKAATEPSREFRTLVDLLKKRTDAGLFDETMAVAEIVCSALKADPRLRVRGTRKRKDGTDVTPLLEGKIHQSDNVRELCRIWERQGLPKDEFETVIEAVFTQRSPKGSAAGRVGKDPLPGMRGEPRAEKASLAFQRFRIVDKVANLRIRDGVTKGGRPLAPDERRATVEFLWTSDDITWDDVAIFLGVSRRDLLGTAKETELGERGGGRPPVNVTDIRIRESKIKELVRYWDSVDEVGKEALLVVISNGSGSGDRDDRAREAEACVIEFIEQLPEEVLGKLDGIKLPEGRAAYSAKSMRRMTKRMEESEDDLHAARKYCFPTIDDSWKPSAEPIGQPVGNPAVDRVTKIIARYLAAAERLWGPPLSVNIEHTRDGLMSEAMARKEARERNKNAEENAKARQEIPLEFLSASREAGEDDLHEAGGPARFGARQSDVYRWRAIQRQKSRCLYCGTALHWGTFEMDHIVPRAGQGSTNTQTNLAAVCRECNHAKGKLPFAVWAKSDSAKARGVTLEGALARAEDFFDTAAKRDSNRRKPYTREGRIIKGVRDRLRRTEADEELDNRSIESVGWMANELHHRIEAHYRDELRASTSVGVFRGWVTSEARKAAGIQRRLVLIGDRDDDRPGKNRLDRRHHAVDAATIAMLRPGVAQALVVRDNLRRTAQISGPRTEIDWKQYRGTNPGLFAEWQTQMEHLVDLVQSHLESDQVPVFEFLRLKLGSSSGHKDTIRPLEKARVGDAWSMEQIDRSATPAQWIALTRQPDFDPSRGLPANPERRVRVHDKWKNADDELPYFPTGAGCIAVRDGYAELGASFHHARVYRCGQVLRSGKIKPFYAMMRVYQVDLLRHAHEDLFTVEIPPQAISRRAAEQRLRDALDSGRAEYIGWIVPGDELLLDMTSRRSGKSGAIVDEFGEAVQHWVISGFDQIANITLSPRLLAGEGLTEDAPDTIKKVVVGKGWIVSVDVLFGKCCPQIIRRDILGRPRLKSGRGLPTCWRAI

SEQ ID NO: 1747 - protein, 1092 aa, unidentified
  REGION 1..1092: note = Description of Unknown: Cas Enzyme sequence
MSETPVFARSLGSDWVLGIDLGSASLGWAAISLDSLGMASGLKVAGVRLFDPAVSGDIEKGQDESNAVVRRTARLIRRQLRRRAARQSELFKLLQKHRLLPAYAGAETNGARQRHEVLNDFDKGLAKKLASDVDGRLAGADLPLYLLRKMALDAELTPFELGRVFYHLSQRRGYKSNRKEQAAKKDDAGKVKKDEDLGEVKRDIEILEKEIQLSGSRTLGEYFASFDPHTQKVRRRWTGRAMYEYEFGEIWKKQAGFHPDLLTEGLHREVKRLLFYQRPIKAQAHLIGGCELEEGERRASWATLEAQQFRLLQKLNDLEIILPGQTAGIRLDAEQRAVVLGLLETAADVTFDRIRKALKLDKNVGFNLQRGGESKLKGSLTNVHMFEVFGERWLAMTDEEKKQVVEDWRTIDKEESLIRRAIEYWKLDLGAARLLAKRTAPSGYCMYSRKAIRKLLPYMQEGLRFQEAVTVAFPDFQRLAGGIEHDRIPSVREVLKTLRNPAIERALTELRKVVNALIREHGKPAEIRIELARDLKKPRVERAKATTQNRDREKERDAVRKELKEVFGEGFRPSRADLEKALLYKECAGECPYTGKRFPFSSLFGENSPWQVDHIIPFSRMPDDSFQNKVLCWVEANQYKGNRTPFETYTEPGEYEAILSRVRNWKKPNVGKLKRFELRTTDEIEGFSSRQLNDTRYASKLACELVGTLYGGRDVMTEAGKRQAVFASSGMVTATLRRAWGLEAILRETAGSANGETKGKPRSDHRHHAIDAITIALSKPKMIAQLSRANERDPYWNRDGRRRFPKIEAPWLDFVPSIRPHIEGMLVSHRPEHRLTGALHKGTNYSRPETNGKFVHIRRPVNGLTASEIESIVDPAVQRAVMEKAALFGGTLQGWTPNAAKDDWPRLATKSGKQVPIKKVRVRKALKVFPVGDAPHRTRFVDHGADSIHHIAIFVTKDGRGRDKWISEIVRIFEANQRYQAWKKTGGPIAPLVYGSHSEDAAAEFLFFLMKKDTLELEVGGKRAVYLVTSFENDGRINLIPINASGKREDQKESKMVLRESLSSLSKRVPQKVHIDSIGRKWPVRDKTGDRP

SEQ ID NO: 1748 - protein, 1081 aa, unidentified
  REGION 1..1081: note = Description of Unknown: Cas Enzyme sequence
MGETNTQTGSYILGIDLGSASLGWAAISLDGAGMATGLLRSGVRLFNPAVTGDIEKGQDESNAVARRTARLIRRQLRRRAARQSELFQLLQRYTLLPPYKGAEADASQQRHSILNALDQELTAKWVKPGNAGAQAAIELPLYLLRKTALDAALEPFELGRVFYHLSQRRGYRSNRKDQASDKGTPGKAKKADDLGAVQGGIKELEDAIRSSGTRTLGEYFTSLDPHSQKVRGRWTARRMYEEEFAAIWAKQVTFHPALLTEELHYKIKHLLFYQRPIKAQSHLIGDCELEPGERRAAWATLEAQQFRVLQKVNDLEIILPGNVTGIPLTPEQRQTVLNLLESSSEATFKKIRKALGLGENIGFNLQRGGETKLKGNLTNSHMADVFAERWLEMSEEDKKQVVEDWRTIEREESLIRRATEHWKLDETGAKWLASRPAPSGYCSISRKAIRKLLPLMMEGKRFKEAENEIWGSRFSGGQVYDRIPPVRQALKSLRNPAVERALTELRKVVNALIRELGKPTEVRIELARDLKKPRHERAKAVSQNRDREKQRSAAKVKMLQEIGPGFEHPSRADVEKALLWEECQGECPYTGKRFPLSSLFGENPPLQVEHIIPFSRIPDDSFQNKTLCYHEENQIKGNRTPFEAYKDAEQFETILNRVRNWRTPNPGKQRRFELRTLEELEGFSSRQLNDTRYASKLACELVGTLFGGRDIPTESGSRQVVFASSGMVTATLRKGWGLEAILREAAPSANGQNRGKPRTDHRHHAIDAITIALSAPRMIAALSRNNAQDPYWPRNGRTAPKLQSPWNGFVDSIRPHFEQMLVSHRPEHRLTGALHDETNYGRPHKEGGKDVVHIRKQVVGMSAGDIENIVDPAVRESVREKAASFGGDLKKWTPKEGSEDWPLLRTKTGKEIPIKRVRIKKSLGVETIAKGDRARHVALSSNHHVAIFALLDERGGERRWEPMIVSLFEAMERKRKGQPLIQTRYPVVGEFIFKFSLMGGDTVLLHKDCDHKNNHCNPSVWRLRTIGSNGQLSLVRINDARLKAEIQKAKEWWSPTQDALRKLDAVKVVIDSLGRIHQSGG

SEQ ID NO: 1749 - protein, 1068 aa, unidentified
  REGION 1..1068: note = Description of Unknown: Cas Enzyme sequence
MDWTADVSEYTLGLDLGSASIGWSLIALDSSHKPNKLLRAGVRIFEPGVEGSTLDIERGKDQSKAVARREARLHRRQLRRRAARQRDLFLLLQQKNLLPPAVDAAAHLADQRHQVLNDLDCALTSDLCRTVEADSLRAVKESLPYFLRKSALDRKLSAFELGRALYHLIQRRGFKSNRKEGKKSKDDELGKVKAGISELAAQMSSAGVRTLGEYFAGLNSHERRIRGRWTARSMYEQEFERIWQAQRPYWRDVLDDDFKSKVGWLLFFQRPIAAQEHLIGCCELEPEERRAPWAFLEAQRFRVLQKVNDLEVIEFGKINERSLTQEEKAAVFAKLENEGDQSFAELRKLLGLKKSTFNLERGGEKRLRGNRTNAFMRSIFGVFWDEMPEEEKHKAVTLWYRAESEEKLASRVHELWALDENSASKFAETRPEDGYCSLSLKALRRLLPEMEKGVSYGRIRPVLYPELRQEPKDLLPVVREAVPSLRNPAVERALTEVRKVVNAIVRQYGKPYEIRIEMARELRKSRKEREESTRQIRSRQREREEAKAKILKECGIQNPSRSDIEKALLFEECGGICPYTGRTIEFSSLFGDSQFDIEHIIPLSRCPDDSFLNKTLCYHHENRSVKGGRTPWEAYGTDDERWAQILERVKRFSNPAKLRRFELRSEEELREFTERQMNDTRYTTRLAVDLLSTLYGGRDIPRGDGTNRKVIHATTGMVTATLRRSWGVEAILREAVPSYNGESKGKPRTDHRHHAVDAIVIALTSQSMVQQMSVAAANAPSWQSARRSFQSVESPWPNFVDSLRPQIVNMVVSHRPEHKMSGEFHDETNYGRPRIEGKKSVVHIRKPVTSLKEKDIASIVDPVVRRAVEEKFAALSGDLSRCEAANEWPACPASNGRDIPIRKVRVRKVLNVSAIGKGNRKRFVMPSSNHHVEVFAKLDVHGKETRWESIVVSLMDAAERKHGAERIVAHSYQDAEDFVFKFSLMGGDIVQLHKDCSHAAGKCSPSLFRLRTIAANGQLSLIGITDARMKDDIKKAKEWWSPMSDALRKLDCRKVQLDLLGGIHAAND

SEQ ID NO: 1750 - protein, 1107 aa, unidentified
  REGION 1..1107: note = Description of Unknown: Cas Enzyme sequence
MSERDDSSRPYVLGIDLGSASLGWALVELDGAGNPVGLLSGGKDHTRNVPSCGVRIFEPGVDGTALDIEQGKDQSKAVERRTARLHRRQLRRRAYRQSKLFLLLQEKGLLPSSGSEKKLSSSQERHAVLTRLDRELWEKWRTDSGAEDFAQLPLYCLRKAALDRKLDPPEIGRVLYHLSQRRGFKSNRKEGKKTADQEKEAGAVKAGIASLRERMSASGARTLGEYFAGLDPHQIDQNVRRRWTARAMYEEEFALIWAAQAAHYPATLTEELRRTVARLLFFQRPIAAQSHLVGKCELEGGNHRRASWATLEAQRFRILQKVNDLCVIYPGDPVEHSLTEEQRELVICLLDREGDQTFANLRKQLAKQFGLKGRYEFNLERGDEKRLRGNRTNKAMIAAFGERWETLAPEEQKQIVEEWRTSESDEALLRRGMEHWGLEEIAVYRWVDAKAEDGHCALSRKAIGRLMPLMLAGKSFKEAETEVYGNRFSGGEVLDELPPLHVHRKIKGAAAMEKRLQQLRLGAVRNPAVERALTELRKVVNAIVREHGKPYEIRVELARELKKPRKERESAAKQNRTRQKEREKAKADLLRECGIQNPSRADIEKALLHEECGGECPYTGRHFTLRDLFQEGQFDVEHIIPLSRYPDDSFQNKTLCWHEENRNIKRNQTPFEAYSKDEERWGEMQLRIKSWKPGNPGKLKRFMLRSEEELEEFTARQMNDTRFASVLACRLFESLYGGRDVQTESGSRQVVFASSGAVTATLRRDWGLEQILREAAPSSNGQSKGKPRTDHRHHAVDAITIALTKQAVIQSMSRSASLDANYPQDARAFRRTPSPWRNFVDSIRPHIANLIVSHRPEHKMSGALHDETNYSPSRKVNGKSVVHIRKPVGGLSDKDIENIVDPAVRDAVRAKAVQLSGDLSKCASSHDWPVLPANRTHPTPIKRVRMQKVLEVTPIAAGDRERFVAVSNSHHTAIFALVQEEREVEWEGIPVSLYEAMERKRKKQSVIDKRHPDGPAWQFKFSLMGGDTIELHRACNHAGDVCKPEIYRVRTIAGNGQLSLVKITDARMIKDIKSAGDWWSPRADALRKLDCRKVVVDTLGKVHTAND

SEQ ID NO: 1751 - protein, 1085 aa, unidentified
  REGION 1..1085: note = Description of Unknown: Cas Enzyme sequence
MSYTGSPVQDYVLGIDLGSASLGWAAISLDQTGTATGLLRAGVRLFDPAVTGDIEKGQDESNAVARREARLIRRQLRRRAARQSELFEFLQRQGLLPAYEGPKADSSQQRHSILNALDLELAAKWSKPDSFATKAAIELPLYLLRKTALDAALEPFELGRIFYHLSQRRGYKSNRNEQAGKNEAAGKGKKDEDLGQVEGDIQMLEVAMSSFRTLGEYFSSLDPHTQKVRRRWTGRKMYEDEFALIWEKQSAFHPELLTKEVNQEIKRLLFYQRPIKAQSHLIGGCELEPGERRAAWATLEAQQFRVLQKVNDLEIILPGQVTGIALTPEQRKTVLYLLENSREATFDKIRRALKLEKNIGFNLQRGGEKRLKGNLTNTLMAETFAERWGEMSDADKIQVVEDWRTIPQDDSLIRRVMDHWKLDETGAKWLADKPAPSGYCMYSRKAIRNLLPLMKTGMRFKAAEKEVYGNRLTGGEVHERIPPVRDTLKTLRNPAVERALTELRKVVNALVSEYGKPTEVRIELARDLKKSRHERAKAISYNRDREKQRITAKETMLREVGPGFQHPSRADVEKALLWEECQGECPYTGKRFPFSSLFGENPPLQVEHIIPFSRIPDDSFQNKTLCYHEENQYKGNRTPYEAYSDPAQYEAILNRVRSWKKPNPGKQRRFELRTTEELEGFSERQLNDTRYASKLACELVGTLYGGRDIQTEDGSRQVVFASSGTVTATLRKGWGLEAILREAAPSANGQNRGKPRTDHRHHAIDAITIALSRPKLIAALSRDNAQDSHWPQNGRSAPKLQSPWKDFVDSIRPHFEQMLVSHRPEHRLTGALHDETNYGRPRKEGGKDVVHIRKQVVGLSTGDIENIVDPAVREVVRAKATSLGGDLKKWTPKEGDEDWPMLKTKTDKFVPIKRVRIKKSLGVETIGKGNRTRNVALSSNHHVAIFALLDERGKEKRWESVIISLFDAMERKEAIKQQRTSLPLILKSYPEAGDYIFKFSLMGGDTVLLHKDCDHKNDLCNPTVWRLRTIASNGQLALVRINDARLKADIQKAKEWWAPMQDALRGLDAAKVVIDSLGRIQPAGG

SEQ ID NO: 1752 - protein, 1100 aa, unidentified
  REGION 1..1100: note = Description of Unknown: Cas Enzyme sequence
MFSTLETPQKYVLGLDLGSASLGWAMIALNAVDDPFSLIKTGVRIFEPGVDGTAIDIQEGKDQSKAVDRRVARLHRRQLRRRSARQRELFQLLQARNLLPVPVTGTGAGAEQRHRLLNELDVEIARKFASMEDSPLFDQMPLYRLRKRALDHALEPFELGRILFHLIQRRGFKSNRKETKKNDKENEDQGAVKADIHSLELEIRAAGARTLGEYFAGLNPHNPTNDPKLRVRRRWTSRKMFETEFALIWAAQSPYHPSLLTPELRDRVSQLLFFQRDIAEQKHLIGTCELERGDPAHPEKSPPKRRAPWAMMAAQRFRMLQKINDLKLIDPRKDIPISLAPEDRDKLYRLLDREGTQTFSALRKYLGIPKGVTFNLENGGDKNLPGNRTQRSMIKVFGSRWDEFTEGKQNQVIENWRNSKTDDALMQEAIDRLGLDAERAALLVKEKPATDYCALSLTAIEKLTPLMLQGRSFKDAETEVYGSRFSGLTVHDALPPVREVLPTLRNPAVERSMTELRKVVNSIVGKHGRPYEIRIELARELKKPRGERQKDTDKARKRQKQRESVAKKIFHEFGIMDPGRSLIEKALLYEECGGICPYTGMQMRYSSLVNDSEFDIEHIIPRSRFPDNSYQNKTLCYQSFNQQKANRTPYEVFQGSPEEYEKVLDRIRAWPIKNHGKLMRFRVGEPGLKEDNTLEGFSARQLNDTRYTSVAAAKLLATLYGGRDVKTVDGKRQAVFATSGAITAALRSTWGLEEILRDLVPPQPGDQRGKPRIDHRHHAIDAITIAATQPRVIQSMARDSSLAIDWRTRPKVPTPWKDFVPSIRPHIEQLLVSHRPEHKLTGELHDETNYGKPYKDGKKTMVHVRKRVTGLTEKDFPNIVDPAIREAVISKAQSLNGDLSACEIKSDWPLLPTRNGSFIPIKKVRMKKVLDVTPIGHGVTQRYVAESSNHHIAIYAQLDEHGKEKCWDGIIVSLLEAYDRLSEIKRSEAYRQHHRTASLVQRVLPDEPHQLFKFSLMGGDIVELHRHCDHFNNLCSPHLYRVRTIATNGQLSLVRITDARMKKEIQAAKDWWSPTADSLRKFSCRKVVVDLQGQRRYAND

SEQ ID NO: 1753 - protein, 1063 aa, unidentified
  REGION 1..1063: note = Description of Unknown: Cas Enzyme sequence
MSFALEPPLKYVLGLDLGSASLGWALIALDDTDDPVSLIRAGVRIFEPGVDGTSMEIEQGKDQSKAVERRTARLHRRQLRRRAARQRDLFRLLQRHSLLPEPGISNGSPEEHRHSILNQLDLQRTHKWQKAFPDNRFSQLPLYFLRKQALDEPLEAHEIGRVLFHLIQRRGFLSNRRENKQNPEQKKELGQVKAEIHTLEQEIQNAGARTLGEFFAGLDPHAQKVRRRWTARKMFQDEFERIWKAQSSYSPDLLTPELHDKIAHLLFFQRPIAAQTHLIGKCELEPGKQRAPWAALEAQRFRILQKVNDLRIVNPGSLISDPLTKEERQRLYDLLDRDGDQTFKAIKKCLSFPAEAQFNLEKGDEKRLRGNRTQAAMRKVFGDRWDTLSAGKQHQIIENWRNSESDEVLIREAVEQWSVDDAAAALLSEQIPEPGYCAISLTAISKLLPLMQCGKSFKEAETEVYGTRFSGGVVFDTLPEVRRNLESLRNPAVERALTELRKVVNAIVREYGKPYEIRIELARELKKPRQERIEATKKNRTRQREKEDVAVKILRECGLSNPSRKDIEKARLHEECGGYCPYTGRHIPFSNLFHNSEFDVEHIIPRSRYPDDSFQNKTLCYLPENRDVKKGQTPWEAYGKDEQRWAEIMTRVGSWKNRGKMARFSIQTEEDLGEFSARQMNDTRYASVLAARFLGTLYGGRDVLDGDKVRQVIFASSGAVTATLRSSWGLEAILHELVPAEQGESRGKPRTDHRHHAIDAITISLTRGRVIQSMARAASMEPWQKDARAWRKIESPWRNFVPAIRPYIEQMLASHRPEHKMSGELHKGTNYSAPHNYKGKLTVHTRCALSALSAADIADDDVIVDPAVRDAVRRKLGDLGGNPKLFERPENVPCLAASDGRLIPIRKVRIREAKKPILVGAGVRERYVASGGIHHIGLFVVRDARRREVWESEVVQITDAYGRHREHKPVVCRTHNADEAAFLFSLMKDDTVELEKDGKRGIYRVKKFEATGKITFVPVNNAMLDKMQYTTGAAWSRMPATLKPMSPRKVVIDLLGKVHPAND

SEQ ID NO: 1754 - protein, 1088 aa, unidentified
  REGION 1..1088: note = Description of Unknown: Cas Enzyme sequence
MSVNGDSEQPYVLGLDLGSASLGWALIGIDALDEPVSLIRAGVRIFEPGVDGSALDIQQGKDQSKAVDRREARLHRRQLRRRVARQRELFGVLQSAGLLPTSDVPGAGIGSEQRHRILNDLDAALAKHYRTGPDIEAFSQMPLYALRKKALYEPLALDELGRVFFHLSQRRGFQSNRKDVKKKTKDDEDLGQVNSAIHELEQAIQASGAQTLGEYLAGLDPREQKVRRQWTGRRMFKEEFEKIWTAQQAYHPSLLTPEFHDRVWGLLFDQRPVSTQKHLVGKCELEPDKRRAPWAALPAQQFRVLQKVNDLRIERERGSEEPLSPKQRAAAFDLLENHGTQSFAKIKQHLGLPKTAQFNLERDKAKELKGNATAQSMRKVFGDRWKDFSEGKRNQIIENWRNAEKDEDLKREAMEHWGLDEAGASALLAEKAPADYCALSLTALSKILPLMRSGKSFKEAETEIYGNRFSGAAVHPLIPVLRPHRKHFRNSTPPPQDPLMASIANGLRNPAVERAITEMRKVVNAIVREYGKPYEIRIELARDLKKPRSKRLEDTVNNRKREAENRALAERMFQECGIPQPPSRKDLEKAKLWVEQQGECPYTGHSLPFSRLFNDDNGFDVDHILPRSRHPDDSFQNKVLCWGDTNRIVKRNQTPYEAFAEQDPENWQQVLGRVARWRNPGKLRKFEIRSTDELAEFSSRQLNDTRYTSLLAARLLSTLYGGRDVVKDGTSRRVIFASTGAVTATLRQNWGFEQILRGILPAEPGETRGKPRTDHRHHAIDAIVIGLTRDNIIQAMARASALEPWQPGTRCWRQVPQPWRTPDFYGGVEQRVREMLTSHRPEHKVNGELHKGSNYGRPYMHNGTPTVHTRKLISALKVGDIEADDVIVDRAVRDIVRTKLGEVGGNPKAFEKPENMPYMTTPAGKRIPIRKVRIRETRSPLRVGEGPRERYVASGGIHHVELFVRRDEKRRETWDSRVVQITEAYERRREKTPVVARILEGDLEAQFLFSISKDDTLEIQDGDLRRIVRVKLFYDNKQIFYVPVNDAHLDADQKKLAIVKSKYPNSLRPLEPRKVVVDLLGRVHPAND

SEQ ID NO: 1755 - protein, 1126 aa, unidentified
  REGION 1..1126: note = Description of Unknown: Cas Enzyme sequence
VYHRVYLKYERPVAGALRGRSLSGALRRKLTENSQAIAAQVHCCEFRLAQFNCQGSLLMDQTAEVAKYTLGLDLGSASIGWALIAPDSSYNPHKLLRAGVRIFEPGVEGSMSEIERGKDESKAIVRRNARLHRRQLRRRAARQRDLFLLLQQKSLLPLAADASANLSDQRHQVLNDLDRELTSKLRQTVEAGSLRAVEQSLPYYLRKSALDRKLSTFEMGRVFYHLIQRRGFKSNRREGKKAKDDDVGKVKAGISELEALMTSAGSRTLGEYFAGLNPHERKIRGRWTARAMYEHEFELIWQTQRTYSPDVLDDDLKPRISRLLFFQRPIAAQEHLIGFCELEKDERRTPWAFLEAQRFRALQKVNDLRVIEHGKLAERSLTDDERNTVFAKLEDEGDQSFAELRKLLGLKKTNFNLELGGEKGLRGNRTNSFMRSVFGVFWDEMPEEEKHKAVTLWYRTESEEKLAQKARERWALDENATKKFVETRPEDGYCSLSLKALRRLLPEMETGISYGEIRPRLYPEARKQPKDLLPLVREAVPSLRNPAVERALTEVRKLVNAIVRQYGKPHEIRIEMARELRKSRKEREESTRQNRTRQRERDEAKVKILKESGIQNPSRSDVEKALLFEECGGICPYTGHSIEFSSLFGDSQFDIEHIIPLSRCPDDSFLNKTLCYHEENRSVKGNHTPWEAYGADEERWAQILARVGKFGNPAKLRRFELRSEEELGEFTARQMNDTRYTTRLAVDLLSTLYGGRDIPRGDGTNRRVIHATTGMVTATLRKSWGLEAILREALPSSNGESKGKPRTDHRHHAIDAIVIALTSQSAVQQMSVAAARAPSWQSGGRSFRGMEAPWPNFVDSIRPHIGSMVVSHRPEHKMSGALHDETNYGRPRLEGKKLVVHTRKLVVSLGKRDIASIVDPVVRRAVEEKFSALGGDLSRCETANDWPLCPTNNGKAVPIRRVRIRKVLNVSTVGKGTGQRFVMPANNHHIEVFAKLDAHGKEVRWDNIVVSLLDAVERKRQQVKVVQRSYRDTDDYIFKFSLMGGDIVQLHKNCDHAAGKCSPSLYRLRTIAANGQLSLISVNDARLKDEIRKVKEWWSPRCDALRKLDCQKVQIDLIGRVHPVND

SEQ ID NO: 1756 - protein, 1065 aa, unidentified
  REGION 1..1065: note = Description of Unknown: Cas Enzyme sequence
MSEETAVCEYTLGLDLGSASTGWALIELDSNHSPCKLLDAGVRIFEPGVEGNIEEGKDESKALARRTARLQRRQLRRRAARQRELFRLLQSVGLLPANNSAIDDFSLRRHEILNRLDRALLNGLKGRQSASDYSQSEQLLPYVLRKEALERKLEAHELGRVLYHLCQRRGFKSNRREGGGKDKEEELGKVKQDISTLRREMGDKTLGAYFAGIDPHVRKVRQRWTARDMFETEFELIWERQSQEWPELLSAQLKAKVARLLYFQRPIAKQEHLIGHCELEKKERRAPWASLDAQRFRLLQKVNDLKIIPAGSFDEVCLTSEQRQLLLEYLEVHGGITFGDLKKLLGLPPRTHFNLERGGEKSMPGNRTNAHMIAVFGEQWRELAAESKNEIVEMWRWVESEEKLARYGQERWALDEHTAKLFAGKRAEDKYCNLSLAAIRKLRPLMEEGVAFMTAREALYPEQREEPRKLLPLVRVAVPELRNPAVERALTEVRKVVNAILRKYGKPYSIRIEMARELRKPRKEREAAAKRMRQNEKERIAVKARILKEAGLPNPSRDDIERARLWEECGGICPYTGRTIEFSSLFGRESQFDIEHIIPLSRCVDDSFGNKTLCYHEENRHVKRNQTPWEAYGGEEERWDGILQRVKAWKVGTTAAKLRRFELKSTEELEGFAARQMNDTRYTTRLAIDLLRTLYGGLHVAEADGSTRQAIFASSGSVTATLRKVWGLEGILREALPSANGENHGKPRTDHRHHAIDAIAIALSSSSTIQRMNAYAATATARDAGTRVFRGLQSPWPDFVDSIRPRILAMRVSHRPEHKMSGALHNDTLYGRPYVLDGKSLVHLRRSVKGIKPDQIANIVDPAVRAAVERRLAEHGGDVGKFNPEVPESLPYLESKRGKIPIKKVRVKETKKGLLALRNNRFVESGDIHHFELFVQRDENRRESWTHVPVSLMEASLRNAANRRNGHAVAVVSQELKDDPEAEFLFSLMKGDIVEMDYEGGRDLFRVKKFYAAGRTWFSHVNNAQKDADQKRDGTCWAKPPNGLMQLNARKVTIDLLGKVHPVHD

SEQ ID NO: 1757 - protein, 1097 aa, unidentified
  REGION 1..1097: note = Description of Unknown: Cas Enzyme sequence
MRYVVGIDVGLFSVGFAALEIDDAGNPIKILNAISHIHDSGLDPNNQKTAQTRKAVSGVARRTRRLYATRKKRLATLDSFLTSNGFPVVNLEKEADKIAWEARTKLANQKIDDEGEKYKLFSIAIRHIARHRGWRNPYVPAERLNALRSPSDGFRALESKAREIAKGPIPSNPTLAQLVTALPNGATQLRGEGGFLSERLNQQDFANEILKIGSTQEFTSEFMAKVVSQVFYAKSPKGSAEKFVGKDELDPSQPRAWRATLAFNEYRTISLLANVRIADSASPTKAQRALTVEERKKVFGFLNTWNKRTSPTWTDVAEVLGIDRGCLKGTATSNDDGERVSAAPPINQTHQIMWNCQVKSLREFWRKGSDAMRSALIHELSNVETTAEESPEAIAAATAIRSLTPEEMEKLESIKLPHGRSAYSVRTLEKLSHHLLNNEADLHSARQALFNIPDDWHPAAPPIAEPTGNPSVDRTLSAINRWLLLAEKRWGIPASINIETARHGFKSENAAREIDRGIERRAKRNRAVQENIAKVLGIEGKVRRGDQIRYQAIQRQNGQCAYCGAPITFKNAEMDHVVPRAGAGSTNTRNNLLAACHKCNLSKGKLPFAVWARKELSGPNVSLQGAIARVNQWPTDSGLTTKEMKDFQEAVIKNLKRTSEDEKIDARSIESVAWMAIELRHRLIGHFEQKDFTPKIRVFSGAVTASARKASGIEKRIKMLGDSHGKNRLDRRHHALDATVISLMSYTVAQTLLERDNLRWEESITRTPDSDYGTWKEYQGRNQQNRYLFEQWTHRMRLTVPLLQDALDNNRISVTENLRLRLGNSQAHEAGIGKLIPAQVGDSLSPELIDRASTPALWCALTRSEDFDWKDGLPANPTREITVNGKHLTAEDEITFFGVKAGAIAVRGGYAELGASFHHARLYRITNGKRQAYCMLRVYTVDLIRHQGEDLFSVELPPQSISVRQCEPKLRKALREGTAEYITWFVVGDELHVNSSKVATGQAATFLAEYGDIRSWRVRGFYSDAKLRLKPTLFSAEGLPQSVSADCKKVIDSPGWLPAVNKLFGLGSVTIVRRDAHGRPRFESTAHLPICIQVESL

SEQ ID NO: 1758 - protein, 1079 aa, unidentified
  REGION 1..1079: note = Description of Unknown: Cas Enzyme sequence
MGEPNSSSFILGLDLGANSVGWALFRAQQGGDGRLNPVAIEQAGVRVFEAGVEGDIEKGKDVSRAIDRRTARLARRRLDRLARRLNALYAILRRAGLLPPIAEPTPPPPPPNRKRTARERRELRIAIAQRRDKSLAELDKALVSKWQARLRSGGAPEEKVRLVPHVLPYLLRARALDEPLTPHELGRALFHLGQRRGFLSNRKSTPKKDEDLGEVKSHIHELEEKMAGQTLGQYFAALDPHEERIRHRWTSRQMYNDEFEKIWSAQQPHHAALLADELKKSTYRAIFHQRPLRIRKEFLGNCECERDRKRAPIALLAAQRFRMLQMVNHTRILWNGLERPLTTEERAKMIEALESQGDLEFGKAKKLLKLGRSEKFNFEEGGEKRFLGNRTAAKLRGIFGERWDSLLPKQRDDIVNDWLSVQKDWVLAKRGMAAWGLDKEAAAELGALQLEDGHCRLSRQALAKLLPLMEAGEPYTTARLKVYGEQYAAKPVDELPAVAKAVPELRNPAVSRALTELRKVVNAIVRRWGKPAAIRIELARDLRNSRDKRQQIWKKNRENEKAREEAARKVLAERGNPNPSPEDIKNVSRADVQKVLLAEECKWICPYTSHGISMAALLGPQFEIEHIIPLSRSLDDSFMNKTLCEAGENRERKRNHTPWEAYHADPKWDTIISNVKRFRGSAARVKLGRFLMDDEAMKKFLAENSSNQLNDTRYATKLAKEYLGMLYGDEAASRVQASRGGVTAFLRNEWKLNSILGDGGEKVREDHRHHAVDAVAIGLTDPATVKMLSDAAARAVREGRRRFAPIQPPFDGFLDAVRASIAQIIVSHRVARKVSGPLHDETLYSKMKKDEEGSPCVHMRKRIEDLNKPDQVEAIVDRVVRERVRAKLQELGGDFKKFADPGNHPYMETRDGRRIPIHKVRIRDRRSTVPIGEHARERSVWLRNNHHVEIVEVKDKKGHTKWEGKMVTLFEAKRRLNGREPIVRRDHGEGKQFLFSLGHEETVRLTLDGGVGFYKVTKFSESANERIEIAFRRNRDARLAKNLPKGKEGLLRMPPDSLRKAELSKLTVDPLGELRRAND

SEQ ID NO: 1759 - protein, 1037 aa, unidentified
  REGION 1..1037: note = Description of Unknown: Cas Enzyme sequence
MGPAENKSVVLGIDLGPNSIGWALVKKGRANPRLIDSGVRVFEAGLSSIEQDGKGKSRNLERRLARQTRRLLERRSRRMLNLAHALQRTGLLPPGNIEEPAEKYDYFLKLDRQLDSPYILRARALDKKLQPYELGRALYHLGQRRGFLSTRKSPPKSQDDEGKINADINILHSQMHETGARTLGELFATLQADHIRVRERYTSRAMYQDEFSLIWGTQAQFHADKLTEELRREIHRIIFHQRPLKTQKHLVGACELEIGKRRAPWALLAAQGFRYLQLVNNLRIVDESTGEVIEIDDESREALVKHLETEGDLTFPKMRRILGLKRTVKFNLELGGEKRIPGNRTTAKLIAIFGFDGWQALSNRDRDTIVEDIRSIVKDETLKRRAMRVWDLGEEAADRLGKLRLEDGYCRYSQEALEKLLPLLKKGTPLQTAIKERFPERWERAAKPHDLLPPVNAGDLPELRNPIVERALTELRRVVNAIVKHYGKPAEIHIELARELRSTAKQRERIWRQMRANERARERAAQKILGEVGIENPKRSDILKILLAEECNWQCPYTGRQVTPTSLFGDEPQLDIEHIIPFDRCLDDSYMNKTLCQAEENRTVKHHQSPFEAYHTTNKWDEIIQRVSKFKGNARREKLRRFRMDKKGLREFIDGFTSRQLNDTRWAAKWAKRYLGLLYGGADADGIDASGKRRVQATTGPITAYLRNEWGLNAVLGNGPGKSRDDHRHHAVDAVIVALTAPRTVKQLNDAAKRTGQTGRRLFDRVEAPWPGFLTEVSDKVNAVVTSHRLSKRVRGPLHAETFYGKPRQDERGRQYVHQRIHIPDLKAKDVDMIVDPAVRQAIRKKVDDLGGDPARAFADRQNYPTLETPDGRPVPIRRVRVRRNMEAAFKVAQGVRTRFVQSSANHHMEIVAQLDEKGNEVKWEGHVVTMYESYRRLSAGEPVIRRQFGTNKRFKFSLACGEVIELDGLTADNARSLYVVRTVPQSRQIRFVPINDARKLAAIPKKGQTAYPETLRNRGCRKMLVAPLGEIQCACD

SEQ ID NO: 1760 - protein, 1044 aa, unidentified
  REGION 1..1044: note = Description of Unknown: Cas Enzyme sequence
MKYTLGLDLGYNSIGWAILENDENGSPIKLFNAGVHIFEPSIEDIEIDGKGKTKNVKRREARLRRRQLFRKTKRLEKLLNFFIQEGFFQNQKVLINDPFERAEFLYQLDKKSRNPYILRREALDNRLSLEEIARIFYHIAQHRGFKSTKRELAEMNKDEKKKKEDGIIQSEINTLKEEIKKNSCRTLGEYFAKLFENGEKIRGRHTDRKMYEEEFQKIFNKQKEFYPNIFTDEFKKKLYKLIFHQRELKSQKDKVGFCSLERGKKRAPLALLVSQRYRYMCKVNNLNVIDTETGENRELTVDEKKKLYEKLENSEKLSFKEIKKILNLSEKRYIFNLEKSEKYIIGNKTNVKMKNIIKDWDNFDEDKKNFFINEARTVVKIETLERRGKKLGLSDEESKEFSKVVFEDGYLNFSKKAVEKLLPYLKEGKKEYEAIKLAYPENSVQNDNLKELDFLPPIKSKELKKYFEVRNPIVEKALTETRYLVNFLIKKYGKPETIKIELARELKLSNKQKERKHKENQENRKKREEVIEKLKNDLKISEPTETQIQKYLLAEECDCKCPYTGRSISMDSLFGEHPLFDIEHIIPFDRSLDNSFLNKTLCYSEENRKVKHNKTPYEAYYGTEKWEAIIERVKKFKSNVRNEKLRRFQMTKEDVENYIQNFSTQNLNDTKYASKLAKKYLGLLYGSINEDGIDKNRKRRIFASSGKVTSTLRYALGLNTILNDENIKTREDHRHHAIDAITIALTDSSMIKKISDASKREKNINSLFKDFQAPWENFRKEVEEIIAKMNISIRINKKVSGQIHDETFYKKPFKEEEKSYTHQRINLEELTIKDEDKKKQSSKLIDNIVDSKIRNIIINSLNGEKPKIRFKDPKDHPYIIQKNGKKIQIHKVTIKTKLETYNEIGPEKAKRYVKSSDSHHIEIFEDLKTKKWDGYVVSLLEAYERKKKKLPIVNKNLGEGKKFLFSLAKGEIIELDTENGKRELFVVRIISASNNQIKFTRINDSRKITDIPATGLTACPSSLKKRNCKKVVINILGEKHYSND

SEQ ID NO: 1761 - protein, 1033 aa, unidentified
  REGION 1..1033: note = Description of Unknown: Cas Enzyme sequence
MAKKHEETVLGLDLGTGSVGWGLIEFDGEGPRRIIDAGVRIFDAGLDSLKVDGRGKSRNLERREARQIRRGLERRGRRMRNLARLLQRSGLLPKGNVTDSNDRHEFLKEFDATHDDPYSLRARAINERLELHELGRALYHLAQRRGFLSNRKSAPKKDEDAGQVKAAIKDLQSEVEDENAATLGVLFNRRLIRGERVRGQYTGRQMYLDEFDLIWASQARFHSDVLTESLRKHVHHTIFYQRRLKSQARFIGKCELEKGRQRAPMALLICQRFRYLQSLNNLRIIDTSTGELVEMDQKQRETVINALEYGGDLKFSSLRTTLGLKRTAKFNLERDGEKRLIGNRTSQKLATVFGEDRWRMMSDHQREQVVEDWYCIVKEETLKRRGVRYWELEEEAAEQLAHLRLDSDYSAYSRQALARIVPLLERGMPLQSAIKEVYPEHFDRTGKPLSQLPEVKCKQLPDLRNPVVTRTLSEMRRVVNAIINRYGRPDVIRIELARELRQSSRQRQATTKRIRENQSKREAAAQAILEEAKIPNPSRRDIEKYLLAEECNWTCPYTGKRIGMDSLFGAQPQFDIEHIIPFSRSLDNSFVNKTISDVHENRRVKGNRTPHEAYAETSGWPQILERVRQFRGRLASAKLRRFKMDRKQLDSHIAEFSNRHLNDTRWAARSAKRYLGLLYGGVNDDGIDASRRRRVHAVCGPVTAYIRQTHGLNTVLGTGDTKSRDDHRHHAVDALIVALTGPGVIKKLSDAAARAAVDSGRLFKDMPLPWATFHTDVEAVVNSIVPSHRISRRVRGALHKDTFYGVPRTGKDGHTFVTARKALQNLTPAEVDKILDPTIRDLVAETLSRLGKPPNQAFADENNLPVIRSQDGSETRVRRVRIRARLTSPQNVDSTHAPRYVDFGNNHHMAMYETTDDDGSIKWEAEVVSLYEAYRRKRSKEPVVHQESTERRRFLFSLSGGEIIELTRNGVANLFVVRSIEATGNIRFAPVKDARTLKEIGKKGLTALPEPLRKQGCRKMVVTPLGEVRTDNS

SEQ ID NO: 1762 - protein, 1072 aa, unidentified
  REGION 1..1072: note = Description of Unknown: Cas Enzyme sequence
MGNSQKDSPLILGLDVGANSVGWALLSAAKHPRDKRLVPTGLVACGVRVFEAGVEGNLEGGRDDPRGVTRRQARAMRRLLDRRARRCDKLFRLLQGAGLLPPGGPPRASSPPDTATRCRLRAARAKARAELLNKLDSQLRKGLHAKLRAEGVEEGILERLPQTLPYLLRARALDHPLEPYELGRALYHLGQRRGFMSNRKAPVKDKKEESAVKEGIARIREEMREAGARTLGEYFAGIDPEDRRIRGRWTARDMYEDEFERIWSVQERHHPNILTPQLKERIHRAIFFQRPLKIRKEFIGACAHEPKRKRAPIALLEAQRFRLIEQVNNTRIQMPDGTVVPLSPDQRTKLVEALETKGDLTFSKAKKLLGLHPHAQFNFERGEEKRFVGNRTAAALAKVCGDRWTELAPDDKKRLVEDLRSIQKPETLACRARRVWGLGPDQAARLAELRLEDGYCRLSRQAIAKLLPLMEQGLTYQEAVGKVYGHAAPTATVPLLPPVAEALPELRNPAVSRALTELRKVVNAIIREYGRPDIVRIELARDLRRSRKQRARAARKMARYRKQREDAERRLRELGVQNPTRADIEKVLLWDECGGICPYTGKSISFASLFGAQPQFDVEHIIPRSRSLDNSFFNKTLCEINENRTRKRNRTPREAYASDPDRWNEIIQRVKKFQGDAAREKLRRFQEEPDFDDFVARQLNDTRNASRLAAKYLALLYGPQARSRVQVTRGGVTRYLRDVWDLNTILGDGPSKSRDDHRHHAVDAIAIALTERATIKMLSEAAEKVERTGRSGFAPVPPPWPDFLDEVRAAVRDINVSHRVSRKVSGPLHAETFYSPNHTDPDGNPCVHVRKPLASLSTEEVQQIVDPAVREAVEAKLAQLGVRKPEQAFADPANHPFLRRRNGTPTQVHRVRIRKRLATFPVGTGHRQRHVVSKVNHHVEIVETRDEKGNPRWEGHLVNLFEAYQRHYKERLPVVRRDHGPDKKFLFSLAPSESVMVTDEDGDHLWRVICISQDKSGRVQFEFRLHTDARPMKELRQTKGARIRKSPDALRKLNARKVLVDPLGRIRRVGHD

SEQ ID NO: 1763 - protein, 1077 aa, unidentified
  REGION 1..1077: note = Description of Unknown: Cas Enzyme sequence
MADPGLLKYVLGLDIGANSIGWALLTARGDERLTPTGIVQTGVRIFEAGVEGDLERGREESRGIQRRLARQARRRLDRTARRLAKVFGLLQDAGLLPRADTPASLPGVGVPREHMTARERRDERLRASAERDALLAQLDRELVAQCQDGLRAAGASQGEIWLVPHRLPYLLRARALDNKLPAHQLGRALYHLAQRRGFLSNRKAAPKKDEDQGVVDQGIQKIVAGMRETGARTLGEYFSRLDPTGERIRGRWTSRAMYQDEFDAIWAAQAPHHPEILTADLRKRLKRAIFYQRPLKVQKELIGECEFEKGRKRAPMALLVAQRFRLLQQVNNTRILTPDAVERGLTAEEAGKLIDALDTLGDITFKKAKRLLGLSQQHVFKFESGGEDKFIGNRTATKLIRVFGLDRWKTLKPSDRDRIVDDLLTIQKPETLARRAQRVWGLSPEAARELARTSLEDTHCRLSRLAIKNLLPLMETGMPYMTAARQVYGEKPAEPPRDSLPAVSEALPALRNPAVHRALTELRKVVNAIVRTYGKPAAIRIELARDLRKSPKQREQTWKKNRDNEALRKDAAEKLFREMGIQNPKRSDIEKMLLLQECGCMCPYTGKHISMRDLFGDAPQFDVEHIVPFSRSLDDSFLNKTLCEVAENRNVKGNRTPWEAYGHDLVRWNQILQRVSHFQGSAQREKLRRFQLQTIESPEQFASSQLNDTRYAAVEAMDFLKLLYGEEAQRKVIVQAARGGTTRFLREEFGLNQILGDGGEKSRDDHRHHAVDAICVALTDPATVKMLSDAAARALSEGRRRFASVPFPWGRFLDDVRASIQGINVSFRVSRKVGGALHEATFYSPPKKDPKTGQEHVHVRKPVTALSEQRVGNIVDPVVRAAVQAKLKEVGGDVRKLADNPPTLRAKDGREIPIRKVRLRESITPFGIGQGGARQVVTDTNHHVEIVQVPGKAGQPKWEGCVVSQYEALRRLRAKEPVVRRDHGNGRTFVFSLALGETVQMKGDDGQLALFKVAGVSQTGRGQIMLEFRRNADARPATVLRKIKGGRVFRTPDSLRSAMGTKVLLTPLGELRRVGRD

SEQ ID NO: 1764 - protein, 1061 aa, unidentified
  REGION 1..1061: note = Description of Unknown: Cas Enzyme sequence
MTEQNSTSEHYILGLDIGANSIGWALLRARPDGESGRLKPVGIERIGSRIFSAGVLEERGGEFARGKEESLAAQRREKRAARRNHHRTVIRLRDLFLLIRGAGLLPSTEAPADFAELDKKLVRKWQAVRASEGATKEELELVPHVLPYLLRARALDQRLEPEEIGRALYHLGQRRGFLSNRKSPAKKKEEEGPVKEGISELEKQIEQSSARTLGEYFSKLNPHVARIRGKYTSRKMFEDEFEKIWLAQAPHYPAILTDDLKEKVCHALFFQRPLKSQKHLIGECEFEPGRKRAPLAILPAQRFRYLQKINDTLVREPHGSERSLTPEERDILLGLLENKGDLAFKKAYKELHLPEWHRFNFDAGGEDKFVGNRTAKKLLDIFGTKWADFSDVEKDQVVQDVLTIEKEDDLKRRGRDDYGLDDEAAEKFSRIELEPGYCRLSRQALAKLLPLMEQRTAYATAVKQVYGERPKPEPVLELPPLDEAVPSLRNPAVHRALTEVRKVVNSVIREYGKPEVVRIELARDLKKPRKDREAIWKKNRANEKARGAAAERMAKEAGIREPRRNDILKVLLAEECNWECPYTGRSISIGSLFGEHPQFDIEHIVPFDRCLDDSFANKTLCYAEENRNVKRGHTPSEVYGGTPKWDEIIGRVKRFKSDMARAKLERFQLQTLRSLADFAESQLNDTKYASRLATELLGTLYGAVVDDSGKRRVFASRGQVTAYLRWRWNLNTILGDPESNTKERADHRHHAIDAVAIAMTDPGTVKALSDAAQRAQAENRRLFGKLVEPWPGFLDDVRKTVDGIVVSHRVSRKVNGPLHEETNYGPGRAKDENGNPVKVRIRKRLDALTKPELDEIVDKEVGALVRIKLKELGEEDPKKAFKDPKNHPSLIAKDGRKIPIHKVRIEKAESTFRVGEGLRARWVMTKENHHVEIVEVKDKKGNPKWEGFVVNRFEAMRRLKAREAIVRRDHGEGKRFVFTLVPGDTIELDGENGVRVYYRVRSVVQLPTTVRIDFVGASDARLKKDTIAAGGFYPRTIETLRKAHCQKVVVDPLGNVRRAND

SEQ ID NO: 1765 - protein, 1027 aa, unidentified
  REGION 1..1027: note = Description of Unknown: Cas Enzyme sequence
  MOD_RES 307..314: note = Any amino acid
MGETILGLDLGANSLGWALLNKNEEGEYAGIIASGVRIFEAGMDGDIASGKAESRAVNRRLKRQVRRMLARRRRRMLRIKHLLQRHGFLPQVEDLGKEFAAFDAALIQKFRDSGAADLPPVDILPHTLPYYLRGRALDRPLTPHEFGRAIYHLSQRRGFLSNRRTPRGQEDGQVKQGIAELQQKMTAAHARTLGEYFAQINPEQEKLRRQWTAREMFVTEFNLICDAQQALFTPDFRKELEYVIFHQRPLRSAAGLVGRCQLENRRRCSWSRPEAQEFRLLQSLNNLQILVPDQGARELAPAERQLXXXXXXXXKGCTFSVEAGGEKYLPGHAINARLVAILGDRWARMPESGQEMFLDDMRSFEKEAAFRKRLEVFWQLPSELAAAVAEELLPDGYCALSRPALLKLLPEMRNAVPYMTAVKKLYPEQFSSGGVALPLLPAADEIVSDLRNPAVHRALSETRKTVNAVIRRYGKPDLIRLELARELKTTDEQKKNAIARMRAAETAREKAKQRIVAETPISNPSSDDILKMLLAEECNWLCPYTGKAISMHSLLVESQFDIEHIIPFSRSLDNSFANKTLCYHDENRHGKGNRTPFEAYAADTGNYRRILADVGRFQGPAAAEKLRRFKLDNTDEFEDFTSRQLNDSRYAAKLSRLYLGSLYGGVVDNAGRMRVQTMTGGITSNIRIALGLNRIIGNGEKNRGDHRHHAVDAVAIALTGPDTVKMFADFFKDPTRSRWEHFRVSFKEALKLPAWPSHYEAVRASIREIIVSHGVGRKARGPFHQETLYSRNFRHKDAQGKAVEVKHIRKPLAALSADNVAQIVDPAVRDAVAAKLVELGIKDPAKAFAAIVNLPVLPRRDDRPGTVIRYAKIAAAQETRRIGRGDRAREVVTGNNHHMEIYAVLDAQGNEIRWEGEVVSLFDARQRLKRGEPLVRRDFGPDRRFKFSLCCGDIIQVKDITGCPVLRIVRTVPQSRQLMFVDLKDARMQKEIKEAKQWYSSMPDGLRKMQTEKFTVTPIGELRRAHD

SEQ ID NO: 1766 - protein, 1046 aa, unidentified
  REGION 1..1046: note = Description of Unknown: Cas Enzyme sequence
MNSNTVLGLDIGTNSLGWALFKQNKNGQIANFIDIGSRIFEAGMDGDISSGNAESKAKKRRDKRSIRRSIARRRRRMEKLKKALLQNNLLPDSTCFNESIEKLDKELLEKYSVETKTQMPSKETLSHTLPFYIRARALDKRLTPHELGRALYHLAQRRGFQSNRKETANEDEGVVKQGISELRKKIKEAGVRTLGEYFAYIDPTRERIRGLWTSRDMYIDEFNKICDAQTDLINPELRKYVYNSIFFQRKLKNQKNLVGACILEPGRKRCPWYRPEAQTFRLLQSINNLRVKLPNEPERELSSEEWPQLRDALEGASGKLDKNGNLTFTKAKTLLSLPRGSKFSIEEGGEKSLKGNVINAKLYGIFGERWKNFSEAEKEAILMDIHSYEKDSSLVLRAQNAWGLSEAEAKGFAAVRLPEEYCSLSLRAILKLLPDMEEGLSYSEAVKKHYPEQFKADSEIFDLLPQVSEFSDDLRNPAVHRCLSETRKIVNSIIAIYGKPDLIRIEVARDLKKSNKEKKNLIRKNRENEKQREAAKRKIFNELKIENPSRDDILKVVLAEECSWKCPYTQKCISINSLLTEPQFDIEHIIPFSRCLDDSFVNKTLCYHEENRNVKRNMTPYEAYCGDADKYDRILLSVKGFNGRLADEKLRRFKLADISEFEDFSSRQLNDTRFAAKSAMKYLGLLYGGVYDAQGKRRVQALSGGITALIRSGLGLNDILGDGIKNRDDHRHHAVDAVAIAVTSPKTVRTLTNFLKNMEKRQSDIFKLKIKDSLTFDCWPEFKQDCSKAVGDIIVSHYVSKKVKGPLHEETIYSKPHIEKDQKGKNVEFKYVRKQLVDLEMKNVYEIVDHAVRKAVLGKLEELGEKSPKKAFSKPENIPVLKNGHPVKRVKIRKKQETETVGKKDSARNVVLGNNHHMEIVAILDNEEKEIKWEGYVVSMLEARKRLKSGKLLVRKDFGTGKVFKFSLACGDIIKLTEEDGSEVFRVIRTVPQSKQLCFVALNDARKQADIKAAGEWYSAMPNSLLKKSCKKYTVTPLGVIRRAND

SEQ ID NO: 1767 - protein, 1028 aa, unidentified
  REGION 1..1028: note = Description of Unknown: Cas Enzyme sequence
MKNKTVLGFDIGSNSIGWAIVSIGSDGQPEEVVNMGVRIFDAGIQEGTATGAAGPKNRERREARLRRRQYARRRRRKIKLLNILKRSGLFPETDEVAEIIKEMDKQIYLRYRDEVEDTRRLAHSVQYFLRSRALDFKLDKFELGRAIYHLNQRRGFLSNRKTQAKENEGVVKKDISALWREIKESGCRTLGEYLSKLDPEEQRVRARYTHRQMFVDEFNAIWDAQRELGHSQLTDDLKKDIERTIFYQRKLKSVKRRIGKCVLEPEEKRCPWYRFEAQRFRILQNINNLKLIDEDGVERQLTENERAKLIELLEDKEKVTFTEAKKALGLKPRSCRFTIEGGGEKNIRGNRTNAALKDIFGNRWENFTKDQEEQILEDLRSYRKEWALAKRAQSVWQLNEEKAEEFSKIRLEEGYCNLSLQAIRKITPFLEAGKTYPEAVKEVYGSFKLSTPVHDNLPTVDDVIGDLRNPVVHRCLTEVRHCLNPILKRYGKPDLINVELARDVKSTRKEKEQRTKNMRDNERARQNAAAKILKETGISDPSRDDVLKALLAEECNWTCPYTRKSIGWEGLFGPSPEFDIEHIIPLSRSLDDSFINKTLCFHQENVHVKKNRTPYEAYGNDKERYEAIIQSVKRFRGSARSEKLRRFLLTDTSEFENFSARHLNDTRYASKETVKFISRLYGGISDASGKQKIQTVKGLITALMRNYLGLNSILGEGGKTREDHRHHVIDALVVAITSPLIIKRLSTYAGRYGHLGRISFGKESPLGEEVLKQVRDNVERIIPVHRYSKKVRGPLHEETLYGLGVEQGVAHIRRPLVGMKESEVSKIADSTIRRLVNEKLDELGESDPKKAFAKPGNRPVITSRDGRVRTINSARIKTKLATFPVGAGDKKRNVKGGSNHHIEIVAVLDDSGKETEWEGHVVSLFEAYQRKKMKEPVVRREFGEGRRFKFSLAWGELVEMEIEKGKREIFVVRTVFKPMAFARVNDARMKKDIQAAKDWITKLPNPLRAAKCSKVFLTPFGEVRYAND

SEQ ID NO: 1768 - protein, 996 aa, unidentified
  REGION 1..996: note = Description of Unknown: Cas Enzyme sequence
LKLNGWGSRIFLPGMDDDIEQGKGVSRCAERRLKRALRIQYRRRRKRKDDLISVLQENGLLPDPLTPAFFTSVDEKFLRPLSKTDRKTLGHVIPYLLRKKALDQPLSRDELGRAIYHLAQRRGYLSNRKQDLKNEEESGAVKAGIDQLKKEMSAAGARTLGEYFCQVNPEEARIRTRYTDRAMYQEEFRKICQAQRALISEELEKQLFNVIFYQRKLKSCKNLIGACSVYPEEKRCSYACEEAQLFRIYTNLNHLRVEKAQQIRSLTEEEHDRVLAVLNGFSDLLTRKGTITLKNLAKAVNLPKGAKFTLSDEEKEIYGNVLHAALFQVFGPRAEKLPPDEREKFFNDLKSIEKPEVLKHRLTGYWQLSAEKAELAEKIALPDDYCAFSLKALKEILTELEAGIPLSTIRKVIFPQQPGVALDSLPILDSDETALDLRNPVVHRVLTELRFVINTIIARYGKPDRIRIELARDLKSTNKERERRTFEMRKREKERAAIAAKITQEAGIEKPSRNDILKVMLAEECGYECPYTGRHFSMKDLLHGKDIHIEHIIPYSRSFDDSFRNKTLCLAAANAAKNNHTPFEAFSGTEYQNILQRVAHFNGPYAEAKLALFKLEKVDPQEFLERNLNDTRYASRLAMQYLGMLYGGTTDKAGKQRIFATSGGCTAMIRRAWGGNYLLGEGEKVRDDHRHHAIDALTIALTTPERVKMIAGMMPEYRKKLQDCKPLIDNDAYSQALAMLDQSAVSHHVVNKIRGAFHKETIYGKNYGNDIRHKRVKLNELTVKDIPDIVDPAVKALVLQRTGCNEDQLGVLTDKDLQKLLDVSNPLVFKDKNGAPVNVIKAVRVKQRVSARTIGSGDSVREVANGSNYLLAIFAKLDADGNETGWEGEIVTLMDARYRLLHHQPLFERNRPGMKFKFTLKKGDIVTFVKDGVERLCIIRGVSLPTFYCCPVRDARMQRELKAAKVWFWPTPSAAFQWKMTKYTMNLFGELRRAND

SEQ ID NO: 1769 - protein, 1028 aa, unidentified
  REGION 1..1028: note = Description of Unknown: Cas Enzyme sequence
MTNKTVLGLDIGSNSIGWALVNIGSEGQPEGIMDMGVRIFDAGIQEDTPTGTAGPKNRERREARLRRRLYDRRRRRKRKLLNVLKRSNLFPETDEIAESIKKMDEQTYFRYKNEVEDARKLAHSIPYFLRARALDHKLDRFELGRAIYHLGQRRGFLSNRKAQAKEDEGVVKAAISTLRREIEESGSRTLGEYLSKLDPEEQRLRARYTHRQMFIDEFNEIWQAQRGFGHSELTDSLKKEMEKAIFFQRKLKSAKHLIGSCALEPEEKRCPWYRFEAQRFRVLQNVNNLRLIDQDGVERQLTESERTKLIELLEEKDKVTFTEAKKALGLKPRSCRFSIESGGEKQMRGNRTNAALKSVFGKRWDSLAGEQKEKILLDLHSFKKEWALAKRARKVWELNEEEAEKFSKIRLEEGYCNLSLKAIRKITPLLEAGKAYAEAAKEVYGSFKLDKPVVESLPPVDGEIDDLRNPVVHRCLTELRHCLNPILKRYGKPDSIHVELARDVKSSRQEKKRRTDKMRDNERARQAAAAKILQKTGISDPSRNDVLKVLLAEECNWTCPYTQKSIDWAGLFGSSPEYDIEHIVPFSVSLDDSFINKTLCFHQENVHIKKNRTPYEAYGNDKEKYEAIIQSVKRFRGSARGEKLRRFLLTDTSEFENFSARHLNDTRYASKETVNFLSLLYGGISDESGKLKIQTVKGQITALLRNYLGLNSIFGEGGKTRNDHRHHAIDALVVAITSPLAIKRLSTYAGRYGHLGRIPFGEESTLGEEVMQQVRDKIDGITPVHRYSKKVRGALHEETLYGLGADKGTANIRRPLENMKQSEVDKIADNTIQRLVRDKLAELGESDPQKAFKKPENRPVITTREGRERKINSARIKTKLATFPIGAGDKQRYVKGGSNHHIEIVALLDDSGNETEWEGHVVSLFEAYQRKKNKQPVVQRDFGAGKKFKFSLAWGELVEMEIEKGKREIFVLRSVYQQMAFARATDARMKKDIMAAGDWVTKYPNTLRAAKCRKVFLTPFGEVRYAND

SEQ ID NO: 1770 - protein, 1053 aa, unidentified
  REGION 1..1053: note = Description of Unknown: Cas Enzyme sequence
MNSRGTPWRLGLDIGSSSVGWAALELDMAGDPKGILGLGTRIFSAGVDGDIETGKDESRSVARRGARMQRRQLDRRARRMRNVFNELRRCGLLPGAGHAESEEIHQALEVLDRELAESWITTGDHRAAQLLPYLLRAAAADRHLTPREVGRALYHLAQRRGFASNRKESVKQTDEKELGPVKEGIKTLEALLAGQTLGQYFSTLDPHEHRIRSRWTSRQMYRNEFDRIRTSQEGGPAALDKDAWARIERAIFHQRPLKSQKGKVGRCEFMIGERRAPKWLPEFQRFRMLSVVNNLRVRTPVEEGAALTPETRRGFSERALTSGERAEVLALLDASASVRLTSLRTKLKLKGTTFNLEEGGEKEIRGNVTGARLRGVFGQRWDAMGDGDRTRVITDVLSMEQDRALERRARETWGLEDDAVAAFVALRLEEGYATLSRLALSRLLPHLEAGLSVQEARQREFPGHFVAGDRAGSLPPVRKSLFHLRNPTVERSLTETRRIVNELIRAYGIPEQVHIELARDIKKSRKDRQDLAKANRNRQGERESAAERLRELGLANPSRADIERALLHEECGGKCPYTGRSIALAELFSKSSPWDVEHIIPFSRSLDDSFANKTLCLAEENRNGKRNRTPFEAYSGDSDRYAQILSRVGQFQGKDARRKLDRFRVKDLGDDLRDEFCSRQLNDTRYASRLACGYLEELYGGASDEDGVRRVFASAGQVTAIVRRELGIEGMLGSPTDGRKNRDDHRHHGLDALAIALTSPGMVKRLADAAEGARSAGRRRFAALPAPWVTFSDEAIARAAEMVVSHRGSRTIRGELHEATNYSRPIGGDPTVRHVRKLVSSFALGGDVEDIVDPAVRQAVQAHIAVRGGDKRCLANSNDPPRLPGKEGAPGTPIRRVRIRAARGSVVPVGVGARQRFVAPGSNHHMAIVALLGPDGNPVKWEGHVVTRLEAARRAARGEPVIQRDWGPGHRFCFSLASGDMVRMALDGCESVFLVRGVSGERLTLAQSTDARPVTLVRKLKQEFKPSVATCMAKFGLRRITVSPSGVITPSNA

SEQ ID NO: 1771 - protein, 1089 aa, unidentified
  REGION 1..1089: note = Description of Unknown: Cas Enzyme sequence
LTSATVNYRVGIDVGSYSIGMAAIAIDDDGKPTEILSAISLIHDSGVDPDSTKSAATRLATSGIARRTRRLYRRKRKRLAKLDKFISSQGWPLKEFEEYEDPFYPWRVRAELATTPITDKQELGEKLSIVLRHITRHRGWRNPYSKVTALYAVAEPSDALVSIQEQCATELGRPIPPTTTVGQLIASMNLGKTRLRGEDSLLAARPRQSDNANEIHTIAKVQGLSNELVKQIIDHVFAAESPKGSAAERVGKDPLQPTKKRALKASDAFQRYRIAALIGNLRIRGGKGNRRLTTEETRLVFDYLRSLPAKQEPTWQLVAEQLKIDRGNLVGTAIMTDDGERAGARPPVHETNRLMESTKIKPLATWWKSADADARAAMVKALSNAEVDDFDSQAGAQVQEFFFGISDEEQEKLDGLHLPIGRAAYSEDTLDRLTKRMVDEGMDLYEARQAEFKIPNDWAPPAPEIGEQVGNPAVDRVLKATARWLNAAERQWGAPKSVNIEHVRAAFMSKSSAWELDRDNQHRAKRNVKVVAEMQEKLGIEGRPSRADVWRFQSIQRQNGKCAYCEAQISFKNSEMDHIVPQAGEGSTNTRDNLVAVCRECNSSKSNIAFAVWAENTSRPGVSVKEAVERTRHWVTDSGLRKPEFDKFRKQVCDRLRRKATDEPIDARSLESVAWMANELRSRIAQKFKDGDTKVRVYKGALTAEARRASGISGKLEFVDGKGKSRLDRRHHAVDAAVVAFTSNYVAETLALRSNMKFDQELRRKAPQWREFTGSDHVHQVEWTKWKYRMQALVELLNNALAQDRIVVMHNLRLRLGNGATHEDTIGKLTRIKVGDAISTTDIDRASSEALWCALTRDPDFDPKTGLPENPDRTIRIHGTHLTASDEITVFPAAAASIPIRDGFAKLGSNYHHVRLFRVPNGKKYKYCLMQVYAVDLLKFRKEDLFTVELKPQTISVRTCEAPLRKALANGTAEYLGWLVSDDELFVNISSFDTPGIVKLQEAYGLVNRWRLAGFNSNTQMVLRPLYLSKEGLKPDVDPEIKKIIDNRGWFVTVNKLFSTGHVTVVRRDALGRPRFHSAAHLPICWEVK

SEQ ID NO: 1772 - protein, 1113 aa, unidentified
  REGION 1..1113: note = Description of Unknown: Cas Enzyme sequence
LTSANVNYRVGIDVGSYSIGMAAIAIDDDGKPTEILSAISLIHDSGVDPDSAKSAATRLATSGVARRTRRLYRRKRKRLAKLDKFISSQGWPLKEFEEYEDLFYPWRVRAELATTPITDKQELGEKLSIALRHIARHRGWRNPYSKVTALYAVTEPSDAYLAMQGECVKKLGRSIPKTITVGQLVASMNLGKTRLRGKEKPPNKANPHGKEAGLFTANKLQQSDYANEIHTITKVQGLSNELVKQIIDHVFAAESPKGSAAERVGKDPLQPTKKRALKASDVFQRYRIAALIGNLRIRDGKENRRLTAEDTKLVFDYLRSMPAKQEPTWQLVAEQLKIDRGNLVGTAIMTDDGERAGAKPPVHETNRLMESTKIKPLAAWWKAADADARAAMVKALSNAEVDDFDSQAGAQVQEFFFSISDKDHEELDKLHLPIGRAAYSEDTLVRLTKRIIDEGMDLYEARQAEFKIPNDWAPPAPEIGEQVGNPAVDRVLKATARWLNAAERQWGTPKSVNIEHVRDAFMSESSARKLDQDNQRRAKRNEEIVAKMQEILGIEGRPSRADVWRFQSVERQNCQCAYCGTQISYKNSEMDHIVPRAGEGSTNTRDNLVAVCRECNSSKSNIAFAVWAENTSRPGVSVQKAVERTRHWVTDAGLRESEFKKFRKQVCDRLRRKATDEPIDARSLESVAWMANELRSRITQKFKDGDTKVRVYNGTLTAKARRASGISGKLEFVDGKGKSRLDRRHHVVDAAVVAFMSNYVAETLALRSNMKFDYELRSGKKSKQKLEHKKPKYKTFTGPTPAHQTEWVKWNIRMQALAELLNNALAQDRIVVMHNLRLRLGNGAAHEDTIGKLTRIKVGDAISTTDIDRASSEALWCALTRDPDFDPKTGLPENPNRTIRIHGTHLTASDEITVFPVTAASIPIRDGFAKLGSNYHHVRLFRVPNGKKYKYCLMQVYTVDLLKFRKEDLFTVELKPQTISVRTCEAPLRKALANGTAEYLGWLVSDDELFVNISSFDTPGIVKLREEYGPVNRWRLAGFNSNTQMVLRPLYLSKEGLKPDVDPEIKKIIDNRGWFITVNKLFSTGHVTVVRRDALGRPRLHSAAHLPICWEVK

SEQ ID NO: 1773 - protein, 1089 aa, unidentified
  REGION 1..1089: note = Description of Unknown: Cas Enzyme sequence
LTSATVNYRVGIDVGSYSIGMAAIAIDDDGKPTEILSAISLIHDSGVDPDSAKSAATRLATSGVARRTRRLYRRKRKRLAKLDKFISSQGWPLKEFEEYEDPFYPWRVRAELATTPITDKQELGEKLSIALRHIARHRGWRNPYSKVTALYTVTEPSDALVSIQEQCATELGRPIPPTTTVGQLIASMNLGKTRLRGEDSLLAARPRQSDNANEIHAIAKVQGLSNELVKQIIDHVFAAESPKGSAAERVGKDPLQPTKKRALKASDAFQRYRIAALIGNLRIRDGKKNRRLTTEETRLVFDYLRSLPAKQEPTWQLVAEQLKIDRGNLVGTAIMTDDGERAGAKPPVHETNRLMESTKIKPLAAWWKSADANARAAMVKALSNAEVDDFDSQAGAQVQEFFFGISDEDQEKLDGLHLPIGRAAYSENTLVRLTKRMVDEGMDLYKARQAEFKIPNDWTPPAPEIGERVGNPAVDRVLKATARWLNAAERQWGAPKSVNIEHVRDAFMSESSARELDRDNQQRAKRNVKVVAEMQEKLGIEGRPSRADVWRFQSIQRQNGKCAYCGAQISYKNSEMDHIVPQAGEGSTNTRDNLVAVCRECNSSKSNIAFAVWAEKTSRPGVSVQKAVERTRHWVTDSGLRKPEFDKFRKQVCDRLRRKATDEPIDARSLESVAWMANELRSRIAQKFKDGDTKVRVYKGALTAEARRASGISGKLEFVDGKGKSRLDRRHHAVDAAVVAFTSNYVAETLALRSNMKFDQELRRKAPQWREFTGSDHVHQVEWTKWKYRMQALVELLNNALAQDRIVVMHNLRLRLGNGAAHEDTIGKLTRIKVGDAISTTDIDRASSEALWCALTRHPDFDPKTGLPENPNRTIRIHGTHLTASDEITVFPVAAASVPIRDGFAKLGSNYHHVRLFRVPSGKKYKYCLMQVYTVDLLKFRKEDLFTVELKPQTISVRTCEAPLRKALANGTAEYLGWLVSDDELLIDTSSFDAPGIVKLREEYGPVNRWRLAGLNSVSRMKLRPLYLSKEGLKPDVDPEIKKIVDDRTWIIAVHKLFNTGHVKIIRRDALGRPRLYSATHLPTCWEVK

SEQ ID NO: 1774 - protein, 1099 aa, unidentified
  REGION 1..1099: note = Description of Unknown: Cas Enzyme sequence
LTSANVNYRVGIDVGSYSIGMAAIAIDDDGKPTKILSAISLIHDSGVDPDSAKSADSRLKTSGIARRTRRLYRRKRKRLAKLDKFISSQGWPLTEFEEYEDPFYPWRVRAELATTPITDQQELGEKLSIALRHIARHRGWRNPYSKVTALYAVAEPSDALVSIQEQCATELGRPIPPTTTVGQLVASMNLGKTRLRGEDSLLAARPRQSDNANEIHAIARVQGLSNELVKQIIDHVFAAESPKGSAAERVGKDPLQPTKKRALKASDAFQRYRIAALIGNLRIRDGKENRRLTAEDTRLVFDYLRSLPAKQEPTWQLVAEQLKIDRGNLVGTATMTDDGERAGARPPVHETNRLMESTKIKPLAVWWKSADTDARAAMVKALSNAEVDDFDSQAGAQVQEFFFGISDKDHEELDKLHLPIGRAAYSEDTLDRLTKRMIGEGMDLYEARQAEFKIPNDWAPPAPEIGERVGNPAVDRVLKATARWLNAAERQWGAPKSVNIEHVRDAFMSESSARELDRDNQQRAKRNVKVVAEMQEKLGIEGRPSRADVWRFQSIQRQNGKCAYCEAQISFKNSEMDHIVPQAGEGSTNTRDNLVAVCHECNSSKSNIAFAVWAENTSRPGVSVQKAVEQTRHWVTDSGLRESEFKKFRKQVCDRLQRKATDEPIDARSLESVAWMANELRSRIAQKFKDGDTKVRVYKGTLTAEARRASGISGKLEFVDGKGKSRLDRRHHAVDAAVVAFTSNYVAETLALRSNMKFDYELQSSEKSKQKLEHKKPKYKTFTGPTPTHQAEWVKWKDRMQALAELLNYALTQDHIVVMHNLRLRLGNGAAHEDTIGKLTRLKVGDAISTTDIDRASSEALWCALTRDPDFDPKTGLPENPNRTIRIHGTHFAASAEITVFPEAAASIPIQDGFAKLGKNYHHVRLFRVPNGKKYKYCLMQVYTVDLLKFRKEDLFTVELKPQTISVRTCEAPLRKALANGTAEYLGWLVIDDELLIDTSSFDTSGIVRLREEYGQVNRWRLAGFNSITQMILRPLYLSKEGLKPDVDPEIKKIIDNRGWLVTVNKLFSTSHVKIIRRDALGRPRLYSAAHLPICWEVK

SEQ ID NO: 1775 - protein, 1099 aa, unidentified
  REGION 1..1099: note = Description of Unknown: Cas Enzyme sequence
VSVPYRVGIDVGTFSLGCSAIEIDENDQPVRILSAVSLIHDSGLDPDQQKRAVTRLASSGVARRTRRLYRRRRHRIIKLEKFLKEQGWETLPFERYSDPYFPWKARVALVNGYVEDPTQRDRYLSVALRHIANHRGWRNPYWKVSSLYSPGGPSEAFEQVRAELESATGHEIPTDSTVGQLISFAQFGKDRLRGGGKQKDKNKPQSEVKQAVISARLHQIDHAREINEICRVQRIDDSLRKRILDLVFAAESPKGAQLGRVGKDPLQPRLDRALKATDAFQRYRIAALTGNLRIQRDGHNERLTHEERLIVFNYLVNLDHKTEASWLGIADILHIDRGQLRGTATMTDDGERAGAKPPVHDTNRTIFGCKVKPLSQWWEGASDDERAAMLKSLSNADVEDPDSPAGAQVHAFFAELDETEHEKLDALHLPIGRAAYSENTLTRLTTRMLDDNVDLYEARLAEFNIDKDWVPPAPRIGEPVGNPAVDRVLKGVARWLEAAADEWGAPKSVVIEHVRDGFVSKAKANEIDRENNARHRRNRKLFQEMQEKLGIDGPVRSSELWRFQSVQRQNCQCAYCGSPITYSTCEMDHIVPRAGEGSTNTRDNLVAVCHRCNLSKKNIPFAAWASKTNIPGVSVKEALERTRHWSEDAGMSAKDFKKFRKSVSDRLKRTTVDEPIDARSMESVAWMANELRGRVAQRFSGQDTKVNVYRGALTAEARRAAGISNKLRFIDGPGKSRLDRRHHSIDAAVVAFTQNYVAETLAIRSNKKREAQLLQAAPQWKEFTGADEAHRSAWNAWLPKMQKLAVLLQAALDEDRIVVTSNIRLRLGNGRAHEDTIGELKKLRVGEAISATDIDRAATEALWCALTREEDFDEKKGLPANPQRRIRVNGTWFEAEDEIEIFPVGAGAIKLRGGYAKLSRFHHARIFKIPGKKKPTYCMLRVYTTDLNKHRHEDLFAVDLKPQTMSVRQAEPKLRKALAAGTAEYLGWIVVDDELIVDTSQFATGQISEMQSEFGQVKRWRVDGFDSNSKLRLRPLQFSAEGLSESVSEGSRKIIDMPGWRSAINKLFSEGKVTVIRRDSLGRVRLNSAAHLPITWKAE

SEQ ID NO: 1776 - protein, 1099 aa, unidentified
  REGION 1..1099: note = Description of Unknown: Cas Enzyme sequence
MPVNYRVGIDVGTHSFGCAAIEVDDNDQPIQILSAVSLIHDSGIDPDQNKSATTRLATSGVARRTRRLYRRRRHRIIKLEKFLRSQGWKTKEFEHYSDPYLPWKTRVALVNGFIADETQRGEYLSIALRHIANHRGWRNPYWKVSSLYSPDAPSDAFEEIRKELESKTKRKIPHDVTVGQLISFAQFGQDRLRGGGKKKDENKSAGEFKQAVISARLHQIDHAREINEICRVQKINDTLRKQILDLVFAAESPKGAQSGRVGKDPLQPGKYRALKASDAFQRYRIAALIGNLRILHEGATRRLYDNERHIVFEYLVNLAPKTEPSWLEVADLLNIDRGQLRGTATMTDDGERAGAKPPVHDTNRTILGCKVKPLAQWWKNASDVERAAMLKALSNAEVDDFDSPAGAQVQAFFAELDEKEQEKLDSLHLPMGRAAYSEDTLVRLTKRMNQENLDLYDARRAEFGITEDWAPPAPRIGEPVGNPAVDRVLKGVARWLEAAADEWGAPKSVVIEHVRDGFISESKAREIDRENDKRHKHNEKLFREMEERLGIEGKPRSADLWRFQSIQRQNCQCAYCGSPITYANCEMDHIVPRAGEGSTNTRDNLVAVCHRCNLSKSNIPFAVWAQKVSIPGVSVKEALERTKHWSVDSGLNKTEFNNFRGKVRDRFQRTAHDEPLDARSMESVAWMANELRGRVAQRFHQENTKVSVYRGAITAEARRAAGIAKKLHFIGGPGKTRLDRRHHAVDAAVVAFTRHYVAETLAIRSNKKRAAELLRDAPQWKEFTGADEKRRAAWNVWLPKVQKLASLLQTALDEDRIVVTHNIRLRVGNSRAHEDTIGELKKIRVGDAISVTDIDRASSEALWCALTRDEDFDAKAGLPENPERKIRIHGTWYGADDEIEVFPVGAGAIKVRGGYAKLSRFHHARIYKVPKKTGYDYCMLRVYNADLVRHRNEDLFSVELKPQTISVRQAETKLRTALANGTAEYLGWVVIDDELVLDTSRFNTGQIAEMQSEFGQIRRWRLDGFYTDSQLRLRPLQMSAEGLPEDSTDGAKKIIDSPGWRPTVNRLLASGNVTVVRRDALGRVRLASAAHLPISWKVD

SEQ ID NO: 1777 - protein, 1113 aa, unidentified
  REGION 1..1113: note = Description of Unknown: Cas Enzyme sequence
LTSANVNYRVGIDVGSYSIGMAAIAIDDDGKPTKILSAISLIHDSGVDPDSAKSADSRLKTSGIARRTRRLYRRKRKRLAKLDKFISSQGWPLTEFEEYEDPFYPWRVRAELATTAIADQQELGEKLSIALRHIARHRGWRNPYSKVTALYTVTEPSDAFLAMQGECAKQLGHPIPPTTTVGQLVAGMNLGKTRLRGKEKPPNKANPHGKEAGLFTANKLQQSDYANEIHTIAKVQGLSNELVKQIIDHVFAAESPKGSAAERVGKDPLQPTKKRALKASDAFQQYRIAALIGNLRIRDGKGNRRLTAEDTRLVFDYLRSLPAKQEPTWQLVAEQLKIDRGNLVGTAIMTDDGERAGAKPPVHETNRLMESTKIKPLATWWKSADADARAAMVKALSNAEVDDFDSQAGVQVQEFFFGISDKDHEELDKLHLPIGRAAYSEDTLVRLTKRMIDKSMDLYEARQAEFKIPNDWAPPAPEIGERVGNPAVDRVLKATARWLNAAERQWGTPKSVNIEHVRDAFMSESSARKLDQDNQQRAKRNVKVVAEMQEKLGIEGRPSRADVWRFQSVQRQNCQCAYCGTQISFKNSEMDHIVPRAGEGSTNTRDNLVAVCHDCNSSKSNIAFAVWAENTSRPGVSVKEAVERIRHWVTDSGLRKPEFDKFRKQVCDRLRRKATDEPIDARSLESVAWMANELRSRIAQKFKDGETKVRVYNGTLTAKARKASGISGKLEFVDGKGKSRLDRRHHVVDAAVVAFTSNYVAETLALQSNMKFDYELRLNEKSKQELERKKPKYKTFTGPTPAHQAEWVKWKDRMQDLAELLNNALMQDRIVVMHNLRLRLGNGAAHEDTIGKLTRIKVGDAISTTDIDRASSEALWCALTRDPDFDPKTGLPENPNRTIRIHGTHLTASDEITVFPVAAASIPIRDGFAKLGSNYHHVRLFRVPNGKKYKYCLMQVYTVDLLKFRKEDLFTVELKPQTISVRTCEAPLRKALANGTAEYLGWLVSDDELLIDTSSFKTTGIVKLQEEYGQVKRWRLAGLNSVSGMKLRPLYLSKEGLKPNVDPEIKKIVGDRTWIVAVHKLFDTGHVKIIRRDALGRPRFHNAAHLPICWEVK

SEQ ID NO: 1778 - protein, 1100 aa, unidentified
  REGION 1..1100: note = Description of Unknown: Cas Enzyme sequence
LNSANVNYRVGIDVGSYSIGMAAIAIDDDGKPTEILSAISLIHDSGVDPDSAKSAATRLATSGIARRTRRLYRRKRKRLAKLDKFISSQGWPLKEFEEYEDPFYPWRVRAELATTPITDQQELGEKLSIALRHIARHRGWRNPYSKITALYTVAEPSDALVSIQEQCATELGRPIPPTTTVGQLVASMNLGKTRLRGEDSLLAARPRQSDNANEIHAIAKVQGLSNDLVKQIIDHVFAAESPKGSAAERVGKDPLQPTKKRALKASDAFQLYRIAALIGNLRIRGGKKNRRLTAEETRLVFDYLRSLPAKQEPTWQLVAEQLKIDRGNLVGTAIMTDDGERAGAKPPVHETNRLMESTKIKPLATWWKSADADARAAMVKALSNAEVDDFDSQAGAQVQEFFFGISDEDQEKLDGLHLPIGRAAYSEDTLDRLTKRMIGEGMDLYEARQAEFKIPNDWAPPAPEIGERVGNPAVDRVLKATARWLNAAERQWGAPKSVNIEHVRDAFMSESSARKLDQDNQHRAKRNEEIVAEMQEKLGIEGRPSRADVWRFQSVERQNCQCAYCGTQISYKNSEMDHIVPRAGEGSTNTRDNLVAVCRECNSSKSNIAFAVWAENTSRPGVSVQKAVERTRHWVTDSGLRKPEFDKFRKQVCDRLRRKATDEPIDARSLESVAWMANELRSRIAQKFKDGDTKVRVYNGTLTAKARKASGISGKLEFVDGKGKSRLDRRHHVVDAAVVAFMSNYVAETLALRSNMKFDYELRSGKKSKQKLEHKKPKYKTFTGPTPTHQAEWVKWNIRMQALAELLNNALAQDRIVVMHNLRLRLGNGAAHEDTIGKLTRIKVGDAISTTDIDRASSEALWCALTRDPDFDPKTGLPENPNRTIRIHGTHLTASDEITVFPVTAASIPIRDGFAKLGGNYHHVRLFRVPSGKKYNYFLMRVYTIDLLKFRKEDLFTVELKPQTISVRKCSSKLREALANGTAEYLGWLVNDDELLIRASSASTEKPIAKLQEHYGPTKRWRFAGTDSESRILLRPLQLSAEGLPSDVEKDIREIVEKRGWRISINSLFNGARVTIIRRDALGRPRLHSAAHLPICWEVK

SEQ ID NO: 1779 - protein, 1044 aa, unidentified
  REGION 1..1044: note = Description of Unknown: Cas Enzyme sequence
MEMRTERRVLGLDIGSNSIGWALIGFENEKPVRIVQAGVRCFEAGVQGDIESGREESRAQKRREARLARRQTERRARRMRKLGRLLQASGLLPGGAIDTPEQRLKFFTELDGELARRCLGRIPGGDPERRRVAHVIPYQLRARALDERLEPHELGRALYHLAQRRGFLSNRRAAPKKDEDTGEVKKGISELEQKMRETGARTLGEYFSSKVDPEEERIRKRWTSRQMYQDEFDRMWESQARFHPTLLTEDLKSELWQTIFYQRKVRWDRERIGQCQFEPKSKRAPMALLEAQRFRLLQKVNDLEIVTPDGAVMPLTAEQREIVIATLDVGERMKFSDVRKLLGLSRRHKFNLEGGGEQHLMGNTTAARLIEAIGQERWEKLSPGDRDRIVEDVRSIEKDEVLKGRGVRVWGLGEDAAERLSKVQVEQGHCSLSRKAVRRILPELQRGRRYGEVVHDLYGKRESPVVEYLPPLDRTELAVLNPAVQRALTELRKIVNGVIRTYGKPDQIRMELARDLRRSRKEREALSDKMRKNERERERAAQRLLKEWGIQRPSRTDIDKVRLWEECNGHCPYTGNPISPNSLVGDAPQFDIEHIIPYHRCLDDSFANKTLCYHEENRNVKQNRTPFEAYGGGREKWEEILQRVGDFKGPFKGEKAARFKLESLEPFEDYSSRQLNDTRYASTLAMNYLSLLYGGLSDGEGGRRIQTTKGGVTSELRNAWDLNRILGDGPGKSREDHRHHAIDAIVVALTDAQTVKKLGKAYERRFQERRLRWWRLVDKPWDRFLDDARKAVDQIAVSHRVSRKVSGAFHEETYYSGEKGEQVVHVRKPLGALSEKEVNDIVDDVIRNRVRARLEELGNRPPRKAFAQPENHPWLEAADGRKIPMHRVRIKKSASPVAIGTGVRERHVLTGSNHHVEIVEVDVRGKVRWEGDVVSMYEAAQRLRKGEPVVKRAHGAEKRFLFSLALNDSVRMADEAGERRIYKITAVSQFGSGTVVVEFVPNTEARPVSRIERKGRTRTPDRLRQAQCEKIVITPLGEVCAAHD

SEQ ID NO: 1780 - protein, 1041 aa, unidentified
  REGION 1..1041: note = Description of Unknown: Cas Enzyme sequence
MKKPAEEHILGLDIGANSIGWALVAFEKGTAKRILRAGARCFEAGVEGDVASGRDESRAQKRREARLQRRQTERRARRIAKVARILQRAGLLPEGPIETSEQRLRFFTELDAKICSRYLQDRPKKDPERRRLAHVIPYNLRARALDERLEAHELGRALYHLAHRRGFLSNRRAPVKKDEKAGVVTEGITSLEQHMQEAGARTLGEYFAGLDPERQRIRERWTSRTMYEQEFEQIWEKQVEFYPGILTEELKRDLQHAIFYQRPLKSQKGRIGECQFEPGCRRAPTAMLEFQRFRMLQTINNLEIICLEDGLVRRLTQQERAKLIAELETKGDITFARARKVLGLRKSSYAFNLEQGGEKKLIGNKSAASLAKIFGSRWEDLSPSEREAVLEDVHSIQKEETLKRRAMQVWGLDGDGAEALSSVRLEDGYCNLSRKALRKILPELEKGRRYGEIVKELYPKLQRRAVECLPSVERSGIILRNPAVHRALTELRKVMNAIVREHGKPDKIRIELARDLRQPRKERKRRTGEMRKNQAAREAAKRRILEEMGDPSPSRTDILKVQLADECNWQCPYTGLQISWAKLLGSEPQFDIEHIIPYHRSLDDSFVNKTLCDITENRNVKKNRTPFEAYGATDRWDDIVERVKAFKGGLAREKFRRFRLQDLSEFEDFSTRLLNDTRYVSTLAADYLALLYGGLSDTEGVRRIQATKGGITAQLRNAWKLNALLGDGPGKSRDDHRHHAVDAIVVALTDPGTVKNLGKAAQRSIEKGKRRWWNYVDLPWEGFLEEAKQVIDSIIVSHRVSRKVTGPLHDETYYAHKRGSEYVHVRKAVQSLSKNDVNDIVDDKVRECVQDILGDGDPKKVFASAEDHPVLHARDGREIPIHRVRIRKKASVQTIAKGVRQRHVLTGSNHHVEIVEVADKSGRTRWKGHVVTTYEAMRRLKAGEPIIKREHGEPAKFLFSLALNDVVSMRHEDGHIGLYKVTTISEFTNGTVQLAFVDNTDARLVTKISRKGRTKTPDKMRQAGCEKVAVTPLGEVRRAND

SEQ ID NO: 1781 - protein, 1100 aa, unidentified
  REGION 1..1100: note = Description of Unknown: Cas Enzyme sequence
MYTLLTLAKRHQRVNKKSLAKVWEICTERFTSMCHNMRHSNADEEQMIDTKDYVLGLDIGSASIGWALIQHVDGGPHGILSAGVRVFDPGVDGKMDRGQEESRNKVRREARLQRRQARRRAARRRDLFSLLQSHGLLPPTPGSQPVNKSVAIHETINQLDRELWAEWQKTMAADPAVLAKEHVLVYFLRRRCLDTAVDPRELGRVIFHLCQRRGFKSNRKAAPKKDEDEGTVKQGIAELQQAIAEGGARSLGEYFSRLNPNVRRIRGRWTDRRMFTAEFSAIWEKQAANRPDLLTAELRTRIETLLFDQRPIQDGEKMVGLCELEPSQKRAPWATLAAQRFRVLDRVNNMRLGDLSGFERPLSAEERAQILAKLETDGDQKFSALRKLIGAKEKGVAFNLERGGEKNCRGNRTASHMRAAFSDRWEGVSPTAQVEAVEDWRREEDRENAFRQAREKWGMDEDHARAWSESTAEPGYCAFSLRALARLLPLLEEGLSLTEAIQLAYPKQKEAPKDRLPPCGSVRNPAVQRAMSELRKVVNAIVRAYGKPDSVRIELARDLKKNRKQRQDIWVRNRKLEQRRQAAAIALRKETNDPHPSRADIEKIMLADECRWICPYTGKPISHKTLFEAPEFQVEHILPLGRFPDDSFNNKTLCHYEANARKHNQTPYEAFYDPGEERWTEIVTRVRSFNNPEKLRRFLLTPEETLADKLLGEFTARQLNDTRCTSKIAGDYLAQLYGGRVVNGRQRVFASSGSVTATLRKVWGLEAILGHGEGKGRDDHRHHSVDAVVVGLTSNSVIKAMSDAAARLKVPPDGRPYRPFKGLPGPWSDFIDSVRPHIENLNVSHRPSHKLSGPLHEETLYSKPYKYGLGNKDYVSIRKPLGKLSAKDIPAIVDPAVRAAVEKKLAELGGDLGQLNALSSLPAEDWERLPHLLARDGRKIPIRKVRVRKPMKPVSVGQGPRERYVQPGNNHHVEIFARLDGQGREVAWEGLPVSLLDAIQRRRQKQPVVCRRYGEDGQHQFKFSLMGGDIVEISGGDRPGLYRVRTIASNEQIALVRINDARIVKEMGDDFWRPRPNVLRQLGCRKVSVDPLGRVHPASD

SEQ ID NO: 1782 - protein, 1091 aa, unidentified
  REGION 1..1091: note = Description of Unknown: Cas Enzyme sequence
MSPHSRALPQAAKDWVLGLDIGSASIGWALIDPAGQRVAAAGVRIFEAGADERGFAEGREGSSNNTARRAARLHRRQLRRRAGRHRELFLELQRAGLLPAAEEGGRAGGSAARHAVLSRLDDALRPEWVERAAAAGVPAPEQVWPYFMRAWALDQPLPPFALGRVLYQLAQRRGFKSNRREAAGGATSNQVAADEKSKVKQGIATLQQEMTATGARSLGEYYSRIDPSAVPLRRRWTHRDMYRSEFALIWQCQSATEDRLTPELKERLEPLLFFQRKLLPAKPGKCELEPDHPRAQAAVLAAQRFRLLQKVNDLAVVLPNLEYQPLTADERHNLLLALEGEGDLKFTEIRRRRLVDCPRGAHFNLESGGETKIPGNRTAAALRPIFGERWDALADDQRESVVALWLAPEIEDDELARIGRQQYGLHDAAATAWAQAEPEPGYAKLSERALGRLLPLMEKGAPFKTAEKEIYGSGYSGGTAYDRLRPVADALPEVANPAVMRALTELRKLVNALVREYGKPGEIRIELARDLKRNAQQRAALAKSMRQRESERKAAKKAIEDLTEVNIPAPSAADITKRLLWERCGKACPYCGGVIGFSELFGGGADVEHILPRSRFPDDSFGNKCIAHRSCNTEKGGRTPLEAFSGDPERWAQMLERVRRWNDEGKLKAFQAGADELDPDREDSFAARRLNDTRYTTTLAARYLGQLYGGRDLARPDGTVRRVVFASSGLVTATLRRGWGLEGILRQPDASENGRSPGKNRDDHRHHAVDAVVVALSSNAAIQQLSRAAAASASATGVERISSRTLQGPWPDFVDRVRPAIEAINVSHRPQRKLAGELHQESNYSRPHLLGVVGFVHIRKPVHRLSAAQINAGDKIVDPAVRQAVQAKLAALGGEPKRLEHDSPVLLTRAGRSVPIRSVRIRAEKAASSRSIGTGERQRQVLLAGNHHLELFEGRDRRRRDAWKGQVVTRLEANARRARCRCGRGRPCDCVVTRKFEREEGYGFLFSLMGGDMIEMSEPGGAALRFVVRTISAYASGRIELALVAATNAAKVADVRAAGQFIRITDMNDLRKRGCRKIEVDPLGRVRAAGG

SEQ ID NO: 1783 - protein, 1100 aa, unidentified
  REGION 1..1100: note = Description of Unknown: Cas Enzyme sequence
MDTMDSTEESVPYILGIDLGSASIGWAVLTRPEAGENALLASGVRIFDPGVAGEIGDIEAGKDEARGKARRQARQSRRQTWRRAWRMKKLFREMQGAGLLPPTAPGEYRDEAKARYDTIEALDGELRARWLTPGRPPAVPASASGTGASPALQPAPAPEHVLPYSLRARALDLRLEPFEIGRALYHLGQRRGFLSNRLTAPKEDEEEGQVREGISSLEEEMRQAQARTLGEYFSRLNPTEERIRRRWTARSMYEDEFDLIWKAQAAHHPQLLTPRLRKRLHSAIFYQRPLKSASALIGDCEFEKGRRRAPWACLEAQRFRLLQKVNDLEVVTQGQRRLSGGERSALLAALETRPDMKFTEIRKLLGLRHDRFNLEAGGEKRLKGNLTAAVMTRCFGDRWDKFSAEERARIVEEWRTIEKPETLVRRLVDAWGAAEPLARELSGERAPSGYCHLSRKAFRELLPLMEEGVQYMAAVDKVYGTSFSGGQVSDRLPPVRELLPQLRNPAVGRALTELRKVVNAIVHEYGKPAEIRIELGRDLRRPRDERARIWRENRSRQDERERVRSILREEVGVPQPSRDDIDKYLLWQECGHFCPYTGRPISREALFGAAPQFQIEHILPLSRFPDDSFQNKTLCYHEENARKKDRTPFEAYGAEPDNWARILDQVGKFRNREKLKRFEMQETEAEALLQQFSSRQLNDTRYSAKVAAQYLGALYGGRDVADSAAPTGLRRVVFTSTGQVTATLRREWRLNGILPAPAGLTSPAEKARHDHRQHAIDAIVTALATPAWVKQLSDRAAGNQRQSGRASFRGLEGPWPNFADSVREAVLPINVSHRPEHKLSGQLHKETNYGRPYEHIEKGKETDRANERKPLSAIKPGEIARIVDPAVREAVERRLGELGGDVKKLQLAATPPRHRPAGAAPEPPPFLAARDGRQIPIFKVRIWQAVTPQKVGEGSRERQVALANNHHAEILAEVDESGRERRWDAVIVSLFEAVARRNQDRTPGSRPVVQRDHGPGRLFKFSLMKGDTVEVDDNGRRALFVVRSISEGDMPMVRVHDARKISDIKKEKAWLRIRSIDQLRQLNCVKVCVDALGRVRPSND

SEQ ID NO: 1784 - protein, 1100 aa, unidentified
  REGION 1..1100: note = Description of Unknown: Cas Enzyme sequence
MDTMDSTDESVPYILGIDLGSASIGWAVLTRPAAGENALLTNGVRVFDPGVTGEIGDIEAGKDEARGKARRQARQSRRQTWRRAWRMKKLFRELQSAGLLPLTAPGEHQDEATARYATIEALDGELRARWLAPQPLAVPGSANGAGAAPALQPAPAPEHVLPYLLRARALDMRLEPFEIGRALYHLAQRRGFLSNRLTAPKEDEEEGQVREGISSLEEEMRQAQARTLGEYFSRLDPTEERIRRRWTARSMYEGEFDLIWKAQAVHHPQLLTPQLRKRLHSAIFYQRPLKSASALIGECEFEKGRRRAPWACLEAQRFRLLQKVNDLEVVTQGQRHLTGDERAALLAALETRADMKFAEIRRLLGLKNQRFNLEAGGEKKLKGNLTAAVMTRCFGERWETFKDEERARIVEEWRTIEKPETLVRRLVDVWGAPEPPARQLSGERAPNGYCHLSRKALRKLLPLMEEGVQYMAAVDKVYGTSFSGGLVSDRLPPVRELLPQLRNPAVGRALTELRKVVNAIVHEYGKPAEIRIELGRDLRRPREERARIWRENRSRQDERERVRSILREEVGVPQPSRDDIDKYLLWQECGNFCPYTGRPISREALFGAAPQFQIEHILPLSRFPDDSFQNKTLCYHEENARKKNRTPFEAYGADPDNWARLLERVGKFKNREKLRRFEMQQTETEALLQQFSSRQLNDTRYSAKVAAQYLGALYGGRDVADPATPTGSRRVVFTSTGQVTATLRREWRLNGILPAPAGLTEPAEKARHDHRQHAIDAIVTALATPAWVKRLSDRAAGNQRQSGRASFRGLEGPWPNFADSVREAVLSITVSHRPEHKLSGQLHEETNYGRPYKHIEKGRETDRANVRKPLSAIKPGEIARIVDPAVREAVERRLEGLGGDLKKLQLAATPPRHRPAGAAPEPPPFLKARDGREIPIFKVRVWQALTPQKVGEGSRERQVALANNHHAEIFALLDEQGQEQRWDAVVVSRLEAMRRKRSGQPLVQRDQGPSCLFKFSLMLGDTVQIEDEGHRTLFVVRKISESGKGRIEFAFARATDARRAKDIKLGKGRDWPRPSPDGLRKLGCAKVSVDPLGRVRPAND

SEQ ID NO: 1785 - protein, 1090 aa, unidentified
  REGION 1..1090: note = Description of Unknown: Cas Enzyme sequence
LNSANVNYRVGIDVGSYSIGMAAIAIDDDGKPTEILSAISLIHDSGVDPDSAKSAATRLATSGIARRTRRLYRRKRKRLAKLDKFISSQGWPLKEFEEYEDPFYPWRVRAELATTPITDQQELGEKLSIALRHIARHRGWRNPYSKITALYTVAEPSDALVSIQEQCAAELGRPIPPTTTVGQLVASMNLGKTRLRGEDSLLAARPRQSDNANEIHTIAKVQGLSNKLVKQIIDHVFAAESPKGSAAERVGKDPLQPTKKRALKASDAFQLYRIAALIGNLRIRGGKKNRRLTAEETKLVFDYLRSLPAKQEPTWQLVAEQLKIDRGNLVGTAIMTDDGERAGAKPPVHETNRLMESTRIKPLATWWKSADADAQAAMVKALSNAEVDDFDSQAGAQVQEFFFGISDEDQEKLDGLHLPIGRAAYSEDTLDRLTKRMIGEGMDLYEARQAEFKIPNDWAPPAPEIGERVGNPAVDRVLKATARWLNAAERQWGAPKSVNIEHVRAAFMSESSARELDRDNQQRAKRNVKVVAEMQEKLGIEGRPSRADVWRFQSIQRQNGKCAYCGAQISFKNSEMDHIVPQAGEGSTNTRDNLVAVCRECNSSKSNIAFAVWAENTSRPGVSVQKAVERTRHWVTDSGLRKPEFDKFRKQVCDRLRRKATDEPIDARSLESVAWMANELCSRIAQKFKDGDTKVRVYKGALTAEARRASGISGKLEFVDGKGKSRLDRRHHAVDAAVVAFTSNYVAETLALRSNMKFDQELRRKAPQWREFTGSDHVHQVEWTKWKYRMQALAELLNNALAQDRIVVMHNLRLRLGNGAAHEDTIGKLTRIKVGDAISTTDIDRASSEALWCALTRDPDFDPKTGLPENPNRTIRIHGTHLTASDEITVFPVAAASVPIRDGFAKLGGNYHHVRLFRVPSGKKYNYFLMRVYTIDLLKFRKEDLFTVELKPQTISVRKCLPKLREALANGTAEYLGWLVNDDELLIRASSASTEKPIAKLQEHYGATKRWRFAGTDSESKILLRPLQLSAEGLPSDVEKDIREIVEKRGWRISINSLFNGARVTIIRRDALGRPRLYSAAHLPICWEVK

SEQ ID NO: 1786 - protein, 1044 aa, unidentified
  REGION 1..1044: note = Description of Unknown: Cas Enzyme sequence
MSNNDHILGLDIGPNSIGWALLGRENGEIAATGVRIFTAGLDDLELDGKGKSWNLKRRDARSVRRGIERTSRRMVKLAHILQNAGLLPLGAIDDGYSRNEYFTRLDQKLDYPYKLRARALDEKLEPFEIGRALYHLAQRRGFLSNRKSVSEDEKEEGKVKESIGELQRQMDEAGARTLGEYFSQVDPHQERIRSRYTSRKMYEDEFQQIWEKQKEYYSALMIDELKAEVHEAIFYQRPLKSQKHLIGGCQLEDGQRRAPWALLSAQRYRYLSTLNNLIIKLPDGSERELTEQEYEKLADHLETNKELKFTTARGKKLLGLPKGAKFNLEEGGEKNIPGNRTAASLRKVFSDRWDELSDAEKGQVVEDLRSIVKDEALKKRAMDKWGLDEESADKLTRIKLDDGYCNYSRRALSKLVPLLRQRKHLQTAIRELYPDRWARTTRPLSVLPPLRECEDPLLSELRNPIVSRALTEIRDIVNAIVGKYGKPAEIRIELARELRQTSKQREEATKRMRQNERERKQAAKKIIDETSLTEPKRNDILKVLLADECDWKCPYTGKTISIGALFGGHPQFDIEHIIPLDRCLDDSYMNKTLCDADENRNVKRGKTPYEAYHGTAKWDEIISRVGKFSGRAGREKLRRFKMTDEETEDFIAGFTSRQLNDTRYASRLAKKYLGLLYGGVDDDGIDASGKRCVQATSGKVTATLRYLWGLNAVLGQAAIKSRDDHRHHAVDAIVVALTSSSAIKALSDAAKRGASVARKYSKVKPPWHTILEDARKAVLGITPSHRVNRRVRGALHKETFYSPPRDESGRRSEEGEYVHVHQPLESLSARDVASIVDPVVRKAVEDKLQQLGETDPAKAFKDPSNYPRLKSGQLIKKLRVRHKLEVVPVGQEEYRQRYVMLGNNHHMEIVEVQLTDKQGNVKKDKDGKPMVKWEGYVVSMFEAYQRKKRKEPIVKRDHGPGKKFLFSIAGGDTIELQKEEGKSELFVVRTVAQSTQIRFVPVHDARTLLEIGKVGLTAVPETLRKWNCRKVAVNRLGEVHYQND

SEQ ID NO: 1787 - protein, 1111 aa, unidentified
  REGION 1..1111: note = Description of Unknown: Cas Enzyme sequence
VDHLEVHVSDSAGGHVSEIPEYLLGIDLGVLSLGWAAVKLQDGRPIGLLDAGVRAWDLQNIAESDIAVGKEEPPSQTRRQMRQMRRQLFRRAQRLRRTWRALQQLGLFPPGSRHCAARKAFLDQLDGQAKAWLCQHRFGSADPPPHWEDTWIYHLRAAALDQPLPPELLGRVFFHLAQRRGFQSTAKTRSGGEQKDGEDRKNKKNKKGKKSEKSERERIRAAISQLQQAMQTSGARTLGEYFARLDPHQERIRGRWTSRRIYKEEFEAIWAAQAPFHPEWTAADKDRLFRALFFQRPLKSQRGLVGLCPLESKVLPPAQPGQKAKVLYRHRRAPLASLEAQRIRYMQRINDLEIIAPDGTHWVLRDPAYQLMRSKLYDLAEHHEELTFPAIRKALGIPTGKKGEDWKFNLEAGGEKKLPGNTTAARIRRILGDQRWDSLGPDGQKQLVDTLLAFLSEEALQQHLEAHWHLDPPTAQALAHLELEPGYHSYSRRAIRKLLPLLEQGLRLNEARRKLYPQKEADAGGWDRLPPVCQVLPQVRNPLLVRALTELRKVVNALLHKYGKPVQIRIELARDIKRSRRERKALSRRMRKQEDRRKKAAQIAREHLGREPSPFEITKVLLAEECNWKCPYTGREKIELAALLGPEPQFDVEHIWPFDRSLDDSFANKTLCYHEENRLRKSNRTPWEAYGSDPHRWGEIIARVKQFKGEWAKEKLRRFLAQELPEDFPQRHLSDTRWISRTAADYLGLLYGGRIDPTGKQRIQTTAGRLTALLRRAWDLDSILGPGTEKNRADHRQHAIDAVVIALTDPAVVHRLSRWASHRPSWVRITPQLDSPWPGFFDQVKHRILSILVSFRQHRRLSGPLHDQTFYAPPVPSPEDPKKLRTKVRKKLSELSDNAVEDIVDPEVRRLVQEKLQALSQHDPKLADPKKAFASPENLPYLRSRRTGQIIPIKSVRIWVTAHLEKIGSGMRQRYVIPGTNHHLEIFAHLDAQGNETRWDGHVVSLLEAVRRKRLGQPVVCRDHGPNTRFKFTLAKGDYIQWTDDQGQPQILRVIGISHNNIEFRLPSDARPITIIKQEKQRIRARYQTLFQRRARKVAVSPLGEVYPAGD

SEQ ID NO: 1788 - protein, 1044 aa, unidentified
  REGION 1..1044: note = Description of Unknown: Cas Enzyme sequence
MSSHHLVLGLDIGPNSLGWALLDEEGKRIVSAGVRVFEAGLDSLEKDGKGESRNLERRSARLIRRQLERRSRRLAKTAHVLQAAGLLPPGDTSTAEARHRFFEALDAQMDSPYGLRARALDEKLEPYELGRALYHLAQRRGFLSNRRESSRAKDDEDEGIVKEGISRLQAEIESGCFRSLGEYFATLKRQEQRIRSRYTSRKMYQDEFALIWQAQKKHYPAVLTDELRESVHHAIFHQRPLKSAKHLVGKCELEKGRRRAPWALLDAQRFRYLQRVNDLELTQPDERPLTPDERQKLLDYLELHGDTTFGKARKHLGFKNSGKGAVKFNLEAGGEKNLPGNRTASKLAKVFGEKRWAGMSAEERNAVVEDMLSIVKPEALKRRAMRHWGLDEAAADELCAVKLEGDYCNFSRKALRKLLPLLEQGLRLNKAIKQLYPDRWAYEGKPVDELPPLRKCEDPYLSEMRNPIVMRSLTEVRRVVNAIVAKHGKPAEIHIEMARQLRQSSRQRAETTKRIRFNEKKRKDACEKIAQEAGITEPTQTDILKVLLADECGWICPYTGKNISVIDLVGPHPQFDIEHIIPYERCLDDSFANKTLCEAEENREVKRNRTPYEAYHGTDRWDQIIHRVKGFKSHSAKGKLFRFTADEKEVGEFIDRFTNRQMNDTRYSSKVAKKYLGLLYGGVDDDGIDANRKRCVQATSGGVTAVLRRAWGLNSILGGGEKTRDDHRHHAVDAIAIALTDPAKVKALNNAAVDTMERMRRARSVKLPEPWDGLLEEARTKIRGITVSHRVDRRVRGPLHQETFYSPPKLDENGKKLVRVRKPLNAIGARDVASIVDPAVRAAVENRLRQLGETDPKKAFKDAANLPRHKNGHRIKSVRLVRPGEAVLPVGQGHRTRWVMPDRNHHMEIVEVVVKDKKGNIKRDKDGNPEVKWEGHVVSMLEAYQRLGRKEPVVKRDWGEGKKFLFSLAGGDAIQLEKEEGNPELFVVRTVPQSLQIHFVPINDARTLLEIGKVGLTGYPETLRKWKCRKVAVNPLGEVHYQND

SEQ ID NO: 1789 - protein, 1208 aa, unidentified
  REGION 1..1208: note = Description of Unknown: Cas Enzyme sequence
MRVKMKKVLGLDLGIASIGWALIAQDSENEEIYHIIDCGVRIVPLSTDERSEFAKGGSVPTNHVRRRARGMRRNLQRYRWRRHRLYRVLEQLGMMPDQRLMTRLSPVELYSLRSRALSEPLSLQEIGRILIHLNNWRGYRSNRRATVKDDEKSQYLKEIKNNEDQLKVEDKTIGQFFAERLHQGDRPRIRGKIFSRNNYIDEFNRIWDAQAQYHPSVLTEEHRRLIRDRIIYYQRPLKSAKGLVGTCALEWYYALDKETHQPKYENGRKKIVRPKCAPKSSPLNQECKVWESIHNLRIYRRDNNGRREPQPVELTLEQKKRLFEELQKSPKNLEAKEVLHLLGFSAGAYEVDDHTLENNRTLSRLKEVFKKLGIRRDDLLKFDPAIEEVEWDDLETGERRRRLQVRGDFDREPLYQLWHLIYATEEEGDLIRVLEERYGFTTEQAREIAKIDFTSEGYARKSHRALRRLLPHYRKGLDYTKACEAAGYRHADYITKAENEARALSDRLKELSKNALRNPVVEKILNQMVHLVNDLMATYGRPDEVRVELARELKQSAQERKKIHELNQERNRQNEQIKKEIADYLAIPPEKVTRAQIEKFRLYEEIDGVSLYTGERLSLTDVLNGDTVNVEHIIPRTLRFDDSYHNKTLCEGNINREKGNKTACDYMRSRGAQEYEAYLKRVEEFYKRNGKGARAKYKNLTTTEEDLLKDNEFLQRQLRESQYIARKAVEMLREVCQNVYTTTGSVTDFLRHWWGWDEVIAHLRLPQFREAELTKIISVQNGQKTKEVIKGWSKRDDHRHHALDALVVACTRQSHIQRINELSQTLQGTYGEERRQQLFDVGGRDKYIAGKAPFSFQQVCEAMKQVLVSYKQRTRVATRSRGCPKGSSKVPTTLTPRGRLHEETIYGRIRRYKKVALDGKFSVAMLGEMVHPHQRELVEARLAQHANNPKAAFKDLDKNPIRYGPNGEKHLRKVTVWEYLWVSRKALDPKATGKSLERIVDPAVRKAVEEHFKAGNDGELPFRHVRVKNPAERMIRLPRGYAEPGSNHHIAIYRDADGKKHEHVVTFWDAFQRVRIGLPPIITDVAGALEHISHLPGELPELHLPENPDWQFVVSLAQNDMFVFGLDPAVIDLRDPKNRSVVNRHLFRVRKISSGSYWFSHHTETKALDDTDSKEAGRCKQCSIKSLSGAVKVTMNRLGHIVKVGQPI

SEQ ID NO: 1790 - protein, 1282 aa, unidentified
  REGION 1..1282: note = Description of Unknown: Cas Enzyme sequence
IFQEGVKIEKGNESSKASERTGYRSARRIKFRRKLRKIETLKVLSEAGFCPALSMDELKAWQSKKVYPENSAFRDWCKTFDPGDKESGSFENPYYYRWLAATQKMNLDDEADRFKLGRAFYHMAQRRGFKSNRLDSTPEREDGVVKKDISELSEKMNGRTLGEYFWEECYLTGEKIRQVHTSRDEHYLAEFDFICEKQGVSDELKAALHRAIFFQRPLKSQKGLVASCPFEPKKKRAPISHPLFEEFRMWQTLNNIKIKTQKDEQLRPLSDEEKDTIVPLFFRVSKAHFDFKDIAKALLKTLNPKNQKHAYTKGRDAAEAHVLFNYRDNQSLAGCPFSARLKGLFGDEYKQRLFGSYSGGKKDQKSSEDVLHEVWHVLFSFDDEDKVKDYAKGKLGLDEEGAEKFAKINLPQGYGALSLKAIRKILPFLKQGLLYSHAVFFANIDQVINISADESERLKADVSKLIDEHNQYITEARCVNEFVREYKNSPQMFEGKYDLRNVQEFEANLSKEVRDFASSICQKIRFQTLENNGNGEYASMKRLDERVGDYLLENFDATSDALSKLYHPSAIEIYKPAEKHSDGKYYLGDPRISSIRNPVFMRAMHRVKAVVNELLKQGVITDQTQIHLEMARELNDANKRAAIKRWQWNNEKRRKDYKAAIEEVLSGQGIGREATDDEILKYQLWEEQGHVCPYTGSTIKTSDFIGENPLFDIEHTVPRSQSCDNSQENKTLCERDYNRNEKKNRIPFDCPDYDVILQRIEHWQVRVDELNKLIDKQRPKSKYAATKEIKDSAIQKRLVWEFERNYLRGKVRRFTMEEVTSGFKNSQLVDTRIITKYARMYLKTVFPMVHTVNGKTTDDFRRCWGIEKSRDNHAHHTVDAIVVACVTREQYDKLARHYHDYESYERNDPSVPKKPHFSKPWKTFTEEMADLKNEILVSHYAPNHLLKQTKKRAKVRGKIVMQQGKTARGSLHQDTFYGAIKRMEKNKKGEVKEIVKYVVRKPLSDLKDSDLKKIVDDRVREIAITGREKESLLKKEIDALKKKKPALDEAGELAIKKQIKGLEGRLEGLYALPNKNGNPIPIKRVRVYSNITNPIPLKAQKDVSKKRPNPHKQQYWVNNGENYCIAIYEGVGRAGRRVRAFRAFSNYAVTNQTKEVGDVAFSKRFDSLDEKGVSLEYKYEMQPGTPVLFCDGCELADLKQLSAADISGRLYFMYGIKGDNGYSKFRFHQEARQDKEQDLIMTTVNINDPVSKVWISPSKLDILVGGVDFKINALGEIEFIKE

SEQ ID NO: 1791 - protein, 1392 aa, unidentified
  REGION 1..1392: note = Description of Unknown: Cas Enzyme sequence
MKNILGLDLGTTSIGWAVVREAETNDEKSSIVNLGVRLVPLTVDEQTHFNNMSGETANQKRSLQRGMRRNLQRYKLRRAALISILKEHGFITDETVMFESGNRSTFETYELRAKAVTEEITLEALSRVLLMLNKKRGYKSSRKGNKQESGKVINGIEVSKQLVAEKITPGELSYKILRNGGNKLPEFYQSDLQGEIDTIWTKQSQYHTELTQELKESIKGKTKAQTWGILSKTLVVNGITRALKGKELRLDNYRLRSLAVHNQITLEELVIVIQEINGEIANMSGYLSEIGEHSKSLYFNKQTIGQYLMESLAKDANKSLKNIVFYRKDHIAEFEAIWDNQRQYHKELTDELKEEIRDIIIYYQRPLKSKKGLVSICELEQKEIEIEKNGKKITKIIGNKVVPRSSLLFQEFKVWQTLNNIVVSLKGVTKRVQKTQSLNIEEDELYLNGSRQLTAEEKALLAEELQVKEKLTKAEVISLLFGSAKKLDLNFKIIEGNNTMSQLYAAYSKMLYMSGHEALNFNESAKQIKEQAKSEFEALGWNTEILNFESTKVLDSQQSYRLWHLLYSYVDDSSKSDSNSLVDHISELTGIDKEYCDVLSDIAFTDDYGNLCAKAIKRILPYMKEGQRYDEACLAAGYKHSRASLTKEEIEHKELKQYLEILPKNSLRNPIVEKILNQMTNVVNALVDEYGSFDEIRVELARELKKSANERKELNDSINATTKENERVRQILINEYDIAYPSRNDIVRYKLYEELKPIGYHTLYSNKYIREEQLFSKEIDIEHIVPQSRILDDSISNKTLEFRDVNIEKGNSTAYDYVKTKYGEDKLEDYIKRCEECYKSKKTKLRKLMMSETEIPTDFVDRDIRNTQYISKKALSMLSSITRRVVATTGTITSKLREDWQLIDVMKEINWSKYESLGLVEYHTNREGKQIGQIKDWSKRNDNRHHAMDALTVAFTRDVYIQYFNNKNASEKPNSNEYAIRSKYVKDGKILPPMPMNEFRSEAHKHLENILVSYKAKNKVVTQNVNKIRIGSDVREKVQLTPRGQLHNETIYGSHYEYECKEEKVGSTFTEEKILTVCKSAYREALLKRLMENGWDAKKAFTGRNSLDKRPIWIDENHSQAVPLKVNTVQSKLKYTVRKAITKDINISKVVDVKIKQILEERLKEYGTAQKAFSNLDEDPIWLNKEKGIKIKRVTLYGIENGLPLHEKRGQNGVVQKEHLPVDYVSTSNNHHIAIYSKPILDKNGIQKIDEEGNAMTELAEVVVSLYEAVTRAIDGMPIVDKEYKQSEGWKFLYSMKQNECFVFPNESTGFDPKEINLLDVKNRALISPNLYRVQKLATKYYCFRHHLETNVEDNKELQGVTWKRIQSLGIMDKVVKVRVNHIGQIVAVGEY

SEQ ID NO: 1792 - protein, 1105 aa, unidentified
  REGION 1..1105: note = Description of Unknown: Cas Enzyme sequence
MTTVLSLDMGATSIGWALLKLTDNKIDEFIYEGSSLIDAGSRVFEAGVDNLGQGSKEASRAVDRRLARGMRRNYERRRLRLRRLTRALQSASLLPKPVSWAVIYDAFGVKGSDDLANPYYLRTKALDHKLEPYELGIALYHLARRRGFKSNRKTDNPDEKGAIFDGSKNSQMVGIKATEAGMQEGKYRTLGEYLNSLRGNPNVRLRARYTQRAWYQAEFQLIWASQQAHYPTLLTDKLGQELQDIMFHQRPLKSAKHLIGKCEFERNKRRAPISHPVVQYARMLQQVSSLKLTITDTIAGKGLVEYPFASSLVYDDKGQIAYEASGKAQVVFPFPKVRDWRQSLENYLLSHADDLKTEELHKKGVLDYILKDFVNTENNDEGKKVKVSSYSTNLDRRPGKLKGCTTRGEIRKIMGDKAYENLDDKAIEDIWQLLYNQDNEEHLIGLLQRKYGVSAEQAQKLSAIKLPDGYSALSLKAWKKIIPHLEQGLVYSDACKAAGYNHSDQGPKALMRRLPKPVDVANPVVRKAMNELRKVINTILDRYPGLVIDEVRIEMGRDLGNAEDREEINKRQKENEAINDELRRQLIELQAAPTTSNLKKFKLFTEAKRQCMYCGKTGEMHQVLGDSAEFQTEHIIPMSRSLDDSMANKTIACYDCNAEKGDRTPHEWMITKDSAFRERFLTLIERLPKNKQRKMTQKETPELEGFISTQLNDTRYISRLAREYIQHICPNVVCSKGHHTATIRGMWQLSELLDGNNPHLNFELAPSELKGGGKVRLDHRHHALDAIVIGFIDRKMLQALAKTKNRKGKTDSLTGARFGLPWRSFKQDVKEMLSRIIVSHAVSKDMPGLSTKRTHVAPGSLHDGTNYGKIKNPESQVDSYVVRKDVNRLSAKEVDKIVDPVVRKVVQDAVAEFGLGKLPEIYHPNGQRIRSARITKESSSMVRLPDGRHVEPGNNHHVAVFRLPNGKQKVDVVSLWDVCQRFKNGQPAIDRHAHPGGEFLYYLMRNELFFPFTEEEQKDPDAELRWRNYNWDDKTRYADIFSRVYRVQKFSDSYHCMRHHTISKIKVKAATGKEIEPGRKIYADSTLRGLKLKIDAAGYLSLADE

SEQ ID NO: 1793 - protein, 1434 aa, unidentified
  REGION 1..1434: note = Description of Unknown: Cas Enzyme sequence
MKKHILGLDLGTTSIGFAHIIEDENNSLQSSIEKIGVRVNPLTTDEQTNFEKGKPVSVNADRTLKRGARRNLGRYQQRRENLIEVLRNAKIIYEESILAEEGKSTTHETWKLRAKSVSEKIEKDELARVFLAINKKRGYKSSRKAKNEDEGQAIDGMAVAKRLYKENLTAGQLSYQLLKEGKKHIPDFYRSDLQTEFDKVWDFQKQYYPEILTDEFYKDLKGKGQRATSAIFWAKYQFNTAENKGSREEKKLQAYKWRSEAISKQLEKEEVAYVITEINNNLNNSSGYLGAISDRSKELYFNKETVGQYLHRQLTENRHTRLKNQVFYRQDYLDEFETIWTTQSKYHSELTNELKEEIRDIVIFYQRKLKSQKGLISFCEFECKEIEIDKNGQKTKKTIGLRVAPKSSPLFQEFKIWQVLNNVLIRQKGSKKRVVKKDNQPSLFNDEEKEIFEFDLSAKQLLFDELNIKGNLSSDKIIGLLGYKSSDWEINYSQLEGNRTNKALYDAYLKILEIEGYNQELLKLSTEDNIDISKLKTPASEIKSMVKQIFEVLGINTEILEFNAELDGKEFEQQASYQLWHLLHSYEGDDSLSGNEKLYELLEKKFGFKKEHSQILANIALSDDYGSLSSKAMRKTFPFIKENQYSEACSLAGYNHSASSLTKDEIKNRPLKDKLELLKKNSLRNPVVEKILNQMVNVVNTLIESENKKRKEQGLPEDFHFDEIRIELARELKKNTKERAEMTANINETKTKHDKIINLLKSEFGIKNPTRNDIIRYKLYEELKNNGYKDLYTNTYIPRGILFSKQVDIEHIIPQSKMFDDSFSNKTIVYRQINLDKGNKTAFDYIEEKFGAEKAEEFLQRIESLFNLGKKNKEEGISKAKYQKLQKRENEIGDGFIDRDLRDSQYIAKKAKTMLFEITRSIVSTTGNITARLREDWDLINIMQELNFEKFKQLGLTEMIEKKDGSFKERIVDWNKRNDHRHHAMDALTVAFTKHNHIQYLNYLNARKDENHKLHSNIIGIETNETELVINKEGKKERIFKQPIPNFRQVAKEHLENVLISHKAKNKVVTKNKNKIKTSKGEKTKIELTPRGQLHKETVYGRIKQPTVKEEKVGTKFNLETILKVSNQTYKELLLKRLEENNNDPKKAFGGKNVLSKNPIYIDADKTKTIPETVKLVSYEEDYTIRKDITPDNFKDAKSIEKVIDCGVKTILLNHLKEKNNNAKEAFSDLDKNPIWLNEEKGISIKRVTISGVKNAEALHHKKDHLGNFILDENGNKIPVDFVSTGNNHHVAIYRDENGDLQERVVSLFDAVQLVNAGEPVIDKTFNQGLGWQFLFTMKQNEYFVFPNPKTGFDPNEIDLLDSKNYKLISPNLFRVQKLATKNYFFRHHLETTVEEKKELKDIAYKPQLGLNAINNIVKVRINHIGKIVKIGEY

SEQ ID NO: 1794 - protein, 1306 aa, unidentified
  REGION 1..1306: note = Description of Unknown: Cas Enzyme sequence
MTMKKILGLDLGTNSVGSAVVLYNDEKDTLQEIVHMGSRIVPMGDEKTAFEQGQKITKNEGRRMKRGSRRLNQRYKLRRNNLIKALKAMGLLDVSYDAKSDFLETSLLGKNLTDEQVYELRSKAVTGKISAKEFARVIYQLNQRRGYQPNRKERAQRSDVDKTSYEVFNETTGIRLVEPTGEKKNKKDEFKVVLDDGRDGFTLNPSFASMQGKLMEIEIRKRTNKNGEVTYNFGLPNPTDWQKKLDATEKDLDIQHLTPGQFYYQEIQKARKNGEDFRIRQHLVFRKRYIDEFNQIWDAQAKHLELLNDEKVKKLVIEAVMPLRTPEKVIWLKKSLKEFIRDYVIYYQRKLRSQKGSIGNCRFEPKKKVMPVSHPLFQEFRIWQSINNLKYENENGDYSFLSAEQKENLYFAFSSSDELSKEKVAKILDMDSASLRMPEKLIGNETVHLLKKACKKAVVKLEDVAPTNEKLESLWHTLYSLEDDDEEHIEEALCRNFGFEPNQAKKLSLVYFEKEWGSLSARAVKRILPLMKMGTSFNETEIHTEVKQRIERLIDGETDELLTDKVRQECSGMKSLSDFSGLPYWLASSLVYGKHTASSEGDPFSLPDEIEPLPLHSLKNPVVEQIVNETLHVVRDIWKTHGKPDEIRIELPREMKQNAKERAATFKRNNDQEKLRKVAFELIRSDPDFRVPNSTKKDVDRYLLWEEGNKKKHHCIYTGKPIPKSAVFNGETDVDHILPRQRFFDDSFQNKVLVFRSANEEKGNKTAYEYMKQKDWDRFESDVKQMFFGKRRFFLLTPEIPKDFVNRQLSDSRFIARKVKEQLERVCPGKTYVTSGTVTDYLKNQWGLNEVFKQVLRPRFERLEKLCGKPLIKEATIDNKKILQMRGYNKRIDHRHHALDALTIAVTKQGFIQQLNNLSQIYERGELKEVSPRQFSLPHPKFREMVKDKLDELIVSHKSRKRLLANTMSKYLKRDSEGKLIEIKQTKKVFSVRGTLHDEQPYGVVKKYEKIKIESAFENLEDISVEWQRQKIQERLSQFDGDKKKAKSSLKKDPLADPKGEKMDSVTVFVKKHVKTYDLSSITTKQLSNIANRKLANELEIHAGKYKGDFAKAFSDDGLVEFNSSRKKPVFKVRVLLNADLKQLRTKEDSNIRKFIKEGGNYCFVIYQDNLGNRYYDNLSFFDASQLAKDGLPLVENRENCQHFTLQAGELVYVPVPGQTSKEINWNNFKEINGRVYKFVKSSGNQAYFIPGSISDILNKKNEFEIDEFGSQNCLEFINEDEPRTKISERCAKIHIDRLGKIKPLM

SEQ ID NO: 1795 - protein, 1435 aa, unidentified
  REGION 1..1435: note = Description of Unknown: Cas Enzyme sequence
MKNILGLDVGTNSVGWALVQHDFDNKTGKIKDCGVRIIPMPQDAISDFNKGVLESSAAQRTHYRGVRRLNERFKLRRKRLIKSMKIMGLVPKSFEVNHIQSFAYEDVDGNRKFKFQESHLEMLELFKHRHSSIQNISHDWTIYYLRKKALAQKVSKHELAWLILQFNQKRGYHQLRGDTTLQSDNNKFFIHDIVDNIIEDNDPKSNSFSIHLRSGLVAEYKSKQKPKWIGGSHDFIVTEKILKDNSKKITITQPKEEDWTLRKKKTESEISGSGMTVGEFIFNALLTDPTIKIRGKEVHTIDRRFYKDELTRILNKQAEFHKLLTDKFLLKKIASALYKNNINHRNELIKTSIIHCIVDDIIFYQRPLKSKKYLLSNCKYESYHFKDKDELRTKAIKVIPKSHPSFQEYRIWSQIHNLKILEREYRDDNSILKTDFDVTNHYYDDDYYDKVFKLFDQKQEVTQSQYLSLFKLKSKTHRWNYEEKAKLKGNEIKAKILRATKSLKDNKRIKDILNNNKELEIIWHALYSLTEDQKDLVSALTKPKISLNNKSLGLTDEEVQAISALEPFSKEYGSLSRKAISKLLPVMRAGTYWSEASISEQTAIRINHIITAEADQNISERVREKFKNKANISDFRALPEWAASYVVYNRHSESVNIDRFESADDINVNTLLPQHCLRNPTVEKILRETLLIVKDIWKLHGRPDEIHVELARELKLPNDKRKQYTDRRNQNRATNQRAKAMLIELKKSNPNINPYSISQLETFKLYEEGATNNQNYIDDHVKAIRSKGDPNQSEIIRYKLWLEQKYISPYTGQAIPLSKLFTPAYEIEHVIPKSRYYDNSFMNKIICEKEANADKSDMTAYEYICIKGGSTLANGTKVLDKEAFESLVLNMYVGLRQKIKNLLSYEVPKSFISSQLNNTRYISKKLLSLLDPIVRDDKDKDERSRHIIPMVGGITSQLKRDWGLNEVWKKILAPRFLRMNEKTQTEDFYEFRNNRIHLAGNETDIKRLDHRHHALDAIIVACTTRQHIQYINTYQDKTKRLSNRPKLFFKKSEDKYQGYIYPWTGFQNEVYTSLSSIIISFKQNKRVINRTKNYYQKYIDKNGLMVKSFVKQKKNNSFWSIRKPMHKDTVFGKRIIREYKDLSIDKAVDNINSIADKEIKHQIKKRFKDCKNDLTKLKKNLKNEPLEINQKKITKITVIVQNDDYSSNRTHLDESFSIEKILKKVLGKKVKEELVDHLSKYKNDPTEAFSANGIIDLNKARKIPIKKVTVIESLGKKTALNESGLNSKKYVEAAKGTNLFFIIYKNLVSGELEVSASSSVSFNDAMTLMKNNLPLAEVKEGFSYFILSPGDLVYVPEENGELKIPDQIDFSRIYKCVSFTNQQCFFIPHYVSISIVDKKEFSKNNKRERSTDDIMIKKYCLKLEVNRLGKFIKTK

SEQ ID NO: 1796 - protein, 1012 aa, unidentified
  REGION 1..1012: note = Description of Unknown: Cas Enzyme sequence
LLIQTKTILGLDVGTNSIGWALLETQGEKLLSITDTGVRIFPEGVAKDNKGKETPLNQERRLARNMRRLTQRKAGRMKHLLLTLQENNLLPHGNLFDLEGSLAILMREDPYLLRKKALYEPLELHFLGRVIYHLAQHRGFLSNRKNTSKDEEEKGAMKTSFLQTEETMEEMHALTYGEFLANVNPHEQRRRGQYILRQWIENEYEEIWSRQCIYYPEILTPKLREHIKRIIFYQRPLKPVNHLIGNCQLESHRKRAPMAFPEAQILRMLQIVNDTLIQYKGQTRELTEQERSILIEKLLLKNLKFNDARKLLKLPKGSSFNMENGTQKYFLGVSTVPKFIKIFGDKWDTLSSQDRSQIFEDWWSYTNEEALIRRMQKKWELPLEKAQNFASLELESGYSAFSRKALSKLIPLLKKGFSLQTSITKVYGGKGYQIGTNKLLPAENIRNPIVQRALSEIRKVVNNLIKEYGKPEIIRIELARDLKQNTAQRQEIFKKQEQRRKQREKIAHKITQEIGIENPSGRYIEKALLHEECKGICPYTGKSISYNDLLGAHPLFDIEHIIPFSRCLDNSFNNKTLCFVDENRNKKKDHTPWEIYSHDVEKWQEIIQRVEKFGNFEKLRRFKLKDVFNGGDDSAWEEFTSQQLNDTRYITRFATRYLNQLYDSDGKKHVQPIKSGKITAFLRNAWGLNNILGNGIKNRNDHRHHAIDAIVIGLTSTSAIKSLSIASQKSFRPGSFNPDSFPQPCNNFLNKTKKSIDKIIVSHRGSYKINGTLHKEKMYGFIKSNTKDKTVNAVIRKPIEDLSTNEVEKIVDPVVKKAVEERLKELACKEPKKAFAAKENHPFLLSKDGSQTLIHKVRVFQNVNPKTIGQEKNKRNVLTSNNHHLELYLSKNNSGKETFQGKVATNLEMVQSLAKLKKYNSRQSLYPFHDEKGNPLAMVLFKGDMVKVTLNGKDVICVILSISNGDIEMRLHNDARINSDRKHERIRFRSYTTLYNANIKKLTVSPAGFIRE

SEQ ID NO: 1797 - protein, 1188 aa, unidentified
  REGION 1..1188: note = Description of Unknown: Cas Enzyme sequence
MGKKVLGLDLGVGSIGWCLITLDKDEKPQSILGMGSRIVPLSVDDATEFTQGKAITKNKMRTVARTIRKGMDRYQLRREALKKVLREHAMLPDEALIKLPLLELWELRARAATPGEQLSLTELGRVLLHINQKRGYKHAKADEAAEAETKTGKETGYVAQVKGRYQILKEKGQTIGQHFAGELRANQQTAPRGVYYTYRIKEQVYPREAYIEEYDRIMAVQRVFYPELLTDALIGRIRDRIIFYQRPLKSCKQLVSFCEFEKKEKVIRVKHTNKEGVQELVEKTITIGPKVAPKSSPIFQVCKVWESIHNIRLYHPDGTERKLEQEEKQKLFDYLQKNDKLTLKNLYKTLGIKDKDEEEELWCDKLLEKGIAGNTTAAILRKALKGYKQYEGLLRFDLTIRDSHEADEDGVIRPIIDESYQNEPLYKFWHILYSIEDREEMRSALIGQLGIKAEDLDRGLMDALYKIDFVKQGYGNKSAKFICKLLPHLQEGKMYSEAAEAAGVRHSDSMTAQERDERSLLEEIPLLQKNALRQPVVEKVLNQMINLVNALKREHGEIDEVRVELARELKMSREEREEATKSNNAREKKNKDIADRIKGEYGLTPTKSRIQKYRLWEESDNSCIYCGKHVDVVQFLRGEEIEVEHIIPKSILFDDSLSNKVCACRSCNQEKGNRFAMEYIQAKGWEQDYIERVDSLFQGKKISYSKRQRLLMLPKDLPEDFIERHLRLSQYISREAQGILRKGIRLVSASEGGVTAKLRQLWGYDNILRDLNLERYRSMGETEVVTVEHRDGQRKDERIKDWSKRKDHRHHAIDALVVACTRQSYIQRLNRVNAEADRQEMDAFIKEQQEQKPSKKEKLSLLEHWLIRQPHFTTGEVTKHVEGILVSLRPGKRTISRGRNIYKRSGKTDVQRGVLIPRGALSEETIYGVIQAGGKDEVVCKYALRGLKAKDVDYIVDKALQEKVRERISQCGEKQAFAEPLYLDEAKTQEVRSVRCFTGKDQSKLVPLRYNAEGEAVGFVAPGNNHHLALYKDDDGNVVESIVTFWQAVERARYGLPIVVASPREVMEKALAIPGLPESVLKALPASNLRLMEVLRMNDMFLIGMTDEEIQVAIGAKDHSTLSRHLYRVQKLSSRYYVFRYHLETEVKDEKNTTGNIPKFYRIVSFNAYNKLNPRKVKIDLLGRILLV

SEQ ID NO: 1798 - protein, 1129 aa, unidentified
  REGION 1..1129: note = Description of Unknown: Cas Enzyme sequence
MQQAIRYALGLDIGIASVGWCVLGDNRIIDLGVRAFDKAETPDRGESLNKARRDARLLRRRLYRRAWRLTKLARLLAHDGLIASADVLKHQPAKGFLTPNLWKLRVEALERELSGEEWARVIYHLCKHRGFHWYSKAEQAKQESEAGAKGGSVKQGLSNTAKLMREKNYRTMAEMVLAEFPDAQRNKAGDYGKALSRVLLDAELGELFKAQRGFGNPHANTELESQIRGNGDQRTGLFWEVKPALSGEALLKMLGHCTFEKREKRAPKASFSAERHVWLTRLNNLRIVVNGVSRALDEDERRVALPLPYGYASGSVTYKQLRTALERYGLSHFNFIGINEDKEKDVLGKVPAFAALAKALKDAGLEAEWKRISADALEGQPEQLDDIARILSVFKDDVEIERELRKLSLPGGDKMIAALLPISFDTFSSLSLKALRKIVPKMEKGMRYDDAVKAAGYDHHSQIKRSEGKQQYLPPFYSGRDKGGKMLFRDDIDVPRNPVVLRALNQTRKVVNSIIREYGAPAEVHIEMARDLSRPKDERDKIGKLQKEFADRNEKDRRELASLSGGTRPKGREFEKWQLYREQSGKCAYCINALDLNRVISDPNYAQVDHALPYSRSFDDSNSNKVVVHTKCNQDKGNRTPYEYLDGASDSDRWQTFVAWVQGNHAYRQAKRNRLLRKNYGQEEQEGFKERNLNDTRYICKFFKQYVEDNLQLSSDSKRCVVISGQLTSLLRARWGLTKLREGSDRHHALDAAVIAACSHGMVKRMSDYARRKELEHVSDTCTYYDDDGQIIDIRKFRQQEVVDTHFPVPFPNFADELCTRVGLDRSTGKVLVDTSATTLRKSLKWLKDDNDNPRYDEDALSSVRPLFVSRAPQRRNGGAAHKDTIYAKRPTPDLPNRVTQTLRLTDLTLKHFGGDEYDEEKCQLTEPHRNEKLYRALHARLLAHDGKADKAFAEPFYKPTKSGAQGPLVRNVTLAINKMSGIPVRGGIAKNDSMIRVDVFQKTGKFHLVPIYASHAVANELPNRAAVAHKSEDEWIVVDESFEFLFSMYPKDLVKIKQKGAEFTGYFAGCDIGSANVSLWAHDRNQSLGKDGQFRGIGVKTALCFEKFNVDVLGRVYPAKPEMRRGLA

SEQ ID NO: 1799 - protein, 1148 aa, unidentified
  REGION 1..1148: note = Description of Unknown: Cas Enzyme sequence
MASKINNLGPLTFGFDIGIASVGWAVLGDSRIVDLGVRCFDKAETADKGKSLNLVRRNKRLLRRRLRRRAWRLTKLVRLFKREGLISDVNILKKQPAKGFKTPNLWQLRVEALDRKLNAEEWARVIYHITKHRGFHWISRADAKATDSDNESGMVKKGLAGTKKLMRQEEKKYRTAAEMVIAEFPDAQRNKPGDYSKALSRELLNEELRLLFQHQRELGNTHASAELEAVILGDGDKKSGLFWTQKPALAGKDMLKMLGHCTFEKAEYRAPKASFTAERHVWLTRLNNLRIVVDGKMRPLSEAERQIALPLPYNQAGDFKYKQLRNALTKAGLSEEFHFAGLSYPSERQKNEEKAKDPEDEKLVKLPAWQELKKTLKDADLETEWQQLSKAALDGKPQLLDQIATVLSVYKEDMEVETELRKLDLPNKDKLTDALLDVRFDKFSNLSLKALYRIVPLMEKGKRYDEAIANIPEYGHHSQLYKVGEGENIYLPSFYSGRGKDGRLTFNEDMDIPRNPVVLRSLNQARKVVNALVRKYGSPYEVHIEIARDLSRNFDERRNIKKEQEAYRERNEKDKATFAREFNITGQVKGKLFEKYQLYREQQGKCPYSLETLDLNRVINDEGYVEIDHALPYSRSFDDSKNNKVLVLTRENRNKGNMTPYEYLGGWENSVRWQNFVGFVNSTKAYRQAKRNRLLKKDFGENESQDFMERNLNDTRYICRFFKNYVEQFLKLNDKSDAKRCVVLSGQMTSFLRARWGLVKVRSDSDRHHALDAVVVAAASHAMVKRLSDYSRRKELEKVREGFVDIETGEFVHSAMFEKLEQHFPNPWPNFRNELLIRLSMDTPAALRTEIEKLGSYPVEALESLRPLFVSRAPQRRNSGAAHMDTIYAQPENVKAQGGVTQKVFVTDLKSTDMDKLIDPHRNERLYAALRIWVEGRVDNEKRAKEIEKSANADKREFTADEKAEIERLRALPRKPDKDGNPTGPIVRTVTMVIDKLSGIPIRGGIAKNDTMLRVDIFKSKKDNKFHLVPVYVHHTVKGLPNRAIVAHKDEEEWTEIDDNFVFLYSLHANDFVRVQQKGKPPISGYFSSCHRVTGSINLWAHDRNQQVGKGGMFEGIGVKTASSLEKFNVDVLGNIYPAPPEPRRDLA

SEQ ID NO: 1800 - protein, 1081 aa, unidentified
  REGION 1..1081: note = Description of Unknown: Cas Enzyme sequence
MTAFKPNPLNYILGLDIGIASVGWAMVEIDNEENPIRLIDLGVRVFERAEVPKTGDSLAAARRAARSIRRLTRRRAHRLLRARRLLKHEGVLKPEDFDENGFIKLLPNTPWQLRAAALDRRLAPLEWAAVLLHLVKHRGYLSQRKNEGETADKELGALLKGVADNAHALQAGDFRTPAELALNKFEKESGHIRNQRGDYSHTFSRKDLQAELVLLFEKQKEFGNPHVSDDLKNGIENLLMTQRPALSGDAIQKMLGHCTFEPAEPKAAKNTYTAERFIWLTKLNNLRILNQGNERPLTDAERTTLMDEPYKKSKLTYAQARKLLDLDDTAFFKGLRYGKDNAESATLMEMKAYHAISRALEKEGLKDKKSPLSISPELQDEIGTAFSLFKTDEDITGRLKGCLQSEILDALLKHISFDKFVQISLKALRRIVPLMEQGKRYDEACAEIYGDHHGRKNSEETLYLPPIPADEIRNPVVLRALSQARKVINAVVRRYGSPARIHIETAREVGKSFKDRKEIEKRQEENRKDREKAAAKFREYFPNFVGEPKSKDILKLRLYEQQHGKCLYSGKVIDIRRLNEKGYVEIDHALPFSRTWDDSFNNKVLVLGSENQNKGNRTPYEYFNGKDNSREWLEFKARVETSRFPHSKKQRVLLQKFDEEGFKERNLNDTRYVNRFLCQFVADHMQLTGKGKRRVFASNGQITNLLRGFWGLHKVRAENDRHHALDAVVVACSTVAMQQRITRFVRYKEMNAFDGKTVDKETGEVLHQKTHFPQPWEFFTQEVMIRVFDKPDGEPEFEEADTPEKLRALLAEKLPSRPEAIHEYVMPLFVSRAPNRKMSGQGHMETVKSAKRLNEGISVLRVPLTQLKLKDLEKMVNREREPKVYAGLKARLEAHKDDPAKAFAEPFYKHDKAGNPTQQVKAVRIEQVQKTGVLVRNRNGVADNATMVRVDVFEKAGKYYLVPIYSWQVAKGILPDRAVVAYADEENWTVMDESFEFRFALYSNDLIKVQLKKDSFLGYFSGLDRATGAISLREHDLEKSKGKDGMHRIGVKTALSFQKYQIDELGKEIRPCRLKKRPPVR

SEQ ID NO: 1801 - protein, 1082 aa, unidentified
  REGION 1..1082: note = Description of Unknown: Cas Enzyme sequence
MTVFKPNPLNYILGLDIGIASVGWAMVEIDDKENPIRLIDLGVRVFERAEVPKTGDSLAATRRLARSIRRLIRRRAHRLLRARRLLKHEGVLNPEDFNENGFIKLLPNTPWQLRTAALDRKLTPLEWAAVLLHLVKHRGYLSQRKNEGETDDKELGALLKGVADNTHALQAGNFRTPAELALNKFEKESGHIRNQRGDYSHTFSRKDLQAELVLLFEKQKEFGNPHVSDDLKNGIENLLMTQRPALSGDAIQKMLGHCTFEPAEPKAAKNTYTAERFIWLTKLNNLRILNQGNERPLTDAERTTLMDEPYKKSKLTYAQARKLLGLDDTAFFKGLRYGKDNAESATLMEMKAYHAISRALEKEGLKDKKSPLSLSPELQDEIGTAFSLFKTDEDITGRLKDCLQPEILDALLKHISFDKFIQISLKALRRIVPLMEQGKRYDEACAEIYGDHYGEKNSEEMLYLPPIPADEIRNPVVLRALSQARKVINAVVRRYGSPARIHIETAREVGKSFKDRKEIEKRQEENRKDREKAAAKFREYFPNLVGEPKSKDILKLRLYEQQHGKCLYSGKEIDLGRLNEKGYVEIDHALPFSRTWDDSFNNKVLVVGSENQNKGNRTPYEYLNGKDNSREWLEFKARVETSRFPHSKKQRVLLQKFDEEGFKERNLNDTRYVNRFLCQFVADHMHLTGKGKRRVFASNGQITNLLRGFWGLHKVRAENDRHHALDAVVVACSTVAMQQKITRFVRYKEMNAFDGKTIDKETGEVLHQKTHFPQPWKFFTQEVMIRVFGKPDGEPEFEEADTPEKLRALLAEKLPSRPEAIHEYVMPLFVSRAPNRKMSGQGHMETVKSVKRLNEGISVLRVPLTQLKLKDLEKMVNREREPKLYAGLKARLEAHKDDPVKAFAEPFYKHDKAGNRTQQVKAVRVEQVQKTGVWVRNRNGIADNATMVRVDVFEKAGKYYLVPIYSWQVAKGILPDRAVVAYAEEENWTVMDESFKFKFVLYANDLIKLTAKKNEFLGYFVSLNRATGAIDIRTHDTDSTKGKNGIFQSVGVKTALSFQKYQIDELGKEIRLCRLKKRPPVR

SEQ ID NO: 1802 - protein, 1055 aa, unidentified
  REGION 1..1055: note = Description of Unknown: Cas Enzyme sequence
MSNRPTILGLDLGASSIGWALLTARADGRFLQPDGLVAAGVRIFQAGMEGDLEAGREESRAKGRRDARLARRQTERRARRHRAVYNALRNVGLLPTYSDLEPSSSAGRHQTILRLDQEIRESGRLDGLARTIGVQGAADKLPYVLRAAALDHPLEPHELGRALYHLAQRRGFLSNRRSPRRDDEEGVVLSGISQLRDDMARTGSRTLGEHLSRIDPHQQRIRARYTARAMLIEEFEAIWAGQQRFHPSILTPELKKRIYHRIFHQRSLKSQSDKIGRCELEPKRRRAPWALIAAQRFRLLQSINNLRIRNDYGVEHELTPEQRQVLIAELDKKKEVTFDRIRRLLKLSADVTFNLERGGEKRLCGNETNAILAKVFGDRWWEFDVDTRNKIVEDLLSIQKAETLERRGREVWGLDAEKARAFANTRLPDGHCRFSRRALAKLLPHLEEGLNIQLAIERAYPGHRLVGRAQECLPPVKQVLPDLSNPAVIRTLTELRRVVNAIIGQYGRPAEIHIELARDLRRSKEERQRLQSDNRKQEAIRKAAAEEIREFLEGEEPTRRDIERLILAKECEFTCPYTGRKFSMAALFGPEPQVDVEHIIPFHLSLDNSFANKTLCFAEENRNVKRGRTPFDAYGGTPRWNDILERVRNFKSRLAGEKAFRFQLHGEELEEWLSDFASRQLNDTRYASRLALRYLSLLYGGTADGVDPEGTRRIMVVTGQTTAHVRNWLQLGSILNDGGEKTRDDHRHHAVDAIAIALTSQRTVQILSIASKKQLFRNGRLYGDPEPPWPTFLEDVRKTISRLVVSPRVERRVRGPLHAETFYSPRTEEGAKSREGRYVYYTKRLADLSPSMVEKIVDPTVRRLVIEALGGGEPKDVFKDESRLPCFFRRNGKTVPIRKVRIRDKVTVTPIGEGDRQRFVQTSGNHHLEVFEVTDAKGKTHWEGRVVSMLEAYERVRRKLPVVNREYVPGSRFLFSLVGNPGGDVIELDEPDGTRGLYIVESIWMADNLARVRIRPLNQARSAKSRIEPRINVLERRRCRKVSIDSLGNVTYAND

SEQ ID NO: 1803 - protein, 1054 aa, unidentified
  REGION 1..1054: note = Description of Unknown: Cas Enzyme sequence
MSERLTILGLDLGAASIGWALLSAREEGDSLRPDALIAAGVRIFQAGMEGDMAAGREESRARGRRDARLARRQTERRARRLRTVFNALRNAGLLPTYPGLDPSTSAGRHQSILRLDEEVCRSDRLDRLAQKIGVRGAADKLPYVLRAAALDHPLEPHELGRALYHLAQRRGFLSNRRSPRREDDEGIVLSGISQIRDDMARTGSRTLGEHLSRIDPHQQPIRSRYTARAMLIDEFEAIWASQQRFQPSLLTPELKKRIHHLIFHQRPLKSQSDKIGRCELEPKRRRAPWALLVAQRFRMLQSVNNLRIRNESGVEFELTPEQRQVLIAELDKKKEVTFDRIRRLLRMPDVTFNIERGGEKRLRGNETNAILAKVFGSRWWEFGHDTRNAIVDDLLSIHKAETIERRGREVWGLDAEKAREFANSRLPDGHCRFSRRALVKLLPHLEEGLTTQLAIERAYPDNRLVGRARDVLPPVKEVLPDLRNPAVTRTLTELRRVTNAIIKRYGRPARIHIELARDLRRGKDERKRLQSENRKQEAIRKAAAEEIREFRQGEEPTRQDIERLLLAKECEFTCPYTGKKFSMAALFGPEPQVDVEHIVPFHMSLDNSFANRTLCFAEENRNVKRGRTPFEAYGDTPRWNYILERVRNFKSRLAGEKLFRFQLHGDELNQWLADFSSRQLNDTRYASRLALRYLSLLYGGTTDGVDPAGKRRITVVTGQTTAHVRNWLQLGSILNDGGEKTRDDHRHHAVDAIAIALTSQRTVQLLSTASRNQLLRKGRLYGDPEPPWPTFLEEVQATISGLVVSPRVERRVRGPLHAETFYSPRTEEGVKSPEGRHVYYTKRLADLSPSMVAKIVDPTVRRLVTDALGGGEPKDVFKDESRLPRFVRRNGKTVPIRKARIRDRVTVTPIGNQDRQRFVQTSGNHHLEVFELTDARGRTRWEGRVVSMLDAYDRIRKDVPVVNREYVPGSRFLFSLVGNPGGDVIELDEPDGTRGLYVVESIWMTDDLARVRIRPLNQARQGKVRIEPVINILGRRHCRKVAIDLLGNVSYAND

SEQ ID NO: 1804 - protein, 1168 aa, unidentified
  REGION 1..1168: note = Description of Unknown: Cas Enzyme sequence
VKIGWGIDVGVASLGFAVIELDARGNPNKLLDGISIVYPAPTGAAERTRYKSARTQTARHKQRMKLLRAESIKLFGLKPDFDSPEAWPDLLDGVMENGNPRRNNSRVRLRAHGLSASLSSGDLARSILHIAKNRGQRLTRGLKDEARGDVGEQKKTAKERQSMANTANETKGALQVLGRELGIDGAAHPSQLLMNKAGDLGGTRLKKDREDMPVFTRAMMEAELEALLEAQRPYHAAMTEEMCKELKEIVFREADPKPPQIGKCRYGVKDKEGEIETRLPRGSDLFQRKRIYEEVNNLRLISSRTAKERSLSLTERNILTAILLNGRDLTAAGVRTSLGLKKDALADKTSLDISDTRKGRKTSGTLQCHPLAAAMAKADALEQWHGFTPEQREQIANLVRTEDDVEALRTAMNEFSLSEGAIGALCDARLPATYSAAGQTATHLLLDELKQDVVSNYEAEQRAGLESWDAEPPELDRLPYYGQILQGSCTGGNGELSGSLEERFGRIPNPVVHVGLNQLRKVANAYLDIYGKPERICIELARDLNKSAEDREEAEKQAAKNRIRNERYIKTLGAHKRKLTHNDLTRMKLHEMQDGECLYTGKPISMEHLFDGSVEIEHILPKADTRDDGIANLALAFKEANGYKAKRPPFDAFGQGYLGQDYANILKRAWKRGRGVHWRFKEDAMDRFTDQDSFTARFLNDTRYVAKMAAKYLATVCADKNGIISLNGRITSDLRREWGLGTVIRDLMVADGRLSKGDVKRNEGGETVEELKARRDRFNKIRWDHRHHLLDAIVAACVTRSDVQRLQTLAAQETEYKSAREVLSEIRRADPDFKNAGICWQDGFRTTVEAFLRGRGRGEGTDKPPVTAVAPKADHATTGQLHKETNYGVICAVPGQPGQYITRSHVSLLELTRENIEKIGVPTTALAAVGDAMAAGDPIWWGGADPLTALRDNLAPELDAMRGTLMSLMESAPETIFEDVRSDSGKDKVRAQWAVKEYIRQTGRRRYTKIELWSLRILKGPADHRSKPKRANRTGGNDRMVYFINAEGERDVEIVSTLDANAPGYKERWRREDGRALFTLRKNDLVEMAMDPKVPASLRGIYRVVSFSPTKTAFDAEFLPVEESRAPKEVPDKTRKRIRSLKSFREHAPVMILCDSTGRVRWRSPSMN

SEQ ID NO: 1805 - protein, 1054 aa, unidentified
  REGION 1..1054: note = Description of Unknown: Cas Enzyme sequence
MQPSRSEKRPYILGLDIGTSSIGWACIGTVREKPDSVIVCGVRRFDPGMEGTSTDFARGKENSRAVERRKARQTRRQLKRKATRRFKVFQILVSAGLLPEEAVKSRAQLTVYFEKLDSKLASEFGTHADHVSAQLLTYKIRSVAATQKVEPFALGRALFHLAKRRGFNSNLRGVSKEEDGIVRPAINTLKNTLNEKQQTLGQYFASTNPLLPGSRIRKRWTGRDMFQAEFDKIWEVQAQHHPALTEGLRVQLRKAIFFQRPLRSSKGLVGRCSLESKKRRLAAAHPVAQEVRMLQFINNIKVVMPGEIERQLDPTERAKALELLSNCGRMTLKQLKDGVGLPKKAKFNFDDDDDTFARGLDTVSKIQNLASGLWDRLNATEQERLFYELLSFNKRDALVRRLKGHWRLESATAEQLADIELEQGYAAHSKPALLKLKDALSTRSTADGRWPTYSEAKVVAGYSLVTEREKQEKLPPVKVHLPDVNSPAVIRALTELRKVVNELIDRFGTPMRINVELARDLKRTKKERKRLETQGKEQAKKRNGALLAIRQEFSGYAQKAGYDRGIEMMLLAEECNWQCPYTGEAIHGVRDLLGDNSRFDIEHIFPRRYLDDSFSNKTICLHDENRNVKKDRLPFEAYSGSPEKFREIIERVKRFRGPLATRKLERFLAQEVPADFSTRQLNETRYISVAAANYLGLLFGGKIDSSGKQRVFTLTGSLTSILRGKWGLNQILGSLDEKNRLDHRQHAVDAIVVACTNQKIVEELQAAAAEGWQLGSSRINSKIGSPWDRLLDDARKSVLSLIVSHRQHKRLNGPLHADSNYSVVQIEGKSRAKKREPLERLTDKAIESEDIVDPTIRQIVQNSYRQLKAIHGAGKLPKDVFAAIENHPFIENRDGTKTPIHSVRIWVREKPIQLRPGDRTRNVSSTGGSNFCAKILPILNATGDEVGWKDEVISRIDASRELFGETTENNELFRLFAHEHILMLDANKKLEVYKIKSVSSGDYEVRAHWDGRTDKEGRIRITSGVLKRRAFQKVLVSPTGIVSDYFSGEIIDIN

SEQ ID NO: 1806 - protein, 1136 aa, unidentified
  REGION 1..1136: note = Description of Unknown: Cas Enzyme sequence
MDEKLDYRIGLDIGIASVGWAVLQNNSDDEPVHIVDLGVRIFDKAEIPKTGESLAGPRRAARSTRRRLRRRKHRLDRIKYLLSEEGIIDIEAFMARYHSENLPDVYQLRYEALDRKLSDDEFAQVLIHIAKHRGFRSTRKAETAAKENGAVLASTSKNQALMQEHHYRTVGEMMYLDESFRINCPWVESGYVLAPRNKAEDYRHTILRSMLVDEVHAIFEAQRTLGNTKASPQLEEKYLTIMESQRSFDMGPGLQPDGTPSPYAMEGFADRVGKCTLEKEEMRAPKAAYTAEYFVALQKINHTRLIDANGEVRNFTAEERECLIDMLHHQREIKYAAARKALKLDTNIRFQNLNYRGKKNDDAADKMAETEKAKFIGMPNYHDYKKYLANRLHEIPEPTEQELLDEIGRILTCYKNDDTRLKYLAELGLTAEEMDSLLAFTPAKFQHLSIKAMRKIIPYLEEGYTYDKACQEAGYDFKADGNGTKNKLLKGDAVNEIINEITNPVVKRSVSQTVKVINAIIQRYGSPQAINIELAREMAKTFDERRKLEKDMQERQSSNDKVKERIKELGVISPTGQDILKYRLWEEQGGRCMYSGKVIPIAELFDRAGGYDIDHILPYSITFDDSYRNKVLVTAQENRQKGNRTPYEYMCEDEERLKEFEVRVRTTIRDYRKQEKFLKRHFTEEEKKEFKERNLNDTKYITTVVYNMIRQNLELAPFNKPGKKKQVRAVNGAITSYLRKRWGMPQKNRETDTHHAMDAVVIACCTDGMIQKISRYMKGRELKYARGYEYYDEETGEIFSPGEMSRDEWDKEFGVRIPLPWPTFKTELEIRMGEEDPLNFLNTHTDVRTEIDYPAWMYGSEDGKEKPVIRQIFVSRMPNHKVTGAAHADTIRSPRHFADDGIVLTRTALTDLKLNKDGEIEGYYNKESDRLLYQALKHQLELYGGDAKKAFAQDFHKPKADGSEGPVVRKVRIQKKLSMGVSVNGGNGIAENDGMVRIDVFCENGKYYFVPIYTADVVKKKLPNRAATHTKPYSQWRIVDDKDFVFSLYSRDLIHVKSKKGIKVNLVDNSQILKNEIYAYYTAADISTASIVGIGHDSGFKFRGLGIQGLEVLEKCQVDVLGHISVVKQEKRMGFS

SEQ ID NO: 1807 - protein, 936 aa, unidentified
  REGION 1..936: note = Description of Unknown: Cas Enzyme sequence
MDSNLDYRIGLDIGIASVGWAALLNSSKGEPIHIIDMGVRIFDKAENPKTGMSLAAPRREARTTRRRLQRRRHRLERIRWLLCDEGIIRNIDAFMERYHSPSLPNVYRLRYEALDRLLEDEELAQILIFIAKHRGFHSTRKSELKDKDNGVVLQATSSNKELMEAKGYRTVGEMIYLDEKFRKECSWVYNGYILTPRNKSENYQHTILRSMLVDEVKYIFNCQRKLGNKKATQCLEEKYIDILTSQRSFDIGPGLLSDGSKNPYSVEGFESKVGKCTFEKEELRAAKATYTAEYFVALQKISHIRLENTYGEKRNFSDDERHTIINLLHTQKAINYTTVRKKLNLEENIRFYNLNYSSKKSSSVEEQIKDTEKVNFISMPFFHEYKKCLENQFDVFNDVNIPMLMDKVGHILTCYKNDDSRTAHLKEIGMNDETIDKLLLLNPSKFQHLSIKAMRKIIPYLEDGLTYDKACLAAGYDFKGDSNCNKLKLLKDKNITEIINEITNPVVKRSVSQTVKVLNAIILKYGSPQAVNVELAREMAKNFNDRQKLEKEMEDNQKNNEAIKRQIQELGIQYPNGQDIIKYRLWLEQGNISMYSGEPILLERLFDKQGGYDVDHILPYSITFDDSFNNKVLVEASENRQKGNRTPFEYFGEDTERWNNYETLVANTIKNSKKRDRLLKKHITSDERNEFKERNLNDTKYITTVVYNMINNYLELKPFNDTSKKKQVWAVNGSITSYLRKRWGMPLKDRSTDIHHAMDAVVIACCTDGMIQKITRYTQGRELRFARGIEYVDEETGEIFSPENMSHDEWDEIFGVMIPLPWNTFKTELEVRFGDNPKEFLDTHLDVSSQIDYPNEIYNEIRPIFVSRMPNHKIGGAAHKETIRSPRHFEDEGIVITKTALKDLKLKDGEIEGYYNKESDILLYNALKARLEAYNN

SEQ ID NO: 1808 - protein, 1056 aa, unidentified
  REGION 1..1056: note = Description of Unknown: Cas Enzyme sequence
MSSASRADQCVLGLDIGPNSIGWALVAAENERPSGLVAAGVRVFDAGVEGDIQSGRDASRGVARREARSRRRQLERRRRRLNRLAHVLQAAGLLPPGKVEAPADLLVFFDQLDRDLFPAHPAGTEAHVQLYRLRARALDEKMQPYEIGRAIYHLAQRRGFKSNKLVRAALAAEEEKEDGKVKDAIKHLAQDMRESGARTLGEYLSSLDPSEQRIRGRWLGRAMLEEEFAQIWTGQVAHYPELLTEDLRRRIYEVIFFQRPLKLQRHLIGHCDLERGRQRARLCLLAAQRFRLLQKVNDLEVITPQGEILGLTPAQRATLLDVLESQGDLKFGAVRKLVGLSRYHKFNLEREGDDRIIGNRTAAKLARVFGPRWASLSGAERDRVVDDVRSITKTAALVRRGKNAWGLDDDAAGQLAEVTLEAGYCNLSRQALAKVLPLMEGGMQYATARKQVYGEAPSPEPHDRVPPLRDEVEPRNPAVERALSETRRVVNAVVARYGKPGRIRIELARDLRKNRKQRQAIHQRNRDNQSAREQAAKAIIQRAGIPRPTRRDIQKYLLAQECGWRCPYTGREIAFEALFGDSPQFDIEHIIPFHRCFDDSFFNKTLCEVNFNRQVKRDRTPWEACADTPNWPAILERVGNFIGDARAEKLKKFKLTTAELETIDDFASRQLNDTRYASRLARQFLGALYGAGAMGVDPQGKLRLEAARGQVTSVLRNAWKLNVILGGGEKTRDDHRQHAIDAVVVALTDPATVKRLSDASARDYLHRGAARMEAPWTGFLDEVREAIESMVVSHRLSRPIKAALHQETHYSKVHPDRDGKPHVHVRKPLEKLSQHEVGAIVDPAVAVAVRAKLDELGIKDPSQAFKRRDNHPALKAKDGRDILIHKARIRVAQSVACVGAGPRERRVALASNHHIEIIETTDRKGAPRWQGVVVSTFEAARRLRDGEPIVQRDHGEGKRFLFSLAGGDIIELDVEEKDKTGSEGDGPKRGLFVIRTVSQGAQGRIELDFAGINDARPKKAIQACRDWGRSPVSRLQQRNCRKVVVTPLGEVRRAND

SEQ ID NO: 1809 - protein, 1043 aa, unidentified
  REGION 1..1043: note = Description of Unknown: Cas Enzyme sequence
MRQTSSNETVLGLDLGSNSLGWALLEFEGNKPKAIIDCGVRIFQAGLEGDIESGNAVSRARERREKRSLRRQTDRRKRRRLHLLHLLQGLQILPEGTPEEVFPTLDKSLIEKYSQIEGIPKKTLAGKLPYWLRARALENPLEPFELGRVIYHLGKRRGFLSNRKTPAKQEEGIVAKEIDELRHEMEKAGSRTLGEYLAGLDPQEDRIRSRYTQRGMFQEEFEAICTFQKKFHDRLNEETIARIGKTIFFQRPLKSAKKLVGHCELEPNSRRAPWATLEAQQFRYFQMVNNSSIKTVDDLAFRPFTDTERTILIDNLERDGDLTFAKAKKLLGKDSKTTAFSFEAGEESRFLGNRINKLLKGIFGNDWFGFDKEKKESILADLRSYRDSQALAKRAQEVWGLDPQKAQEFASIELEPGYCALSRKAIRKLMPYLQKGAPYASARIEVYGEFLKTRIAEDFLLPVKQLFELRNPVVERSLTELRKVVNAVIRKHGKPDRVKIELAREMKQSQKKRREITRTNRLNEKRRLEAAQRIVKEVGITNPSRNDILKVMLGEECNWICPYTSKPVSMMALFGDSPQFDIEHIIPFSRSFDDSFANKTLCYVDENRTVKRNKSPWEAYHGSSRWEDIINNVKRFKGDLRDSKLERFLKRPDELEDMDGFISRQMNDTRYASKLAMHYLGTLYGGLYDKDKQQRVFAVTGQVTAILRNAWSMNSILNDGGFKERGDHRHHAVDAVAIALTSPATIRGLSEAALPSFERNAYRKRFKPFQMPWSTFLQDLEKRIAGILVSHRVNNKVNAALHEETNYGIVKSSTEKAFCIRRRLDSLKASEIDQIIDKRIAQIIRNKLAELGHTEPSKAFVSPENHPHFVSAKGEKIWFHKVRIYVSVKPKKIGEGPAERYVTPAFNHHMEIFEITDSKDSHKKKWECEVVDTLGAMDRLRCGQPVVRKKAEGKRFLFSIATGDTLRLNNPGEWPEYLHVRTVCKSNEGNIEIAGVSISDARKKKDTLKAKEFYRIRSTTSLQNLDPQKVTVLPCGDLLVASG

SEQ ID NO: 1810 - protein, 986 aa, unidentified
  REGION 1..986: note = Description of Unknown: Cas Enzyme sequence
MDRTRGEKSLNQDRRLSRSLRRQICRRARRKAKLLHALQEIGLLPADESQLKLLLQNEDPYKLRALALDEKLEPWQVGRALYHLGQRRGYLSNRKTGSDKDGKVAAGISGLQNNIDAANCRTLGEYFHKVDPHQERIRGHYTSRAQYEHEFELIWATQARYHPAVLDIANKKRIKEAIFFQRPLKTQKFLVGGCEFEPGRKRAQKGSLAAQEFRLWQTINNLKILYSDGSERYLTDEERVSLHDELQARKNLSWAGVRTLLGLLESTRFNLERVRKSGLQGNITAATISSVLGKKTWKALGSQGQEQLVADLLNIENESALRNRLRRAYGVDSDKEDKLIAKSLGLPKGYLHVSAKAARKIAAELARTGHDNGRGLTYDQACSAAGYIHTKPLEKGNRNLLPFPGRPARDKRDRTVEHDPLVANSLVTVDNLRNPLVERAIYQLRRVVNAIIKKYGKPALIRIELARDLKSSKKQRENYEKQQKINEEANKRAAKALVDYGIPNPSRSDLLKYRLWEECGRTCPYTGKSISQDALFGDHPQFDVEHIIPYTRCLDDSYMNKTLCYRPENEAKGNLTPWEFYHQNEKSYEAVLQRAKKLPYPKFKRFARDALKDLDEFVSQQLNETRYISRKAVEYLSQLDGVRIETVKGGTTALLRRAWGLNNILDAGGEKTRMDHRHHAVDAIVCALTDRAAVQKISRYSAMSQGRLRISGYPEPIKDIRIKVENILNKVLVSHKTLRKVSGPLHDDTLYGKGLNEEGESRAVIRKKISELNEKDILGEGRSIIRDPAIRRLARAHLKKHGTFKNAFQNKDNPFGRTTRSGKFIPINRVRVLTDRSVVPIGKPGKKGRSGTLRYVWTRNNHHMEIFEVRKPSGETVWDARVISVLEAMRRLQRGEPLVRRDHGKDKKLVMVLHQNDMVKLSHNGEEVLCRVEKMDQNRNIVFRRHQDADKDWRSSIKKRPETLRQANPRKIEVNVLGEIIQESAV

SEQ ID NO: 1811 - protein, 1043 aa, unidentified
  REGION 1..1043: note = Description of Unknown: Cas Enzyme sequence
MRQTSLNKTVLGLDLGSNSLGWALLEFEGNKPKAIIDCGVRIFKAGLEGDIESGNAVSRARERREKRSLRRQTDRKKRRRGHLFHLLQELHLLPEGTQGEVFPSLDKSFIEKYSHAEGLPKKILASKLPYWLRARALEHSLEPYELGRVIYHLGKRRGFLSNRKTPAKQEEGIVAKEISELRDEMKTVGARTLGEYLAGLDPQEERIRSRYTQRGMFQEEFEAICTFQKKFHHGLNEDNIARIGKTIFFQRPLKSAKKLVGHCELEPNSRRAPWATLEAQQFRYLQMVNNCSIKTKDDLSFRPFTDPERTILIDHLEQDGDLTFAKAKKLMGKESKTTAFSFEAGEESRFLGNRINKALKGIFGNDWFAFDKEKKESILADLRSYRDAQALAKRAQEVWGLDSQKAQEFASIELEPGYCALSRKAIKKLLPYLEQGVPYASARIEVYGALLKPRLAEAFLLPVKQLFEIRNPVVERSLTELRKVVNSVIRKHGKPDRVKIELAREMKQSQKKRKEITRTNRLNEKRRQEAAQKITKEVGIKNPSRNDILKVMLGEECNWICPYTSKSISMMSLFGDSPQFDIEHIVPFSRSFDDSFANKTLCHVDENRAFKRNRSPWEAYHGSPKWEDMLDNVKRFKGDLRDSKLERFLKRPEELEDLDGFISRQMNDTRYASKLAMHYLGTLYGGLYDKEKHQRVFAVTGRVTSILRNAWSMNSILNDGGVKERGDHRHHAVDAVAIALTSPTTIRGLSEAALPSYERNAYRKRFKPFQMPWPTFFQDLENRISGILVSHRVNHRVNAALHEETNYGIVKASKEKCFCIRRKLDSLRASEIDQIIDKRIAQIIRDKLSELKQTDPSKAFVSTENHPYFVSAKGETIWIHKVRIYVSTNANKLGDGLTERYVTPRSNHHMEIFEVTDLQDPCNKRWECEVVDTLGAMDRLRKGQPVVRKEAEGKRFLFSIATGDTLKLHNPGEWPEYLHVRKVSKTLDGRMEIAGVSINDARLKKDIVNTKEFYRIASVIKLQNLDPQKVTVLPCGEVLVAKG

SEQ ID NO: 1812 - protein, 1202 aa, unidentified
  REGION 1..1202: note = Description of Unknown: Cas Enzyme sequence
MEKILGIDTGTNSLGWAIVEKSEDGYKLLDKGVNIFQEGVKLEKGIESSKAADRTSHRSTRVRYYRIKLRKIRLLKVLSDNHLCPPVSTEELKLWRLKNIYPNNELLRQWEQTDDMADKNPYTYRYRCLTEKLDLTDLTQRYVLGRALYHINQRRGFLSNRKSDGGDEEGKVKTAISNLSEEMKEAGCQYLGEYFYKLYHRGERIRCHYTARNEHYFNEFKAICKKQCLGDDLVKALKDVIFFQRPLKSQKGVVGHCVFEPKKPKCPASHPLFEEFRMLCFLNNIKIQTPKDKDLRPLTEEERKKVMPKFYRKSKPSFNFEDIAKELSGKGKYAYYKAPKGKPYLFNYHMDTSVAGCPVTSGLRDVFGEDWVDALCEVYDKALGKTRLQIINDIWHVLFDFSDEYKLIEFGKTHLQLSDEDAKKFSQIKVCSDYASLSLNAICKILPYLRRGMIYSLSTFFANMGAVVPANIWKEKANRDKIVKEIISAIADKENNAADSRTTERVIKDYLISRYGVSEEETDKLYHPSMVESYPHVPENENKLGSPRIDSVRNPMAMRSLFRLRHVVNTLLAEGKIDRDTTIHIEFARDLNDANKRQALYRFVKENENERKKIKAEILQLYKDETGLTIEPTDTDILKYQLWEEQNHRCIYTDEQISITDFLGDNPKYDIEHTIPRSAGGDSTKMNLTLCNSKFNREIKQTLLPSQLANYKDILLRIQGWKDNYEELDKRIRKIRTSSSMSKEQKDSLIQKRNLLKLRRDYWYGKYQRFLMTEVPEGFSRRQGTDISVISKYGRLYLKSFFNRVFVVKGLATSDFRKIWGIQDIYSKKERVNHVHHCIDAIVIACLGPGEYGKLAEYYRDEENHEWYGASKGHIAAPWQTFQEDMRKIQKEIVVSHYTSDNIGKTGRHRILLNGKKVWADGDSARASLHNDTYYGAIERNGKVKYVVRKPLDNNFKDSDVDKIVDDMVKTHVKEAIQQYGSLKDAISHGIWMNKEKGIPIRKVRCFTPLKRPLDIRHHRDVSTKVYKQQFHVTSDTNYAMAIYVGQDKKGKEKRSFELISNLDACNYYRKSNDKEIVDNNLVPLAKNDFPLTYVLKKGTMVLLYENTPDEIRECSTEGLVKRLYKVTGLWSNVVSGHEYGIIVLLHSQEARPKGELKAKNGAYKQNEEFRSRIILQHTQFKALVAGYDFQINDVGEIEWLR

SEQ ID NO: 1813 - protein, 1249 aa, unidentified
  REGION 1..1249: note = Description of Unknown: Cas Enzyme sequence
MEKAIKNTTRVILGLDLGVGSIGWSLIEVDEAGKPLRIIDMGVRCVPLTTDQSDGFVKGNGKSVNQGRTECRTARKGYDRYQLRRADLNEAITELGMAYGAELVALPPLTLWKLRADSATTGCRMALPEIGRVLMHINQKRGYKHAKSDLGDKKQTEYVASVNKRYKEIQDAGLTVGQAIYARLKESAVTGENGKVQCTYRAKGEVFPRAAYEAEFDAVMTAQQPFYPDILTDEVIERLRNIIFYQRPLKSCKHLVSICDFEKRKYVNAQGAVVYDGPKVTPRTSPLAQLCSIWESVNNIVLKSRRNTSTGSLFDTAAEGRYELSIDEKRDIVAFMNTHEKLTLTDLLKILGLSKKHGFSAGESVGKGLKGNTTYCRLKKALGNYRGAEDLLRFEVHDVDTGKVDEETGEIIVETSNDLMEQPMYKLWHTVYSINDKEELRAALSKRFGIDDDEVVERLYAIDFTKDGFANKSARFMRRLLPYLERGLMYSEACKYINVNHSNSLTSEENLKRELKSRLEALKKNELRQPVVEKILNQMINLVNAVFDKYGTVDEVRVELARELKRSKDERNDMWIKNSKRERENKQYAELILEHNIAPSKSRIKKYRMWWKESGKLCMYCGQPVNFKEFGEGNGAEIEHILPKSLFFDNSFSNVVCACRKCNQDKGNMTAYDYVKKMLPDKLESYVEKVEELYNKHDISKTKHDRLLMSQSDIPTDFLNRDLRETQYISKKAKELLLSVVRDVTVTTGSVTDFFRHVWGYDEILHDLNVEIYKRSDRTQPVEYIHNGQRHVEERINDWSKRLDHRHHAIDALTVALMKPAYINRLNRLNTERDKMYEELKAQSPEYQRKHSLLEDWSARQPHFKVGEVVEAVKRIAISLKAGKKVVTPGKRLVYKNGKRVVMQTGVLVPRGALTKESVYGKIKVLERNRPLKQLLASPDEIADAAIRDEIMELLKLNGNDQKKTLNYLKKHPIVVNGREVTAADCYVDRFVIKTDIKALKSKDVDAIVDEGVKRAVRARMAECGNNDSAFQKSLAERPVYVDKNNRYPVHTVRLFDSWSPDSIAPIRKDPSGRPIGYAAKQNNHHVALYKSYDNKMHEIVLPFWDAVLRCRYNLPVVVEKPYEVWDNIAGRGEELPDDVLATLPQPGWKLFMTMQLNEMFILGLSDGEFMEAIKEDNKALLTSHLYRVQKLRASEYYLRLHTQTTVDKANEAKDKESRLLYVVSSMGALQALNPIKVRVTYLGEIIPI

SEQ ID NO: 1814 - protein, 1499 aa, unidentified
  REGION 1..1499: note = Description of Unknown: Cas Enzyme sequence
MKKILGLDLGTTSIGWAYVIEGETPQQSSIQKIGARIIRYDNFSKVDKSGKVSESKKPEDDFAAGKGLSPNAGRTLKRGARRRLDRYQLRRDNLIEILAQAGIITKETKFAEDGKHTTHETWWLRANAVTEAIKKDELARVFLAINKKRGYKSSRKAKNEDEGVAVDGMAIAKRLYEENLTPGQLVYQLLQTGKRAIPDFYRSDLQAEFDKVWSIQNQFYPEIFNDEFYKELQDKGQRATAAIFWGRYKFNIAEIKDLEGKLKNEKTVKLSVRDKKKLQAYNWRSRAVSEQLEKEQAAYVLTEINNNLNQSSGYLGAISDRSKELYFNKESVGQYLYKQLAKNPHTRLKNQVFYRQDYLDEFEAIWTEQSKHHSELTNELKEEIRNVVIFYQRKLKSQKGLVGNCELENKMVEFKRENFTVGKCPFINYSDKDIKIFEANSSTKTKIKDSLKDAFFRKFEKKDKISIKDFKKTFGIEADKKLYFQQFTKVAPRSSPLFQEFKIWQVLHNVEFRNKGTKEKRQPDLEGKQILFDELNIKGNLSASKVIEILGYKPKDWEINYSVLEGNRTNKVLYEAYLRILDLEGYDVMDLLKVKSNKDEVELDDISASASEIKEMVKAIFETLSINTGILEFNAELDGKAFEEQKSYQLWHLLYSYEGDDSPSGNEKLYELLGKKFGFKPEHARILANVTLSDDYGNLSAKAMRKIYPFIKENTYSEACVWAGYRHSAASLTKEEIANRPLNDRLELLKKNSLRNPVVEKILNQMVNVVNTLIDENSKKDPNFRFDEIRIELARDLKKNAKERAEMTTNINAAKSQHDKIVKLLQSEFGVKNPTRNDIIRYKLYDELKNNGYKDLYTNEYIPREILFSKQIDVDHIIPQARLFDDSFSNKTVVFRKDNLEKGSRTAYDYIESKYGNYKAEEFVARAKSLFDLGQKNKEEGISKAKFQKLQKRERDIGDGFIERDLRDTQYIAKKAKNMLFDITRSVVPTTGSITDRLREDWDLINIMQELNFDKFKKLGLTETVEKKDGTTKERITDWTKRNDHRHHAMDALTVAFTKHNHIQYLNHLNARYNQADEFHANIKAIEVKETYIVKDDKGNSKRVFNLPIPHFRQVAKEHLESVLISHKAKNKVVTKNKNRTKLKTGQKVTTELTPRGQLHKETVYGKYRFYENKEEKVSTKFDLETIERVTNPTFKSLLLQRLVENDSDPKKAFGGKNVLSKSPIYLNKEKTEILPEKVKLVWLEEDYSIRKDVTPENFKDEKTIEKILDKGVKRILLNRFKAFGNDPKKAFSDLDKNPIWLNKEKGISIKRATISGVKNAEPLHYKKDHLGNFILDEKGYKIPADFVSTGNNHHVAIYTDEVGNLQETVVSVFEAVERVNQKMPVINKSYNQDLGWKFLFTLKQNEYFIFPNEKTGFNPNDVDLLNSKNRKLITPNLFRVQKIATKNYFFRHHLETSVEEKKELKDIAYKPQLGLNAIKNIVKVRINHLGDIIGIGEY

SEQ ID NO: 1815 - protein, 1210 aa, unidentified
  REGION 1..1210: note = Description of Unknown: Cas Enzyme sequence
MSKHVLGLDLGVGSIGWCLIALDAQGDPAEILGMGSRVVPLTNLGDDKAFSKGKAFTASQERTARRTMRRGFARYQLRRYRLRRELEKVGMLPDAALIQLPLMELWELRERAATAGERLTLPELGRVLCHINQKRGYRHVKSDAAAIVGDEGKKKKDSNSAYLADIRANDEKLQDEHKTVGQYFAEQLRQDQSESPTGGISYRIKDQIFSRQCYIDEYDQIMAAQRVHYPDILTDEFIRMLRDEVIFMQRPLKSCKHLVSLCEFEKQEKVMRVQQDDGKGGRQLVERRVKFGPKVAPKSSPLFQLCRIYEAVNNIRLTRPDGSPRDITPEERDKLVAYLQTYEAPKPPKRKPAKAKPVKLAHPKLDLDKLKELLCIEEELLADKLLEEGLKGDATRIALSIILQPYPQYHHLLDMELETRMMTVQLTDEETGEVTEREVAVVTDSYVRQPLYRLWHILYSIEERDAMRRALITQLGMKEEDLDGGLLDQLYRLDFVKPGYGNKSAKFICKLLPQLQQGLGYSEACTAVGYRHSNSPTSEEIAERTLLEKIPLLQRNELRQPLVEKILNQMINLVNALKAEYGIDEVRVELARELKMSRKERERMARNNKDREERNKEVAAKIRECGLYPTKPRIQKYMLWEEAGKVCMYCGRTISLSQCLNGDDMEVEHIIPKSVLYDDSYGNKTCACHECNQTKGNRTALEYIRAEGREAEYMKRINDLLKEKKISYSKHQRLRWLKEDIPSDFLERQLRLTQYISRQAMAILQQGIRRVSASEGGVTARLRSLWGYGKILHTLNLDRYDSMGETERVSREGEATEELRITNWSKRMDHRHHAIDALVVACTRQSYIQRLNRLSSEFGREDKKKEDQEAQEQQATETGRLSNLERWLTQRPHFSVRTVSDKVAEILISYRLGKRVVTRGRNIYLRHGKKCVQSGLLVPRGPLSKETVYGQITVNGEQQIVCKYDLHSLKAKDVDYVVDLALRKRLKELLAQHGGKEKEAFAGDVYMDEAGTQGPIRSVRCFTGLDRDKMKAVKYDEQGDAVGFVSPRNNHHLAIYRTPKGKLEESIVTFWDAVDRARYGIPLVITHPREVMEQVLQREDIPESVLSLLPSSDWMFVESIQRDEMVLVGLSDEEIRQAVEAQDYCKLSEHLYRVQKIATGNYMVRYHLETDTDMNRSGRIPKLYQLSLTSYEEKNVRKVRVDLLGRISLL

SEQ ID NO: 1816 - protein, 1191 aa, unidentified
  REGION 1..1191: note = Description of Unknown: Cas Enzyme sequence
MSKHVLGLDLGVGSIGWCLIALDEQEHPAEILGMGSRIVPLTADDLNEFSQGKAISKNQKRTTQRTIRKGIDRYQLRRKVLSKKLGDHGMLPDEALMRLPVLDLWELRARAASPGEQLTLPEIGRVLYHINQKRGYKHAKSDEAEEAAKRGKETGYVAAVKGRYAELQQEGTTVGQHFALKLKKHRQESLSGGFFYNYRIKDQVYPREAYIEEYDRIMEVQANFYPEVLTPAFIQELRDQVIFFQRPLKSCKGLVSFCEFEKQERVVKLKQINREGKEELQERKITIGPKVAPKSSPIAQLCKLWESIHNIRIYYPDGKERPITLEEKKKLLAYLQTHDKLTFTALKKAIKISDREGLWCDKLLKGGVKGDTTRLILRKALAGYKKYEGLLRLDLKLRDAQVADPETGLIRSIVDESYLSEPLYRLWHILYSIEEREAMRGALIDQLGFQEEDLDEGLLDKLYQIDFVKQGYSNKSAKFICKLLPHLQEGYGYSEACERAGKRHSASSLTKEELEERPLLEHIPLLQRNALRQPIVEKILNQMINLVNALRQKHGSIDEVRVELARELKMSREEREDTSKRIRSREKENKEIAERIKEYGLYPTKSRIQKYRLWQEAGEQCLYCGKSIDVVQFLRGDGVEIEHIIPKSILYDDSSANKTCACSRCNKEKDNRTAYEYILAKGQEAEYRDRLESLFHDGKISYSKRRRLLWRKEDIPSDFIERQLRLTQYIARQAQEILRQGVRRVYASEGSVTAKLRHLWGYDRILHELNFERYQSMGETELVRQEEKDGSITETEKIKDWSKRKDHRHHAIDALVVACTRQSHIQRLNRLNSEEDSEQMLQEVQGQWRTTAEKHSLLENWLILQPHFSHQTVRAKVAEILVSFRPGKRTVSTGRNTYHRSGKNETQAGVLIPRGPLSEESLYGRILRNGEPTYVKKVALASLTAPQIEQIVDPKLRREVMARVNQSGDAAKPDLKLITATPLYSDAAGTQQVRSVRVAVENGKNSIIPLYYNDSGEAITFVKPGNNHHVAIYRTPEGELVESCVTFWQAVDRVRYGIPMIIRKPREVLDQVLQKKDVPEALLASLPDSDWEFVEHLQANEMFLIGLTDEEIQTALEQSDLLTLSNHLYRVQKLSSEDYVFRYHLETEVEDIKNKTGIIPKFYRLRGAKSYEKENPRRVKVNLLGEMSLPE

SEQ ID NO: 1817 - protein, 1198 aa, unidentified
  REGION 1..1198: note = Description of Unknown: Cas Enzyme sequence
MSKHVLGLDLGVGSIGWCLIALDEQEQPAEILGMGSRIVPLTPDDLNDFSQGKAISKNQKRTTQRTIRKGLDRYQLRRKVLSEKLAKHGMLPDKDLMQLPVLDLWELRARAASPGEKLSLPEIGRVLYHINQKRGYKHAKSDEAEEATKRGKEQGYVATVKGRYAELQQEGTTVGQHFARKLKEHRQESPSGGFFYNYRIKDQVYPREAYIEEFDRIMEVQSVFYPEVLTSAFIQELRDKVIFFQRPLKSCKGLVSFCEFEKQERVVQLKRVNREGKEELQERKITIGPKVAPKSSPIAQLCKLWESIHNIRIYYPEGEERPITLEEKRKLLAYLQTHDKLTFTALKKELKISDRERLWCDKLLKGGIKGDTTRGLLRKALAGYKRYEPLLRMDLKLRDSQEVDPETGLIRPIVDESYLSQPLYRLWHILYSIEEREAMRRALIDQLGFLEEDLDGGLLDKLYQIDFAKQGYSNKSAKFICKLLPHLQEDHGYSEACELAGKRHSASSLTKEELEERPLLEHIPLLQRNELRQPIVEKILNQMINLVNALRQKYGSIDEVRVELARELKMSREEREETSRRIRSREKENKEIAERIKEYELYPTKSRIQKYRLWQEAGEQCLYCGRSIDIVPFLGGDGVEIEHIIPKSILYDDSFANKTCACSRCNKEKGNRTAYEYILAEGREAEYLDRLETLFHDGKLSYSKRRRLQWKKADIPADFIERQLRLTQYIARQAQEILRQGIRRVGASEGSVTAKLRHLWEYDDILRELNFERYQSMGETEIVSQEEKDGSITKSERIKDWSKRKDHRHHAIDALVVACTRQGYIQRLNSLNSEEDSLQMQEDSKRVREKMGGQRRPTADKHSILENWLILQPHFSHQEVKSKVAEILVSFRPGKRTVSTGRNTYLRSGKKVTQAGVLIPRGPLSEESLYGRILRNGEPTYVKKVALESLSEAQIEQIVDPKLRREMIARAQPSDGAKLNPKLLLATPFYSDAAGTQRVRSVRVAIEKGKNSIVPLRYNESGKAITFVNPGNNHHVGIYRTPEGKLVESCVTFWQAVDRVRYGIPTIIRKPREVLDQLLLRDDIPEALLANLPASDWEFVEYLQVNEMFLIGLTDEEIQTALAESDQLTLSKYLYRVQSVSSKDYMFQYHLETEVSGSKKRKGSIPKAYRLRGPGNDYQGLNPRRVKVNLLGGISLPK

SEQ ID NO: 1818 - protein, 1507 aa, unidentified
  REGION 1..1507: note = Description of Unknown: Cas Enzyme sequence
MKKILGLDLGTNSIGWALLNAQELENGNGFVFDHIERAGSRIIPMDAAILGDFDKGNSKSQTSERTRFRGVRRLRERHLLRRERLHRVLNLLGFLPEHYLREIDFENHPGKFITSVEPKLPWVKNISGQFEFLFNSSFEEMLNDFKNSQPQLVVDGRKIPYDWTIYYLRKKALHEKISKEELVWLLLNFNQKRGYYQLRGEDEEEDRSKRVEFHALKVLSVKATDQKKGKDVWYEVTLENGWIYRRASSLPLDWEGKVKEFIVTTDIAEGGTPKMDKDGNVKRSFRAPKEDDWTLLKKKTEADIEQSNKTIGAYIYDTLLQDPFQKIRGKLIRTIERKYYKAELEAILRKQKEYHQELNSPDVYKKCIEHLYPNNEPHRENIANKDFVYLFLDDIIFYQRPLKTKKSLISDCPFEYRRYKDPKTGEEKISTIKCIAKSNPLYQEFRLWQFISNLRIYQREKEINGQLKIDVDITNEWLKSEEDYAALFEWLNDRKEIKQDTLIQSYFKQKKIKGQTTFPFRWNYVEEKIYPCNETRASILSRLENANISSGFLTKEREVALWHILYSVEDKYEIIKALRTFKEKNQLDDTFVDAFCKFPPFKKEYGAYSEKAIKKLLPLMRRGKFWSEFSIDSYTQTRIEKIITGEVDATILERVRDKAIHLSSVTHFQGLPVWLASYVVYNRHAEAQEVIKWQTAEEMDAYINAFKQHSLRNPIVEQVIMETLRTVRDIWKEAGQIDEIHVELGRQMKNPKDKRAQMTEQALENENTNLRIKQLLTEFLNPEYEIENVRPYSPMQQEIFRIYEDCALNNSMEVPDEILDVVKKFKEADVKKRPGKSEIMKYKLWLEQKYRSPYTGEIIPLGKLFTPAYEIEHVIPQSRYFDDSFSNKVICEAEVNKLKSNQLGYEFIKNHHGEKVTLGFGKSVEIFSVSAYEEFIKQNYNGLKNRGKMKKMLMEDIPEAFIERQLNDSRYISKVIKGLLSNVVREKDEQDAISKNVITCTGGVTDRLKKDWGINDVWNDIVLPRFERLNRLTDSKQFTRYNERIQKYIPDMPLDLQKGFNKKRIDHRHHAMDAIVIACATRNIVNYLNNESASKRSKFSRYDLQHLLCEKRHTDDKGNYTWLVKKPWESFTQDTRLALENIVVSFKQNLRVINKATNSYQHYDESGKKIFKKQIKGNNWAIRKPMHKETVFGNVNLRKVKYVRLSVALDTPAMIVDKLLKSKVKELLSLKYEKKKIEKYFKENVDDWKEYDFTKVAFYYYTNDTKDRLVAVRKPLDASFNIKKIEESVTDTGIRKILLKHLANNEEKADLAFSPDGIDDLNRNIRMLNDGKEHQPIYKVRVYELQGNKFNVGVTGNKSSKYVEAAKGTNLFFVIYETEEGKRSYESIPLNIVIERQKQGLLSVPEIDENGNKLLFWLSPNDLVYVPSEDEVVNGRIADCLDKNRIYKIVSFTGKRLYGIPYSVANVIVDKFEFSLLNKIEFIGEKEICIPVKISRLGRVLSVGKRL

SEQ ID NO: 1819 - protein, 1081 aa, unidentified
  REGION 1..1081: note = Description of Unknown: Cas Enzyme sequence
MIYLYLFGTCFHFIYVFMIIANIRIYQKEKKVDGKLLTDIDVTTEYLSSKDDYVALYEWLCVRKEIEQKTFLKYPAFGLKKEIENYRWNYVEGKSYPCNETRSLILHYLEKAGISSTFLSTKIEESLWHILYSVEDRIELETALRTFASKYQLSCNFVEVFKKFPPFKKEYGAYSAKAIKRLLPLMRMGKYWKVDAIDGNTAERIEKILSGECDEKILNKVREKTIHLSETSDFQGLPLWLACYVVYNRHSEGKEVAKWKSPEDIDIYLKSFKQHSLRNPIVEQVITETLRVVRDIWKRVEQIDEIHVELGREMKNPSEKRRQMTERMLENENANIRIKALLTEFMNPEYEMENVRPYSPSQQEILRIYEDTVLNGAGDIPEDIEIILKKFKENDIKKRPGKSDFLRYKLWLEQQYRSPYTGEIIPLGKLFTTAYEIEHVIPQSRYFDDSFSNKVICESEVNKLKDNMLGYEFIKKHAGEIVELGFGKSVKIFSVEAYERFVGENYYKAGSKKSKLLMDDIPEKFIERQLNDSRYISRVVKGLLSNVVREEDANGEYESEAISKNVIVCSGSVTDRLKKDWGVNDVWNNIVYSRFERLNRLTESQQFGHWENREGKRFFQTELPLEYQKGFSKKRIDHRHHAMDAIIIACATRNHVNYLSNESASKHARIARYDLQRMLCDKSKADGGGNYKWIIQKPWATFTQDVYRTLLDIIVSFKQNLRVINKMTNYYQAYDDAGKKVFKKQKKGDSWAIRKSMHKDTVFGQVNLRKIKEVRLSVALESPEKIVDKKIKEKVLQLFAYQYDKKKIEKYFKENASLWKEVNLAKIPVYYFTDESSELLVAVRKNLDTGFTEKKIRESVTDTGIQKILLNHLSNKGDKPELAFSPDGIDEMNRNLVILNGGKPHQPIYKVRVCEPLGNKFKVGTNGNKSAKYVEAAKGTNLFFAIYETDAGKRTYETIPLNVVIEREKMGWLPVPEKNNKGEKLLFWLSPNDLVYLPTEEELMSRILSDKLDRGRIYKIVSFTGNRLYAIPYNVSNMIWDKNEYTQLNKVESTDMKESIKEICMPINVDRLGHITEIIIK

SEQ ID NO: 1820 - protein, 1433 aa, unidentified
  REGION 1..1433: note = Description of Unknown: Cas Enzyme sequence
MKRILGLDLGTNSVGWALVAQDFEAKIGKILGVGSRNIPMGVEKQEYEKGVGITKNATRREKRSSRKMNKRYKLRRNKLLFILDILNMLPEQFQFKNGLPEPTKLQELELLPIKNGTLQLDSVGQYKLCVKALYEKIEWKEFGKILYKFNQLRGYSGGSKNEDTNKKQKEEDENEDDTNKKTYEVITQKVEILSVGKSDETFIVRGGKNKGEKQNYYIVTINFKGEEKEGKTELQNLREKVNQEEELEIRIRRNKKTGEETSVVFALPQKSNWRKAMEENEKKLEKDKKFISEFHLEDLLQNKWEKIRNRVFLRNRYKEEFDKAWDTQATYYPILNNCPNNILEKIATYIFPGESESQQQLRKQAVTNGLKYIVKEQVIYYQRPLKPQTELIRNCRFEKEEKVLATSHPLFQEFRCWKQINNLYVTSKQEVYNEKKQKNILQYAHRYLTNEQKQEIYNKLQIQKQVGFNEVKKVIGIKDDKTEYLNGLNVKAKLTGCETLISIKKGLGENFDVILSKDNTIIEQLWTVIFDVENHEGSEYDITSKRVSSIIDVLEKYTNKETAMKLALQLAQNITFPRKYANFSGKAIQNILPLMQLYPKNISERIINKFENIKHLVDTGEIIDNADYGLEDYVIDFVKNNPNILEAGGLMEYLAISLVYNKHTADTIKAQIKNYHDIEYERRNLRNPIVEQLVNETMQMVKAIWKQYKINPKDLEIRVELARDLKNSAQERKKIYDGQNKNRKANDGIKKKLQEEGIPLTDKNILKYRLYVQQKFISPYTKNKIIPLSALFDDKLYDIDHIIPKSRYFDDSTSNLVVCETHINEEKSNRTAWEYITKQNSKFEIRSIKEYVDYINENFFGKKKKNLLAEKIPTDPVNRQLKDTQYISVAVKNELAKIVGSENVKTSTGEVTDYLRSHWGLKKLFMELTESRFKQMEFWDLDENGNPKTEWVERYVDENGKNIYKIKNWSKRYDHRHHAIDALVVALTEQSHIQRLNNLNKYLQDELTKRKDEFKIEIQGEETALEAFFNLKAQRRDEIMEQIESSRKFDSPIPDLVKQAREHLETMLVSHKPKDKLGIKVDKKTNKKQLKIKGALHEETYYGKLNGKDTKTIEISKLKLKDIQKIIDQDVLAKEIEVHRKKYDSMKEAFTGEGLKLFNENRFYKDKKTQENKLKPPVYKVKVWYNKEEKKESSLQRLYKNNEKQSVITGDNYLFLVMEKETKKGKERIFDIASLYDSVCIAKDALKDNIFDFKKKIAEEYRLSYGERNKVRGKVQENPDRVLFTLQQNELVYLPTDSEDSVLRMTKNEFGEWIHDIENKKAFCKRIYKVVKFTGKDCFFIPHNYANSISVAKDLSEEDLRKLKEIYQDKTIPKQEKNYEEFGSFGTCAKTEVNENFIKELILKKGFNDDKPLKIQNTCIKVQIDWIGNITIH

SEQ ID NO: 1821 - protein, 1635 aa, unidentified
  REGION 1..1635: note = Description of Unknown: Cas Enzyme sequence
MKKILGLDLGANSIGAALINVPENIADFGKEGNIEWLGSRIIPMEGFVSSKTGKAFKENPVDSFSKGVGLSKTATRRIKRGSRRLKQRYILRRTRLIKVFKILGWLPENFPENFKQEMRNNENFKFRISDFLPFSQETIDEAKELLGAENKKGEIKLPEDWIVYYLRKKGLSENLSFAELARITYMMNQRRGFKSSRKDLKDESVEERKWVEILKIKSVKQIDEEQTNNKNYKFEITPYSEKVQPWIVERKKKPEWEGKEYTCLITEKIETKKDGSKKITQNKPKVIDDSNREENWELCVTAQDNKIEESKVFPGTYFFNGLADSVKNKTDFKIRQIAVYRKRYKEELEAIWQKQLELNEELRKINSDQTVLIKLAEVLYPKQTELNKPKLAEILKNDLLHLISEDIIYYQRELKSQKNSKSECQYEKRKGIDGNNYGLKCAPKSSPEFQEFRIWQDIHNIKVLQKEGTETRKLKNGEEKEFNIVDIDVTIDFINDTVKEKIFELFDCSEKITQKQIFTVINEQKECKIDDKTHRINMFFDGKDSLQGSETKNYFRKIFKKINYETEGEEILKDKEKLYRLWQISYSISLNDEEKSKQAIFKALTKTENKRGKTKKITFDFPENVAKAISEAPEIENTKKYAAYSSKAINKLLPLMRCGNYWDENLIGETIKSKVEKIKERLQEINYKVSKIKNISDDEIPQQILKSFISQSNCLSGLKTYQACYLVYDRHSERTDYTKYSDPKEFEIMKLLPNNSLKNPIVEQVVRESLFVVKDLWQQYGQPDEIHIEIGRDLKKNAKERQKATERTINNAEERKRIKALLKELMNDEFEQYVNDSDEKDENGEYKIKKERNKFEVKPNPESPADIKKFSLWKDAAGMSYNEFEKKIKEEKIPKNQEIKKYALWLSQKCVSPYTGKIIPLSKLFTAEYEIEHIMPKGLIKNDSLDNLVIAERGVNKAKDRELGAVFIANKNGGCEYQGTKYTLLKYDKYVEHCKRIFKGAKLKNLLATEIPIDFIERQRNDMRYITRKISDLLYPVAKGNPNATNDAEKGGIVFTIGSITDELKQNWGLKKEWKRLMLPRFERLEKLNSTKYIYENEKDRNDFYFNVENDDDKIDDKKKEELDIKRIDHRHHALDALIIAATTIEHIRYLNSLSAVDTDEELKKVKRSLVKGKIREFNLPWKEFTENTKDKLQEMIVTFKSNNNVISKPFNKYLKWKLKDGKWELGIEKQKQPINTDKKWLAVRQSLFDEQPLGVVYIKEIQTKELNNLKDILFVVKLQMKHDKAQNTPAQRHTSYIYDQDYRADFKELIKLCGSDLEKIEQYLKQFLKRHKHLKDINGDPIRKVRIAVFTAWAAKRTSLDKTFSHEIINKIPYGDHLQRLDEKKMTIPQILHEHLQSYERIKLCDESFCYTDYDNLSKEDRKEFDKKNGDKLKEALKEAFSDEGLEALDKKVGMKIRMVTKLDGKIEGSKKIQLRHQLVQSANNPYFVFYENEITKERSGDTSISTYDLIQKKLKNEPILERKDGCKIITLQSNDLVYVPTKEEIEKETIDWSDKKHIAERLYRVNDFSKTDIYFKPNTFAKAIKSKELHTSFDDKCSRIITHGKSESENIMIKDVCIKVETDRLGNIKSEHK

SEQ ID NO: 1822 - protein, 1554 aa, unidentified
  REGION 1..1554: note = Description of Unknown: Cas Enzyme sequence
MKKILGLDLGTNSIGWAVVNKEIDANGQVILKSIETAGSRIVPMDSSVLGDFEVGNSVSQTMNRTKARITRHMRERFLLRRERLHRVLTILGMLPEHYLSQLDRNGKFLDGTEPKLAWKKSQGGGYDFIFKDSFKEMMSEFHIAQPQLFSESDIKIPYDWTLYYLRKKALSSKISLQELSWILLNFNQKRGYFQLRDDIQDENSDKKTEFYSLKVISVKDTGEKKGEFTWYDLILDNGWVYHKPSKLRMPWEDKTLDLIVTTSIDKEGNPQLDKWGNAKRSFRSPNEDDWALLKIKTQKSIDCTGDSVGQYIYESLLRNPKQKIIGGLVRTIERKYYVEELSDILKKQIEFHPQLRSKDLYDACITELYPHNDSHRNILREQDFKYLFIKDILFYQRPLKSKRSLVDDCPYEYRIYKDPNSQEYIRKPLKCASKSNPLFQEFRLWQFISSLRIYQKEKRCQLSEDSSASSRLMLDVDVTQDFLKDSDDYANLFEWLSERKEIDQKTFLKYKPFGLGPKEIDNYRWNYVEDKSYPCNETHALIVARWKKVGLKESSLTKERENVLWQILFSISSKDEIDKAMHSFIEREIGKISIEGGLAETFDITSFVDAFSKIPPFKSDFAAYSSKAIGKLLPLMRMGRYWKEEAIDESTRLRINKLISGEYDDSIKKRVRDKAINLDDITKFQGLPVWLSCYIVYNRHSEAKDITKWRSPEDINIYLNKFKQHSLNNPIVEQILTETLRTVRDIWSHYPEIDEIHVEMGRDMKKTAAERKIISKRNLDNENTNLRIKTILTEFLNPEFEIDNVRPYSPSQQDIFHIYEEGVLDNCKDQNSAKLPTVSDDNSELTVSEILHKFQDSNIKNRPTRSQVLRYKLWLDQKYQSPYTGAFIPLSKLFTDDFQIEHIIPQARYFDDSFNNKVICESEVNDMKSDMIGYEFIKKHHGEKVALSQGKVINILEVDEYEDFVNTNYSNNFQKKRNLLLEDIPDEFISRQMNDSRYISKLIIALLSNIVREDGEDEAVSRHIVSCNGAITDRLKKDWGVNDVWNSIILPRFTRLNEMNILDSFNVPYKFTSESNGHLIPSIPLPLLITQKKFTKKRIDHRHHAMDAIVIACTSRNHVNLLNNESANSDNKEMRFALQHKLRRYEDAMVHGCLRSVPREFLKPWPTFTQDMQNVLKGIIVSFKQNLRVINKTNNIYYRGFDDKGKRIITRQGYDKDGGKLPNMKDHWSIRKSMHKDTVFGRVNIQPMPLSEALKKRGSIVNKSLRDKLIELSNNKFNQKQIREYFDVNKRAWPGVDLSNIDCYVQKNDSAHQNYATRIALDETFDKQMISRVTDGGIQKILLNHLKLNNDDPKLAFSPEGIEEMNANIVSLNEGKFHQPILKVRHYEQANKFAVGEKGNKSMKYVEGDKGTNLFFAIYQGNDGKRTFNTIPLNVVIDRLKQNLPPAPNDKEGRKPIFVLSPNDLVYLPSGDEIENNIINEPLDRERIYKMVSCTTSTCFFIKSTVASYIVDKCEFSKLNKMERAVTGEMIKDVCVPIKVNRLGCVCEINGVKR

SEQ ID NO: 1823 - protein, 1400 aa, unidentified
  REGION 1..1400: note = Description of Unknown: Cas Enzyme sequence
PGQIKLNTEPKIAWFKNEQGKYEFFFKDSFNEMLSDFRKIQPSLAAEDKKVPYDWTIYYLRKKALTQKISREEIAWILLNFNQKRGYYQLRGEDEENANKSVEFHTLKIIKVEATEEKKGKDTWYNIYLENGWIYRRTSSVPLEWEGKSKDFIVTTELNEDGNPKLNKYGEVKRSLRAPQPDDWTLRKKKTEKDVENSHETVGCYIYNNLLKDPKQKVKGELIRTIERKFYKKELKEILTAQIKFHPELQDRNIYSKCLDILYPHNESYKRSIDKRDFLYLFIDDIIFYQRPLKIKKSLISNCPFEETQYVDKETGEIIKVPIKCIAKSNPLFQELRLWQFISNLRIYQKEKETDGILCTDVDVTTVFFKSEEDYALLFDWLNDRKDIDEKSLLKYPIWNLKKKVSEYRWNYVSDKTYPCNETRNLILNGLKRASVDITFLTSKNETDLWHILYSVTDLGELYSALMKFAEKQHLSQTFVDIFKKMPPFKKEYGAYSAKAIKKLLPLMRHGKYWNYDQIDDVTKKKISKIITGEVDETINNKVREKAIKLTSENDFKGLPLWLACYIVYGRHSEIKNITKWNNPEDIDLYLKTFKQNTLRNPIVEQIITESLRVVRDIWKAVVHIDEIHIELGREMKKTSKERDQMSKAIATNEATNIRIKTLLTEFVNSEYHVENVRPYSSSQQELLKIYEDEVLSSETIPDDINDIIKKFTPQKMPTKSECMRYKLWLEQKYRSPYTGAIIPLGKLFTPNYEIEHIIPQSIYFDDSFSNKVICESEVNRLKNNQLGYEFIKNHHGEKVPLNYGKSTEIFSLEDYEKFVKEHYSQSNSKKKKLLMDDIPDQFIQRQMNDSRYISKVVMGLLSNVVREKNINGEYEPEATSKNVIACTGSITDRLKRDWGINDIWNDIIYQRFERLNKLTGSNNFGQWENKNGKQVFQIKMPLNLQPGFSKKRIDHRHHAMDAIVIACATRNIVNYLNNESACKQAKIQRKDLQHLICDKKIEGCNYKWIIKKPWDSFTQDTKDSLNNIIVSFKQNLRVVNKATNLYWHYGLSDKKVLIEQKNSDHWAIRKPLHKETVYGLVNLKKTKEVKLSVAINKQSMIVDKELKKKVFELNSLYGSNKKLIEKYFKDNTDLWPTLNMSKIQIYYFTNDTTDQVVAVRKSIDDSFNEATIQNSITDTGTQKILLNHLRANNNDPKIAFSPDGIDEMNNNIIALNNGKYHQPIYKVRKYEPLGNKFSVGETGNKISKYVKAEKGTNLFFGIYQKEDGSRSYHTIPLNIVIERKKENSTPVPEKDDENNKLLFWLSPNDLVYLPTPDELENGIDIENIKHDRIYKIVSFTGNRMYGIPYNIANIIIDKFEFTQLNKIEFTDKKESIKELCVPLKIDRLGRIIKIGNKKI

SEQ ID NO: 1824 - protein, 1296 aa, unidentified
  REGION 1..1296: note = Description of Unknown: Cas Enzyme sequence
MVFPEGIDRDQTGEKPKNQQRRLSRGTRRRYFRRKRRKQMLLKELIANGLCPLSKEALARWVKDDIYPDEEAFRTWFKTQPFELRAEATERAYTAHELGRVIYHMGQRRGFRSNRKGGDKGDQKALMEGDAKRGIKSVPETEALVSTHGSLAKAAVFLNKQAVIEPIRRRFIKRDTYTKEFEEVWLAQRELLAKGSAAQRALAERLTDKLKERIGHPFDGIIFFQRPLRSQKGSVGKCRFEPKKARAPQCSLVAEVFEVLQTVNNIKVDGKPLSDELRNLVINELFLKKDRFTAEDLNKALLKWKVDGRSNYAGTEAKNVKFKGAEAIKDLASLFNKDKKEIQAVARAIFDNPEDKLWLDRWAAIRDAENDDDITKEKAAGRDVGKKRDLFEYAKTQWGFNDDKLKQLMKMQAWKQGYANMSTKAMRKMIPWLRQGMIFSHAAFVANVDEAFGERWKTMTAEQQKNVVKGMQDIVESMRVEKGRVELLNGLIKQFKRHWDETKQAHGFWNDARRAAFDKSFNDWATKDLAEQLGDAQREELRGRVVAEFDKQVDEHGVRAPFITLERTDEKIAHYLTEHWQVDADGVGKLYHPADIELYPQAKGDKLGSPFHPALKNPVAIKALHALRMLMNALLGNGAIDRDTRIRIELARELNSTNERRAWQWYQNDMYERRRKAEAECKKWFDAHMPGASITEDAIQRVWLMQETEEVLGQAKCVYTDRSLEMDNVLGDRANVDIEHTWPIWRSLDDSLANKMLCDREYNRAPDGKHNSIPAELPNWKEAKNIGGRDYPALLANVEKFREMMERYKHLVEIRKQDSKHAADPDTKSKAIVQKHYYNHHYRYWKTKYEHFSLEAIPLGFTNRQQVEVGMITRYSRAYLRTLFPRVDSVKGSLVELMRREWMGEAYEEKNPKSPQYRSSHFHHLVDAVVLASTDKDLTDNLGHQLREKEKTGGKIKPKKPWENFSSDVLKLKDRVLVYHYSTDPLGRTSRYKVKIKGKQRIVTGSTVRGGLHKETIYGRILKKNAAGVYVPRIVLRSMLADLKPGDVANIVDKKLQDRIAAYGLEKAQTEGGYRWEITRKDGTTATHIVRKVRLFDRLDSPLEIKAHRDRAVGREHKHFQLAANEDNHFMAVYENDRGDRSFHILTLFELTQALRNGNRKNFPNALFPLTIEREVRGRKVPYQLMTRGGKPVVLHKDQMVLLFAEGPEEVAWSDKADLNARLYKIRSFEGDGRVMLMHHMEARPASKVDKASEFSKTVTDKRVRLSLNNLNGLFENVDFKSHPNEVVVRMDEAHI

SEQ ID NO: 1825 - protein, 1357 aa, unidentified
  REGION 1..1357: note = Description of Unknown: Cas Enzyme sequence
MKKILGLDLGTTSIGWAFINEAETKEEESSIVKLGVRVIPLSTDEETDFQKGKAISINADRTLKRGARRNLDRYQLRRDALISILKKNNIISDSVILSEEGKQTTFATYTERAKAPYEKIDKDSFAKVLLMINKKRGYKSSRKAKSDDEGTAIDGMEVAKFLYDNDLTPGEYVYKLLKDGKKHFPEFYRSDLQSEFDRIWSYQKQFNKETLTDSLEEEIRNKSKKQTWAILKEPLGLIGVKRETKGAEQKKENYLWRTKALTEKLNFEELAIVLQEINNNIYSSSGYLGDISDRSKELYFNKQTVGEYLYNQLKYNPHTKLKNQVFYRQDYLDEFETIWEKQKDFYPELTEELKKEIRDVVIFYQRRLKSQKHLISECEFEKYHKVVPKSSPLFQEFKIWQLINNIEIQNIETKEKFKGEQISQEAKNVLFEELNIREKLSANDILKILVDKPKEFKLNYKEGLEGNRTNAEFYRVYQEILKREGKEIDFKKLKAVDINDFIVSKFSELGIEQEILLFNDEVIGNEFDKQPMLQLWHLLYSFEGDDSRTGEEKLIAGLVNKFGFKTEYAKLIANCKLQADYGGLSSKAIRKILPYLKQGNTYDVACNYAGYNHSSSFTKEEQGKRVLKDTLELLPKNSLRNPVVEKILNQVVNVVNAIIKDDNLGKPDEIRVELARELKKSAKERSEMTSNINKATANHEKIRKILQSEFGIIKVTRNDIIRYKLWQELEGNGYKTIYTNTYVPREKIFSKEFDIEHIVPKALVFDDSFSNKTLSVREVNLKKSNETAFDFLNIFLDKDKFSQYQSRVEKMFKDGNISKAKHNKLLKRATELSEGFIERDLRNSQYIAKKATQMLGQVARKVSTTTGSITDRLRSDWQLINTMKELNLPKYEKLGLIEIIEGKNGQQEKRIKDWTKRNDHRHHAMDALTVAFTKPAYIQYLNNLHARKDKSSSIYGIEQNNLFRNKKGKLIFIPPMPIGKFREESKKHLESILISFKAKNKVVTRNKNKIKGKDKFITKVELTPRGQLHKETIYGKSSKYTTKIEKIGGKFDLDRISLVAKKNYREALLLRLEEFKGDAKKAFTGKNSLSKNPVFVDESKKSTVPEKVKLVFVEDIYTIRKDITPDLKIDKIVDVGVKKVLQNRLNEFGGDAKKAFVNIEENPIWLNKEKGISIKRATITGVNNVEALHYKKDHNGKPILDKNGNKQAVDFVSTGNNHHVAIYRDEKGELQEEVVSFYEAVHRVNAGIPIINKDKLGFEFLFTMKQNEYFVFPSDDFEPSEIDLLNPKNASLISPHLFRVQKIATKNYFFRHHLETTVDNLKELNMITYKAQLGLNGIKGIIKVRINHLGQIVKVGE

SEQ ID NO: 1826 - protein, 1406 aa, unidentified
  REGION 1..1406: note = Description of Unknown: Cas Enzyme sequence
MKRVLGLDLGVASIGWAYILEAENENETSEIVRMGVRIVPVSHDEKKRFMDGKTETPTQIRRIKRGMRRNLDRYQLRRDKLIDIFIQEGWITDREDLAPTPDEHPHYIHEVRAKAVDEQVSLRDLARIFLAINKKRGYKSNRKIKGEDEGSAINAVDVVEELNRTGATVGEYIYTKMQADPDFIVPQFYTSNYEDEFHRIWSVQRQFYPDQLTDALKQKLWHQSKKTTAALLKEVFNGMEAVKPKGKKREKRMYEYSLRSKAVRSKVEPDELIYVLMCVNGDISKATSHLGKISDRSFHLQVKGWTVGQYLWNQLRENPHSDIKNRIFFRKDYEQEFERIWETQRRYYPDKLTDALKRKIGKETIFYQRPLKSQKKLLSYCIFESQTKVIEKNGVKKEVRIGYRVAPKSSPLVQEFNLWQVVHNLRIVDLRRRKAYGLAPEVREIVFNELNWREKISQKDMIKLLKQLDLTVETASEERDNGEREIPLAQLDFELNYREIKGNATNALLLSAYQKMMEEVDWPSSNNLEKKTYKQKMRVLEGFFDHIGVDKRILYFDGELEGKDFIQQPAYQLWHLLYSYESDNSQTGQEKLIQHLQDKFGFPRRFAEILADVNINSIGGYSRLSSKAIRKMFPFIKEHSYSEAAHYAGYRHSFHETKEEIQQRELKDRLDIVPKNKLRNPVVEKILNQMVHVVNAILADERMGRPDEIRIELARELKRDLLGRKRMIELIRKNTKNNERIRNILQERFKIPYPTRADITRYKLWEEIETLGFKEIYNVDPNNDKTIPDHELFTNKVNVDHIIPQSVLFDDSFSNKVLTYVVTNEVKGNRTAYDFIRNEYGEEGLKRYEDRVRDLYKKGIISKAKRNKLLMSEEEVEKIDFINRDRALTRYITREAKKMLKQVCRSVVVTSGMITNELREAWGLINVMKEINFPRYQARGLLIRTVDRNGQERWLLKDWTKRDDHRHHAVDALIVAFTTLNHVNFFAHRSARGVENITRHDLRNLLMYKDPEDKQWKFKLPMPHFRAKAKEKIREILVSHKAKNKVVTPRLNRIRTSHGYIVQKTLTPRGQLHKETVYRHIQRYEVKYEEINSSFTIEKILRVAKKPYREALLKRLEEFGGNPKRAFTGKNSLKKNPILLPWGKPMPEKVGVLYLKDVFTKRVPVTPDLKIKDVVDAKIRRILQQRLDAYGGDAKKAFSDLERNPIWLDRAKGMALKHVRVLTGEKPIPLRPMRDHLGHEDPTQPTDYHVLENNHHVAIYRDPHGKYHERVVSFFEAVQRKLLGLPVVDKTYNSEIGWEFVFSLKKNEMFVFPSEEDGFDPREIDLMDPKNKARISPHLFRVQKFSKTGTILFTNHIEAINTKDKEVGNKRLKGMRFYHISTVDKLKYIVKVRLNHLGDIVHVGEY

SEQ ID NO: 1827 - protein, 1265 aa, unidentified
  REGION 1..1265: note = Description of Unknown: Cas Enzyme sequence
MKRILGLDLGTNSIGWALVEKDEKKKEIIGMGSRIVPLSPDDKDEFSKGNTISKNHRRTVKRTQRKLYDRYQLRRNALIEELKNKNMMPDEDLIHVSKFRLWELRSKAVETKLTLPEIGRILLHLNQKRGYKSARSEENLDKKDTEYVEKVKNRHEELRDAGLTIGQYLLKELKKSENFRTKDLVYPREAYIEEFDRIISIQKGYYPEELSEDFIQRIRNEIIFYQRALKSQKGLVSICEFEGFWMEKEGKNLYVGPKVAPKSSPLFQIEKIWETINNIRLKDKYGQPIVLGIREKEKLFKVLNIPGAGSEDFDNFSKYSLDRNGKLSYSKLLNLLGLSKDDVYANKQLENGIQGNILRQKILNCFNNPDEFSELLRFDISFIKTDKKVHLYDRKTGEVIHEEKESIIANKAEDIEKEPLYRLWHVLYSIKDREECENILKKKFNIPPDSAEKLSALDFTLMAFGNKSVRAIRRILPYLAEGYDYSESCMLAGYNHSNSLTKDQNRDRQIAERLSLLEKNSLRQPVVEKILNQMINLVNAVIEEYGHPDEIRIELARELKQSRQERFDADKAIRKIERDNQSIRKELVENYALRASRNNVIKWRLYHEMNNQKLNAICVYCGQPISFTDAIKGNDVDIEHIIPKAKLFDDSQSNKTLSHRSCNRQKDKQTAFDYMKTKKEDEFHEYIERVNYLYKNRLIGKAKRDKLLMSEDKIPQDFIQRQLRESQYIARKSREILMEVCHDVWTTSGTVTAELRHIWGWDDVLMNLQMPKYKKYDLTEEIEFENNGQKHKKERITDWNKRNDHRHHAIDALTVACTEQGFIQRLNTLNSGKTRNEMLRAINEFQKNASEVDNKRSEFEIEKRKLYQDYLFVNKPFSTNEVEQAASKIMISFKPGKKVATWGKRKVKRNGRKVTVQSDILVPRGALSEEQVYGRIKVLKRENPVKFLFHNPHLIVKERIRKKVQKRLSEYDDNPDKALKSLENEPIYIKDDILLEWAICYSEEYVYKYKVDVDFKKADKIIDDRVREIVKQRLSEFDNNPKEAFKDLDGNPIWFNEEKNIPIKSVRCFTGLSSIEPLKKNANNEVTGFVKPGNNHHIALYLDENGKLQEHICTFWHAVERKKYDIPVIIKNTDEIWEKVLSEGEDYFPDDFLEKLPDIKWQFVTSLQQNEMFLLGLPEENVRQINVNQKDNYSFLSDYLYRVQKITSGDYVFRHHLETQIVDTTDSKLCKRWYRVQSLKAFAGLNPVKIRVDVLGRMVWYQKCF

SEQ ID NO: 1828 - protein, 1513 aa, unidentified
  REGION 1..1513: note = Description of Unknown: Cas Enzyme sequence
MKRILGLDLGTNSIGWALVEKEEEKSGKIIGMGSRIIPMDKSEMDNFNKGTSVSQTAERTRLRMVRRLRERHLLRRERLHRVLNKIGFLPAHYASQIDFKNKNGSFLPEREPKIAYKPEGAQKKYRFLFEDSYNEMLSDFQSHQPELTDSGRKVPQDWTIYYLRKKALNSKITKEELAWIILNFNQKRGYYQLRGEDDETTNNKKVEEFHALEVIKVNEREETTSSGAKWYDIELENGWIYSRQSNIKPALEGKVIELIVSYSLDQNGKIKTDNEGNEKRSFRMPKEDDWTLIKKRTEQEIDKSDKTVGEYIYDNLLRNPYQKIRGKLVSTIERKFYRGELEQILNIQKKYHEELDDEVLLKKCVENLYPNNDIHRNALLNKDLVHLILNDIVFFQRPLKSKKSSISNCPLEYRLYVEKASGEKKIVPLKCIPKSHPLYQEFRLWQYVKNLRLIENQKLENGRLLTNVDVTEDLIPDEETRVELFKYLDGRKTFKQDDVLKFVGKRSPKERVGFSWNYPEDKEYPGNETRYLIESRLKKVENIPDNWLDQEKFEDLWHLLYSVSDREEIKRGLESFARKHQLSNSFVEIFRKFPRMEREYGAFSSKAIKKLLPLMRMGEYWKKDNIHSEIIEKAQKIIDGEVDDEIDDALRERAQRCPEIATLKGVPLWLASYLVYGRHSEMADVIRWRTVSGLEQYIKEFKQHSLRNPVVEQVVIETLRVVKDIWNYYGEGHEAFFDEIHVEIGRELKNPADKRKSITNQIQENENTNLRMKALLIELFNDPEVPNVRPYSPVQQEILKIYEDGVLNGEGEIPDDIQKISKMSSPSRSQLVKYKLWLEQRYRSPYTGAIIPLNKLFTSEYEIEHIIPQARYFDDSFRNKVICESEVNRVKGSLLGLEFIKNMGGKLVELNYGKKVTIFSSDEYQKFVKDHYGNSPRSKGKMQKLLMDEIPQSFIERQLNDSRYISKLVRNLLSNVVREENENSPVAKRLITCTGAVTNSLKQEWGLNDVWNDLITPRFERLNGMGETKYGAWINKGGKRVFQIQMPLELQKGFSKKRIDHRHHALDALIVASATRSHVNFLSNEASKPGAAQTRFDLRNKLCFKQQRGQNGSYDWKYYKPWETFTYDAKEALSKIVVSFKVNHRVLNKSANRHYKWIDTPDGKKKKLVPQTKGENWSVRKSLHKDTVLGKVSLRKEKTVSLSVAFDSWQRIVDKSLKRQIGSLIEQGYDKNLLQKYFKDRKNEFEGKNISKVSIYYFDDEMAARRVILDTSFNSEKRIEGITDSGIRKILYAHLANEKYHGQKDEKGKEIPPYELAFAPEGIDEMNANIKKLNGGKPHCPIYKVRLSEPIGEKFQLGNAGNKDKKFVEVAKGTNLFFGIYANEEEERSFDTIPFYLAMERQRQGLLPVPEKNEKGHNLLFWLSPGDLVYVHGEESDIEEVREEEISSSRVYKMVSSTGPYCFFIPHFVASPIVQTLELGANNKAEKAWDGQMIKKLCYKLKVDRLGNVEFEK

SEQ ID NO: 1829 - protein, 1381 aa, unidentified
  REGION 1..1381: note = Description of Unknown: Cas Enzyme sequence
MKRVLGLDLGTNSIGWALVNEAENDEEKSSIVRLGVRIINYDNFVSTKTGKESKEPEKDFRGGKGISPNAGRTLKRSMRRNLQRYKLRRENLIEILKEHDFISDETILLENGNRTTFETYRLRAKAASEEVTLEQFARILLMINKKRGYKSSRKMKGQDKGQLIDGMEIAKKLYEENLTPGQFCLQLLKNGKKDLPDFYRSDLQAEFDRVWNFQKQFYPFLTDELKKELSGKDENTTWAICAPSKNTDRRNEKFVWKWIETERILSDDGYSFSDIEKEKTLIGRKRDGKTAEQKLENFIWREKALSEKMHPENLIVVLQKINKQINNSSNHLGAISDRSKELFFNKQIVGQYQMAILAKNPNASLKNMVFYRQDYLDEFNTLWETQAKFHKELTDELKHEIRDVVIFYQRRLKSQKGLIGFCEFERRQIEVEIDGKKKNRTIGSRVIPRSSPLFQEFKIWQNLDNIKLTDKTTGEMRTLTLKQKESLFQKLQIVEKLSDKEVLSILFDKSAKYELNYKKIEGNKTRAVIVNILGDSSLLSFDSNKELDEQPLYKLWHLLYSYEDDNSVTGNDRLINNLKLAFGLSEETAKELSNISFQDDYGSLSTKAIRKILPFLKEGHTYDVACGYAGYRHSVGSLTKDEIKNKILKNKLEILPKNSLRNPVVEKILNQMINVINGIIDVYGKPDEIRIELARELKKNAKEREELTTAISKTTVEHEQYRAILQKEFGIANPSRKDIVRYKLYMELAANGYKTLYSDTYIAREDLFSKNFDVEHIIPQARLFDDSFANKTLEMRDVNLKKGNTTAYDFVKAEYGEDKAKEYLIKIEKLLKDMKISRTKHKHLTWSEKDIPEDFINRDIRDTQHIAKYAKTMLNDLVKVVVSTTGSITDRLREDWQLVDVMKELNWDKYKNLGLTEEFVNESGHRVQKIKDWTKRNDHRHHAMDALTVAFTKYAHVQFFNNINAHYNLQSEIYGIKKKYFTNDNKALPPIPLDEFRVEAKKHLDNTLISIKARNKVVTQNINTTKKKGKTSRVPTPRGQLHNETIYGSQKQYAVKEETVNAKFDEAKILTITKPAYRAALLERLRENGNDPKKAFTGKNGLAKNPIYLDKLHTTQIPEKVKTVTVETVYTIRKEISPGLKIDKVIDAKIRRILEERLNKFNGDAKRAFINLNENPIWLNEEKGISIKCVTISGVSNAEALHDKRDKDGNLVVDKNGNKQPVDFVSTSNNHHVAIYRDTDGDLQENVVSFYDAVKRANTGLPVIDKKYKQCDGWQFLFTMKQNEYFVFPNEKTVFNPKEVDLMNPENYHLISPNLFRVQKIASKNYMFRHHLETKVSFETKEMEKQLRGIAWELYQSTEKLKYIVKVRVNHIGQIVSIGEY

SEQ ID NO: 1830 - protein, 1084 aa, unidentified
  REGION 1..1084: note = Description of Unknown: Cas Enzyme sequence
MSAKSEELTGTPYILGLDLGAASLGWAVIGLADGRPARHVDGGVRIFPEAVEDLDQGKDKPKGAQRRLARQMRRQTDRRARRVASTFHALQNGGLLPPFPEGADPADPLARHELINRLDAELACSVAGLIDPACQHRSRSVFHYRLRALANYQDLPPFAAGRALLHIAQRRGFKSGRIEEASGGGKDKEQEAETKKELGQVKARIDSLPAEFERLGARTIGEYWSKLDPQEKRIRGLGNWSARQMHLDEFDLIWQRQAPCHPGIMTPALQRIVQRRIFFQRPLRSAAGLVGHCELEPERRRAPLAHLLYQRFRILQLVNDLRINNAIGLSRLLMPEQRDKALDMFSSQQTVTFSSLRKKLGLARGETFSHEEGERKDAPGNRTECKLRGVFGERWATLAEQEKNVIAGCVRSVDDAAALARIAETRWGLDTVDAAHLAGIQLEQGYGRLSLAALRRLLPLMEQGEPYMTAVDKVYPDRARTPVHESLPAVLDPKMGLKNLRNPAVIRALTELRKVVNAIVREYGRPERIQVELARELKKPKDVRKRIAGENRDREGLRKDAIAKIFKESGLGQPSNADIEKAILWEECHHHDPYTGASINFHDLFGSDAKWEIEHITPYSRSLDDSLANKTLCSRETNREKGNKTPFEAFGGTPEWEGMVERVRKFQGDKRAMTRKLDRFTLEAGADDLFDDFTHRQLNDTKYASRLAMEYLGMLYGGVCDENGSRRVNAVSGGVTAQIRKGWRLHSILRDGPSQGEAKPRDDHRHHAIDALVVALTDPGAVQALSRASERSRLDHRHGFRVEEPWNGFLDEVRATIRGIRVSHRPDHHLRGALHAESLYSPPRSERGGEPRSRIRKPLSSLAAGNVAEIVDEKVREAVERKLIELGQEHPKEAFKNNTNLPTLPNRHGDPVPIRRVRVYVSGSPQQIGTGAASRYVMSKDNHHLAIYRLPLDKKGIERWAGEAVSLMDAVARKRDGKPVIAPANEAGAPLVMALYKGDVVEMTVPKSEPTERELFVIRSFSIEGNSPDIHAARHNLASEKKELMKRGEWTRIRSWAEFQKLDPRIVKLDALGRVMPDDGQPNS

SEQ ID NO: 1831 - protein, 952 aa, unidentified
  REGION 1..952: note = Description of Unknown: Cas Enzyme sequence
YLASKDGQVAPRIRHSGSKSEAFAPLPQKLMQEDNAYEVRYICEQQGVDDETCRKLIDKIFYAVSPRGSASERVALDDLTHEKRATKASLAFQKFRIIAALSFLKLAVGGQQRPLTVEEKNTAFDILSSMDSKTRPTWADVAAALGVNRRDIKGIGGIQDDGDRISNRAPVMDSYFALIESSGVLGKLVKHDIMPWWRDASEDDQERLLELLGNNVDIDSIRDDMSYSNAFELIDSFDDDQLGAIDNIKLPAGRAAYSVSACQALTVRMLSTTDNLHDARKTVYGVTDNWKPAQEPIGFPIGNPSADRVLKIVNRYLMNCTARWGTPVSVNIEHAREGFSSAKVARAYQKDAEAYATNRSAIFDKIKDLYPDFNRFSDSAMKRWEAIQRQNGECLYCGATLKFTTCELDHIVPRKGVGATNTKTNLAAVCTDCNRAKSKKLFSLWCHDQYAVSKGITVAKAVARVEMFTFPAGTLSAANAKRFKEAVKSRLTQMTEDEAPDNRSMESVSWMADELHKRIDWYYNSQRYTATSDIPERAVKVFVYSGLSTSLARRFSGIEKQIHFAGPSGKTRLDRRHHAVDAAVIALMQHNVAEVLVDKNELHKAQRYSQKEDGADWREYRGKDEEQQFLYGRWLGNMHVLLDLINDALDDDRVQILRNLRLELGNSRAHEDTIHKLLRVRLGDKIEASLVQRASTPALFTALTRCDDFDEKTGLPENRERHIVVNGVHYGSEDEIAFFEKNAAQIMVHNGSAEIGDGFHHARIYLCDKINKSGKKTGEFYGMIRVFAADLAKSRNDDLLTVPLSESSLSMRYGDPSTVKAIREGHARFVGHLFVGDELRLDLSQTDYTGQVQEFAQVLANVAEAEVYTTWVVDGFCDPAKLRLRPSYVSSEGVKSFDEAEQSRLLKVIDKGWRPAINALSAYYPTVVRRNGLGEIRWKSNAGLPMSYRWHE

SEQ ID NO: 1832 - protein, 1454 aa, unidentified
  REGION 1..1454: note = Description of Unknown: Cas Enzyme sequence
MKKILGLDLGTNSIGWALIEQNFEEKQGEILGMGSRIIPMEQGVIGDFGKGNSISQTAERTNYRGVRRLRERHLLRRERLHRVLYLLGFLPNHYSEQIDFEKRFGQFIDGSEPKIAYNGKDFLFKNSFEEMLADFRIKQPQLLINKKGEPALIPYDWTIYFLRNKALTQKIEKEELAWIILNFNQKRGYYQLRGEEEEENDSKLVEFHSLKIIDVIADDKPNNKGETWYSIILENDWIYRRSSKIALFDWKNKVKDFIVTTDLNEDGTVKTDKEGDPKRSFRAPKEDDWTLIKKKTEQEINQSHKTVGSYIYETLLDNPKQKIKGKLVRTIERQFYKDELKAILSKQLNFHPELKSDEYFNNCIRELYRNNESQRLSLSGKDFVHLFLYDIIFYQRPLRSQKSSISNCSLEFRKYKVNGEEKIDYLKAIPKSHPLYQEFRLWQWVYNLKIHTKIDDADVTGNFINSVDDYEGLFSFLNNRKEVDQKALLKYFKINEKTHRWNFVEDKKYPCNETKTLISTRLSKTENVIENFLTKDKEQELWHIIYSVSDKIEYEKALKTFAEKNKLNVDSFVENFKKFPPFKSEYGSYSLKAIKKILPLLRLGKYWDWEEISNETKERINKIITGEYDEEIKNRVREKAINLTKQSDFQGLQLWLASYVIYDRHSEAMNVEKWNSVSELENYLQEFRQHSLRNPIVEQVITETLRVVKDIWLKYGNGAKDFFSEIHVELGRDMKNTKDERKRITNQVTENENTNLRIKALLVEMLNDSNVENVRPHSPMQQDILKIYEDGVLNSNVVIEEEILKISKKAEPTKGELQRYKLWLEQKYKSPYTGQIIPLNKLFTSAYEIEHVIPQSRYFDDSFSNKVICESVVNKLKDNQLGLSFIKNHHGEIVELGFGKSVKIFEIEQYEDFIKEHYAKNRSKRNKLLLEDIPEKMIERQLNDTRYISKFVSSILSNIVRSTTNDDGINSKNVIPGNGKITSRLKQDWGLNDVWNDLVLPRFERMNQLTQTNDFTSWNEKYQKNLPTIPLELSKGFQKKRIDHRHHALDALVIACATRNHVNLLNNKHAKSNERYDLNRKLRKQEKVVYNHPKTGEKIERDISKDFLKPWDNFTTDARNSLEMIIVSFKQNLRVINKTTNKYESYKDEKGNLRLGTDGKPKKDKITQTKGDSWAVRKPMHKETVSGIVDLSRIKVPKDKILTATRKNIDASFTLKMIESITDTGIQKILINYLAYKDNDFESAFSPEGIEDMNKNISKFNDGKNHQPIQKVRIFELGSKFSLGQNGNKKDKYVEAAKGTNLFFAIYEDEKGKRNYETIPLNEVIEHQKWRATIAHEEQKNIPMIPVKAERGNFLFSLSPNDLVYVPNEDETLNFPIGDFNNLSDNQIKSIYKVVSFSGNRLYVVPYSFSTSIIDKVEFSQLNKLEFSIDKKSIKEFCVKLKVDRLGNITKVYN

SEQ ID NO: 1833 - protein, 1364 aa, unidentified
  REGION 1..1364: note = Description of Unknown: Cas Enzyme sequence
MKKVLGLDLGVASIGWALVNQADNPEEKSSIIRIGVRVNPLSTDEKTAYTQGKSITTNADRRDKRSARRNLQRYQLRRSNLISLLKNQGWINDDTILAENGNKSTFETFRLRAEAVEKEISLCQLSRVLLMINKKRGYKSNRKAKGDESGNFLDGIELSKQLYEENLTPGEYSLRLMKNGIKHLPDFYPSDLKEEFNRIWEKQKNFYPEFLTDDFKKLIEGRGRLEVSKIIFARYEIYTADNKGKLQKLQSLEWRVQALKEKVEKEILAYVLADISGRINSSSGYLGNISDRSKELFMKKLTVGQYLYNNLKVNPHFSTKNLVFYRLDYLDEFEKIWETQSRFHKELTPELKNEIRDIIIFYQRRLKSQKWLINNCEFEKSKKVAPKSSIAFQEFKIWQTINNLLLTNTYTGEIRSLTLAEKQSIAYELKYKRSLSNKEVIEILIQKKQERREYELNFKEIQGNTTLCSIFEKFLEISDILNQTESDIKKLSASKIFEMVETTFKKNNFNTEALVLDTTLEKEASEKQPLFKLWHLLYSYENDSSATGDKSLIEKISSILQMPLDLARIVSTITFKEDYASLSHHAITKILPYLKQGHIYSEACQMAGYKHSEKSLTKEEIENKVLVPRLDNIAKNSLRNPVVEKILNQMINVINCISDFYGKPDEIHLEMARELKQNQKQRQKATERNNEQEKENAAIREILKKAPFNLTYISKTDILRYKLYEELRNNGYHTLYSDKYISKEELFSRNIDIEHIIPQALMFNDSYSNKTLEFRDINQEKDKMTAFDYVEQRFGKEGLSRFEEKVNMLFREKQISKTKRDFLLMKIADIPEDFLNRDLTNSQYIAKQAKEILEKYVKIVMPTTGSITARLREDWQLVDVMKEINLPKYEKAGLAETKIDKDGRQFTSIKDWSKRDDHRHHAMDALTIAFTKPSYIQYLNNIKARTEKGSSIYGIMSKETSVIESGTKRKRIFNPPMPLNELRDVFKKELDSVLVSIKAKNKVATKNENKSKKKDGFNSRTQLTPRGQLHAEQVYGLRKRYVTTLVPVKKITLDNLDTIASAAERNAIRQRLELCKGDSKKAFSGANSLDKNPIWIDSIHSKKVGDKVKCISFETVYSIRKDINPNLTVSKVLDTKCRQILEDRLKEYGNDPKKAFVNLDQNPIWLNKEKGIQLKRVTIAETFGMVSLHKKKDHKGNLVLDNNGNTIPADYVNLKNNHHIAIYRNAEGELEESVISFYEALQRVIAGKSAVNKDYNKDKGWTFLFSMKINEMFVFPNPETGFDPSKIDLKNSENYKLISPNLFRVQKLSSKYYCFRLHLTTNLDDTKALRDLTWKRLQSLEKLEGAIKVRIDHIGNIVAVGEYD

SEQ ID NO: 1834 - protein, 1453 aa, unidentified
  REGION 1..1453: note = Description of Unknown: Cas Enzyme sequence
MKKILGLDLGTNSIGWALYDKENKKILGMGSRIIPMGSEKLDYEKGKGITKNAERRAARSVRRMGKRYKMRRNKLLFVLNELEICPDQFKFRYKVRDNNGKLTDIYNDGFPKAKNIQDLELLPIKKGTLQLNSIEHFQLRVNAITKKVNLKDFGKILYKFNQLRGYSGGSYDEDNKNKIENLIDDPEEITQKKYEVITQKVEILQVKKSDKTFKAKSGENKGKEFNCYDITVNLNNEEINGTTTLQTLEAGKEEELEIRIKRTKKGEDISFTLPQKTNWRKQLESTEEILKSENLFVGELLLKDLKESKWKKIRNRVFLRNRYKLEFDKIWEIQANEYPILNNVPLEKLEIIAAYLFPGKSESQVKLRRSAIDGGLKYIIKEQIIYYQRPLKSQTDLIRKCKFETNETVIANTHPLFQEFRCWEQINKMYITSKIQTYNEKKKKTVYKYTDRYLTNDQKNEIYRKLQIQKNIGFSEVAKIIGLKMDKSEYLNGLNVKAKLKGCDTIINIKNILGDFFEELIQKDEIIFVKLWDALYNKTGNEYDINSDKVKALKDILNIYLNNSTAEEIALKLAINIKYPRKYSDLSSKAINRILPLLNCTPLNEIDFVKEKLEKIKQTIETGEINDEDTIESNIINYINNNPDLINSGGMMYSFATSMIYGKHSNINVIPSITNYHEIIYNKERNLRNPVVEQITNETMQVIKAIWKKYKFNPDELEIRVELARDLKNSAEERASIYKAYITNQRINESIKKKLIEIKQAPTQKNITQYKLWSLQRIEDYPKQSKEPTIEEINKLRIWEEQKCISPYTLKPIPLSKLFSDKRLYDIDHIIPKSRFFDDSLTNQVVCETNINEEKGNRTAWEYISQQNSKFEICSVESFIMHTNRNFHGRKKRNLLIENIPANIVERQIKDTQYLSTAVKNELAKIVGSENVKTTTGEVTAFLRSRWGLRKLFMELTESRFKQMELWDWNKDTNTPNSILVLNYYDEVKKMKIYEIKNWSKRYDHRHHSIDALVVALTEQKDIQRLNNLNKELQNWLTNNKKDIDLNVGDGETILEAYFNLDEEKRNKIQKKIEGFKVFEKPIPDLLEQVNEFLSSMVISHKPKDNLSIQKNEITGKKELKIRSALHEATFYGKHNGKDTKTVSISNLTVKEISKITDGILKNEIDSHRKKYESMKEAFTGEGLKFFNENRFQRKKPTELKPPVYKIKIYYSTMEKTESSLQRLYENNDKLSVKTGGNYLFIVMEKEVNNKIKRVFEIVSLYDAARIAKDELMINNENFKKRICEDYRLNHKEKPDKVLFTLQQNELVYFPENEEDPVLNFTKSEFEEWISNSLNKCKFAKRIYKVVKFSGKDCNFIPHIYANTISISKDLTDEQMNSLKTQYKDKKIPKKELNFEEFGSYGNSARTEVNESFVRELVFGKSKNNINAPLKKIQDYCIKIKIDWLGNINLPND

SEQ ID NO: 1835 - protein, 1454 aa, unidentified
  REGION 1..1454: note = Description of Unknown: Cas Enzyme sequence
MKKILGLDLGTNSIGWALIDAEKKCIDGIGSRIIPMSQDILGDFERGNSVSQTAERTGFRSTRRLRERHLLRRERLHRILNVMGFLPKHYAEQIDFKKRLGQFLDEKEPKLAWRLNEKDRFEFIFQNSFIEMLEEFRLKSQNIKIPYDWTIYFLRKKALSKKIEKEELAWLILNFNQKRGYYQLRGEEEKETPNKLVEFHSLKVVEVVADEEPNKKGETWYSLHLENGWIYRRSSKVSLADWKGKVRDFIVTTDLNDDGTVKKDKEGNEKRSFRAPDENDWTLIKKKTEQEIDKSEKTVGTFIYNTLLQNPNQKIKGKLVRTIERKFYKDELRAILNVQKQFHPELQNEDLFNDCIRELYRNNETQQLLLSNKDFVHLFLEDIIFYQRPLRSQKSSVGNCTLEYKTFKDDKGNINTEYLKVIPKSNPLYQEFRVWQWLYNLKIYQKDDDKDVTLQFISNAGALEKLFEFLMTQKEVDHKVILKYLFEPRGLKGKALGIEIGKYRWNYVYDSTKDESKIYPCNETGYEIRRRLAKVGNIPTDFLSKDNEQQLWHIIYSVTDKMEFERALKSFSKKHQLDEVSFVENFKKLPPFKSEYGSFSEKAIKKLLPLMRLGKYWDWNLIDPKTQCRIRKIFTGEYDEDIKNRVREKAIDLKNESDFQGLQLWLAQYIVYDRHSEANIAGKWNSIVDLENYLEKFKQHSLRNPIVEQVVSETLRVVKDIWSKYGNGAKDFFHEIHVELGREMKHTSDERKILSAQVTDNENTNLRIKALISELKDNSDGMLFVEDVRPYSPMQQEALKIYEDGALSSNENIPEDILKISKTAQPTKSELQRYKLWLEQKYRSPYTGEMIPLSKLFTTEYEIEHIIPQSRFFDDGFSNKVICESAVNKLKDNQLGLEFIKNHHGEIVETGFGKKVKIFSEEEYNDFVKRIYAQNRSKRNKLMLEEIPEKMIERQLNDTRYISKFVSNVLSSIVRSDTNDDGVNSKNVLPGNGKVTSILRQDWGLESVWNDLILPRFERMNQLTNSESFTSKNTNNKVIPAIPLELSKGFQKKRIDHRHHAVDALVIACATRDHVNLLNNKHAKSKERFDLNRKLRKFERKVYNDPKTGERVEKEVPKEFLKPWENFTKDAKDEVEKIVVSFKQNTRVINKTTNKYERIVDKNGKKSKALVEQTKGDSWAIRKPMHKDTVSGEVKLPWVKVSKEKILTATRKSIDTSFDLKTIESITDTGIQKILKNYLSIKDNNPELAFTPEGLEEMNKNIEQYNEGKKHQPIYKARIFEIGSKFSLGQTGNKKSKYVEAAKGTNLFFAIYQNKNGKRSFETIPLNIVIERQKQGLNSVAETNEKGEVLQFYLSPNDLVYIPTLDEQENSKSVDFSKISEEQVNRIYKMVSCTGTQCMFVRSDVSNSIVNKVEFSSLNKMERSVEGTMIKDICWKLKVDRLGNITEVNGKSVL

SEQ ID NO: 1836 - protein, 1459 aa, unidentified
  REGION 1..1459: note = Description of Unknown: Cas Enzyme sequence
MKKILGLDLGTNSIGWALISTDENDKPCRIEGMGSRIIPMSQDILGEFDKGNSVSQTAERTGFRSIRRLRERYLLRRERLHRVLYVMDFLPIHYADEIDFEKRLGKFKEDKEPKLAYYNKNFIFQKSFNEMLEDFRQHQPQLLANGKKMPYDWTIYYLRKKALSQKIDKEELAWLILNFNQKRGYYQLRGEDEEETPNKLVEFHSLKVVDVVADEEINKKGETWYSLHLENGWIYRRSSKISLIDWKDKVRDFIVTTDLNDDGTIKKDKEGNDRRSFRSPEENDWTLIKKKTEQEIDKLQKTVGVYIYETLLQNPNQKIKGKLVRTIERKFYKDELRTILTVQKKFHPELQSEDLYNDCVRELYRNNDAQQLLLSKKDFDHLFLEDIIFYQRPLRSQKSTIGHCTLEYRTYKDEKGVLIKEYLKVIPKSHPLYQEFRIWQWLYNLKIYQKEDDKDITPQFITTKEDLVRLFEFLMTQKEVEHKAILKLLLEPKSLKGKVLNAEIGKYRWNYVYDSVKDESKKYPCNETGYEIRRRLAKVECVPSDFLTKEREYELWHIIYSVTDKIEFEKALKTFALKNHIDEASFVENFKKFQPFKSEYGAYSEKAIKRLLPLMRLGKFWDWNLIDPKTQSRISKIVTGEYDEDIKNRVRDKAINLKQEIDFQGLQLWLAQYIVYDRHSEASIAGKWESVKDLEDYLNEFKQHSLRNPIVEQVVTETLRVVRDIWRKYGNGVEDFFHEIHVELGRSMKNTADERKRLTEQVTSNENTNLRIKALIAELKDNSDGALLVEDVRPYSPLQQEALKIYEEGVLTSGENIPDDILKISKTAQPTKSELQRYKLWLEQKYRSPYTGEMIPLSKLFTAEYEIEHVIPQSRYFDDGFSNKVICEAAINKLKDNQLGYEFIKNHHGEIVEIGYGKKVKVFSEDKYADFVKKNYAQNRTKRNKLLLEEIPEKMIERQLNDTRYISKFISNILSNIVRSDENDDGVNSKNMLPGNGKITTILRQDWGLDAVWSDLILPRFERMNQITNSESFTSKNTNNRLIPTVPLEFSRNFQKKRIDHRHHAIDALVIACATRDHVNLLNNKNANLKEQRHDLNRKLRKFEKKVYNDSKTGERIERDVPTEFLKPWSTFTKDAKDEIEKVVVSFKQNLRVINKTTNKSERFVEKNGKKVKELVPQVKGDSWAIRKPMHKDTVSGEVKLPWIKVPRDKVLTATRKNIDTSFDLKTIESITDTGIQEILKNYLASKGNNPEFAFTPEGLEEMNKNIEQYNNGKKHKPIYKARIFELGSKFPLGQSGNKKSKFVEAAKGTNLFFAIYHDEKGKRSFETIPFNVVIERQKQGLSSVPETNDKGDILLFHLSPNDLVYIPSSDEIENQNISNIKIINEEQAKKIYKMVSCTGVQCMFVRNDVATPIVNKVEFSSLNKMERSIEGVMIKDSCWKIKVDRLGNITELNDKPSV

SEQ ID NO: 1837 - protein, 1238 aa, unidentified
  REGION 1..1238: note = Description of Unknown: Cas Enzyme sequence
MKKILGLDLGSASIGWALIAENETNGIVKREILGLGSRVIPYEGTEGKEFENGTGESKNSIRTKMRTTRKGYDRYQLRRKYLVQELIKLNMYPLDELKKMSKMQLWELRSRAVIQKITLPELGRILLWLNQKRGYKSGRIDTNTDKKDIEYVAQVKNRHQLIKEQNLTIGQYFYQQLKNNEFFRIKEKVFPREAYIEEFDSICNEQKKHYSDILTDDVIAKIRNEIIYYQRPLKSQKRLVSICEFEGFWKTNSDGKEYFVGPRVAPKSSPLYQYERLWENINNISIEDKYGHSIELTSEQKWKLFEYLDNHEKLTHTDIVKILGLNKKECFFNKQLTKGIKGNTTKCAILNCFDNAERYTHLLRFDIEIVETKNKTYLYDKASGEVLSEKNLKYVHEKVEKKPLYQLWHTIYSISDQEECSTALQKRFNLDKEVADKLASIDFTKQGFGNKSVKVIRKIIPYLIEGDGYSEAMCYAGYNHSNSLTKDENLKRELQEKLKPIPKNSLRQPIVEKILNQMVNVVNAIIDKYGKPDEVRIELARELKQSKEERNQTFKKNNERERENEQIAKKLQKFGLRATRNNILKWRLYEELDNNKKLNAICIYCGQPISPVDAIKGADVDIEHIIPKSKLFDDSLSNKTLAHRDCNTDKGDMTAYDFMKTKTAEIFDAYVQRVSMLYANKLINKAKRDKLLTPENKIPSNFIDRQLRESQYISRKAREILLTISHNVWVTSGNVTAELRRLWGWDDVLMNLHLGKFRELGLTEFVEWESDHGNVSHKKEVIPNWSKRNDHRHHAIDALVIACTKQGYIQRFNTLNSSKTRENLKLEIESKSLEFKEKLSLLEKYIISEQPFTVKEVEEKAAGIIVSFKPGKKVAVFGKRKVGKPGSKKVVQTGIIVPRGPLSEKSVYGKILKVEKKPIKYAFENPQLIVLPKIKLLVEERIAKYGDAKKAIASLKKDPLYIDKNNQVLLEHASCYSSDYVIKYPVDINFNKVDKVVDGKIKKILEVRLNKFGGKPKEAFKDIKLDDKNIKWYEDEGLPMPIKSVRCFTGLSVVEPIKKDENGNIIGYVKPGNNHHIAIYTDSDGNRIEHICTFWHAVERKKYGFPVVIGNTNEIWDRVQQKPVGAFPEDFLQKLPTPNLKLELSMQQNEMFVLGIGPDELENYISSNNYKAISEKLYRVQKISKKNYVFRHHIETRSVDDKNAANSMRFLLIQSIGALFELTPQKIKIDCIGNIAVI

SEQ ID NO: 1838 - protein, 1428 aa, unidentified
  REGION 1..1428: note = Description of Unknown: Cas Enzyme sequence
MKNILGLDLGTNSIGWALIKQDFQHKQGEILGMGSRIIPMSQDILGDFGKGNSVSQTAERTAYRGVRRIRERFLLRRERLHRVLNVLDFLPEHYAHQIDFEKRLGKFRQETEPKLVYDHREFIFKNSFEEMLSDFKRHQPQLLENNRKIPYDWTIYYLRNKALTQKIEKQELAWILLNFNQKRGYYQLRGEEEEENPNKRVEFYSLKIVDVLADEPQKGKSDIWYSLVLENGWIYRRSSRMPLFDWKGKTRDFIVTSDLNDDGSIKKDRDGNEKRSFRAPGENDWTLVKKKTEQEIDRSHKTVGTYIYEALLQDPKQKIKGKLVRTIERKFYKDELKQILEKQKEFHPELQDDGIYQDCVRELYRNNEAHQTILSKKDFTHLFLDDIIFYQRPLRSQKSSVSNCTLEFRKYTDQNCIEHTQYLKVIPKSNPYYQEFRIWQWMFNLSIYRKDNDASVTGEFLNTAEAYENLFEFLNNRKEVDQKALLKHFKVSDKTHRWNYVEDKKYPCNETNTMISSRLDKVEGIINDFLTREMEQKIWHIIYSVHDKVEYEKALKSFARKNNLDEYSFFEAFRKFPPFRSEYGSFSEKAVKKLLPLMRLGKYWNYAAIDVNSKERIQKIITGEYDENIKDKVREKTFHLNSETDFQGLQLWLAQYIVYGRHSEASMIGKWNSAKDLEEFLKEFKQHSLRNPIVEQVITETLRVVKDIWVKYGNGAKDFFHEIHIELGRDMKLPAEERERLTRQISENENTNLRIKALLAEMMSDHSVENVRPFSPMQQEILKIYEDGILKSDIEIDDEILKISRTAQPSPSDLKRYKLWLEQKYKSPYTGQIIPLNKLFTPEYEIEHIIPQSRYFDDSFSNKVICESIVNKLKDNYIGLGFIKQFGGTVIELGFGKNIKVFKVEEYEDFVKKHYVNNRAKRTRLLMEDIPEKMIERQMNDTRHISKYISGILSNIVRVEDGTDEGVNSKNIIPGNGKITTQLKQDWGLNDIWNDLILQRFERMNQLTHSTGFTTWNENHQKLLPTVPVEFSKGFSKKRIDHRHHAMDALVIACATRDHVNLLNNQSAKSETGRYDLKRKLMQFEKAVYNDTHTGKKIEREVPKKFLKPWDNFTVDARNKLETIIISFKQNLRVINKATNHYEKWTEKNGVKTKERVEQTGTNWAIRKPMHKETVSGKVDLPWLKVPKGKIVTATRKSLDTSFDAKAISSITDTGIQKILKNYLEFKGNPETAFSPEGIEDMNRNIEKFNDGKYHQPINKVRVFELGSKFSLGQTGNKKDKYVEAAKGTNLFFAVYTNSGQKRSYETIPLNIVIERQKQGLPPVVLKEKNDFYLCPNDLVYIPAPDELENDYSFDPDHFSKERTERVYKVVSFSGNQIFFVRNDVSVSIVNKTEFSTLNKMERAIDGTMIKEVCVKLKVDRLGNIIKA

SEQ ID NO: 1839 - protein, 1189 aa, unidentified
  REGION 1..1189: note = Description of Unknown: Cas Enzyme sequence
MAKIIVGLDVGVSSVGVAIIQEEKNKKVIKELAVRIVPEDPNFQGKFYSGNTASKNLPRTTSRGIRRGYQRTKLRKSKLYSFLKDLNMFPDEELIKLDELSLYKLRNDSLERKLSLQEIGRILIHLNQRRGFLSNRKSKTAEENSSEYKQTIAQLENNLKNKTIGQQLYSELLEADNLQNITLRKRTYLRSSYIEEFDRIWNFQKTFYPEVLTGDSESKNKNSIYQKLKGEILFYQRPLKSQKGLVSDCAFEKHHKAISKSSPFFELFRIWQKVNDLEVTFENGDKYKPTLEQKKILVNNLFKGIKLNSKFKLSATEIKKILSFQGQNVYLNFPELDGSRTYSVIKKALISIGLNNEECEKYLQFDPYKNDEKGGLFELWHITYSLPSDDEIINTLQKRFNLTEEQGKLISNEVSYNADYGSLSTRAIKKLLPFMQQGFGYNEACKKIGYGQTKIEIIDKLQPILKNSLRNPVVEQVLNQVVNIVNQVIDNYGKIDEIRVELARELRNSAKQRKRISVSNFRNKKENDKIREVLSSDYQYKIVNGRDIQRYRLWQEADGQCLYCNREITMSDFISSQADLEHILPKSRSFTNNMNNFILAHKKCNSTKNQLTAYDFMSGKNEEVFEQYLEKVNELYNDGKGKISKAKFDNLICKGDDIPSDFVERMKKDSQYISKETVKLLKNVCENVFTTTGQVTDFLRDKWKLREVMQEVNYEKYKLLDLVDTKIIKDGINKTKEITIIKDWSKRDDHRHHAVDALICALTDQKIIFRLNNLNKLYQYEKSGMSKEELESNARFLNVENFDLKAFADQIDDWSKTPIENLRDETRKHLDQIFISIKKSSKVLSKNINNPKNSSKEQITWTPRGRLHEETVMGRIKRISEKKEKLNQKFNNLENIVDPSVKELISKRIDKYGSSIDAFSSKNINNDPLLLHNKELKEVSVYENVCVKRVSLNENFTLAQAEKIVDEKIREKIIKPKIEEKGGIKKAFSNLDEDPIWLNKEKGIQIKSVKVYEESKVEKVRDGYVKTGGNHHALIYLDDKGKYNERVVSFWDAVEIGKLNISHTGKPYPIINRNDDAVLGTFKFSMQINDLFVLDLKHSSNPAEENELDFYDSKNRSTLSKKLFRLQKMSKKSNGTFEIHFRHHLETTIDRNDKILRGITWEVFQSNSYLHRLEKIKINHLGQIIKIGE

SEQ ID NO: 1840 - protein, 1662 aa, unidentified
  REGION 1..1662: note = Description of Unknown: Cas Enzyme sequence
MKKILGLDIGTTSIGYSIIQISDEKNKNSISEKLTVSDINNDRIGIFEDAIGVRIINQDTDRFDRGLKLNDPKGSTLTPTANRRKFRGVRRMRNRYKLRRNKLYKVLSLLGLTPDETYFTNRKGKRGKDNDIGKALYGLRERASREKITLSELARVLLHLNQLRGYSSDRFAKDEEIRFDYYLTEVIELDWENRISVFEKGSTEDVKYYQFKAKLRFVEPYVIVEDDEKTVLYEVEGYIFKKEIDFEIGDFITIKAPEFKQNKKGKIVVEEYYKLTPTKPDATDWKYKYQTLHKNLSDWCKAGGTVGSYFYKNFYELSNLSRIRNNVVNREWYEKEFDAIWALQYEFHKDFFEKINVSNLVKDVFKDYSTVLNDVINKLGNKEQLQTLIKDKIIFFQRPWQQAKSKGRCEFEKIKVKREFAIKGTGTKELREEHIGRTVVPRSHPIFQDFKVWQQINNVRLIWNTADEKIDLFENAELFEKLTGKTIELVKELLFKKLQGSKTLSWRTFVKEELSLDTYDEIEEKKKAKISKKQGLDLETGEVVDEFFSVNFRKRKRDGTYDDIKLKGNTTRAELQTILKEKSAEWFETLHEQNKNVTNLQLLWEIIYDITNSDVAKVSSIIKKHFDFDENICLMLSKVQFDDSGMANLSAKAIRNLLPLMSDGKSYTNKTKIKVDELISLNSSETEIDADEKLSGLKDFVTDRKARVRLSKFAGENEFKYLNYWEAAAIVYGSHSSKGKSETKIMERVKNHSMNNPVVEKIVNETISIVNLLKDKYGFDEVRIELSRELRASADERQQMWEGMSNGTAKNEWAKKMLREIKQAMLEDNRDVSHLDTEISGSNLDKIKIIEDVVKYQKPVEFKTKEKEYKLTEPSNAEVTKYLLWLEQNFKCPYTNQPIPLTDVFARGKVVEIEHIIPRQRYYSNAYANKVITWREVNQEKGNKTAYEFIVSKRNSAGTVQVGKKEISLVSASQWENHVKEMFPKSGKRNNLLRKEIPEDPIERTLKETQYINKKLKEKLGELVGSDKVWVTSGAITDMLREKWKLNDIWKELLEERFVKFNNGEAKERLNLKYTTKHFNTKTNKYEDVEKFAGMSKRIDHRHHALDAIIIACTKQNHIQYINNLNAINSADVENDDSKKAKYKGIKTDVCIGDSSSKFKFPWDEKKFIPEVKQALQNVLVSHKNSNVLISPSKHRNNKDINSGKVASVRGELHLQTNYTKKKYFENEKINIVKLIPLLFKKKFENQNQTLVRFKSFEEIIKETILKEKYQNVLFSLFGEYNVEKLNSQTIKDFSKKVLKRIENEKLFIHEKSGEKITWLSTFIEKNASVRPMGLSMDLNSEKEIKDISNPRLRRIGQYRLNYINKKIAEIKALKLPFKEEENTRIREVREIPLYNNAIYEVRIKYKEGKFNWIEIKDLQISDLENIEYAKPETTVAIKNKLKEFSLDELKERYISNPIFLSEKPTLVKKARQKSFFQDLYELNDGRYVYSRDVFMTYVFVPEVSNRKDAKRELEFLKFFDAVKIVTLDKPDKIDYKKLIKKENYKLLFTLSKNDVVYIPDEVLTDEQIAEINWNEKREIIPKLFVVKEMTPSRNEIVFQHLYKSDSIRVNGDEAENILNTEKLEEQIKYGDTNMWKRCIKVDIDRLGREIKPYWENNKIIL

SEQ ID NO: 1841 - protein, 1445 aa, unidentified
  REGION 1..1445: note = Description of Unknown: Cas Enzyme sequence
MIKNILGLDLGTNSIGWALIKQNFENKYGEILGMGSRIIPMSQDILGEFGKGNSVSQTAARTDYRATRRLRERFLLRRERLHRVLNVLNFLPEDYASQIDFEKRFGKFKVETEPKLAWKNSDGKFSFLFQTSFNEMLEDFKAHGQDLKVPYDWTIYYLRKKALTQKIEKEELAWILLNFNQKRGYYQLRGEDIEEEKDKFFVKLNVDKVVDSGEKVKGKTLYDVYFDNGWKYEKQIVKTEDWIGRTKEFIVTESILKNGDTKRTFKAVDSEKDWIAIKTKTEQEIDRSRKTVGTYIYETLLQNPKQKIKGKLVRTIERKFYKEELKQILEKQKEFHHELQSDDFYNDCIRELYRNNEAHQLTLSKKDFVHLFMEDIIFYQRPLKSQKSSISNCTLEFRKYKDQNGVEHTQFLKAIPKSNPYYQEFRIWHWIFSLNIHKKDNDDNVTKEFLNTTRDFENLFEFLNNRKEIEQKPLLKFLLEQKEFKGKLLNAETEKFRWNYVEDKKYPCNETKTMISERLKKVENISDDFLTREMEQKIWHIIYSVNDKTEYEKALKSFAEKNNLDENSFFEAFKKFPPFKSEYGSFSEKAIKKLLPLMRLGKYWNYANIDLYSKNRIQKIITGEFDENIKDKVREKAIHLTTENDFQGLQLWLAQYIVYGRHSEASMIGKWNSADDLEEFLKEFKQHSLRNPIVEQVITETLRVVKDIWVKYGNGAKDFFNEIHIELGREMKQTKDERADATKTITENENTNLRIKALLAEMMNDHAVENVRPYSPMQQEILKIYEEGILKSDIEIDDDILKISKTAQPSPSDLKRYKLWLEQKYKSPYTGQIIPLNKLFTPEYEIEHIIPQSRYFDDSLSNKIICESAVNKLKDNYIGLGFIKQFGGTIIECGFGKSVKVFEAEEYEDFVKKHYANNRGKRNKLLLEEIPEKMIERQMNDTRHISKYISGILSNIVRVEDGTDEGVNSKNVIPGNGKITTKLRQDWGLNDVWNELILPRFERMNQLTNSTDFTAWNENHQKYLPTVPVEFSKGFSKKRIDHRHHALDALVVACVTKDHVNLLNNQSAKSDTKRYDLKKKLMKFEKTVYKDPQTEKRIEREVPKHFLKPWETFTVDAKNTLETIIVSFKQNLRVINKATNHYEKYVEKDGVKTKERVEQTGTNWAIRKSLHEETVSGKIKLSWVETSNGEFITATRKFLDSSFTLEKIKKITDTGIQKILKNYLEAKENNPELAFSPEGIEDLNKNIEKYNDGKSHQPIMKIRIYEKGKGRFVLGQTGNKINKYVQGSPNLFFAIYKDENGKKNFESIRLDIVIERLKQGLQAIPETNQNGVSLYQSLSPLDLVYIPTEDELELPHLLGFNKLNKTQITRLYNTNDFSGVTAYFSQNSFARHIYPKEMDLSWNEKKQKLSGSFDSKTASYNKTAIKDIFIKVKVDRLGNISIDKL

SEQ ID NO: 1842 - protein, 1246 aa, unidentified
  REGION 1..1246: note = Description of Unknown: Cas Enzyme sequence
MINKILGLDLGSASIGWALISEDSDSPSQKVNIVDLGCRIIPYDSTEGQDFTKGTGESKNALRTRDRSTRRGYDRYQLRREYLVKTLKNNNMMPDDSIKRLPKMELWELRAKAVTEQIFLMELGRILLWLNQKRGYKSSRSSANLDKKDSEYLLAVKSRHQKIKELNVTVGQYFYENLNDNQFFRVKENVFPREAYIEEFDAICNTQKKYHSSLTDTLINHIRDEIIYYQRPLKSQKGLVSVCEFEGFYVKKDGKEYFAGPKVAQKSSPLFQVAKLWESINNIRVKTKEGDELYLTLDQKRLIYEHLDNNDKLSLKDLCKIIQKKESEIFVDRKIYKTGIQGNTTKGILRKILNEDEYKKLCKLDIKIIEDPQKKACLYNKQTGEVIDSSITNYKIIDRNVEFEPLYQLWHTIYSIEDTDKCEKALSSNFGLNKDTANKLANIDFNRFGYGNKSVKCIRKILPYLMDGYDYSDSMMYAGYNHSGSLTKDENLSRVLMDQLKLLPKNSLRQPVVEKIINQMINLVNEIIKEYGKPSEIRVELARELKQSKEERIQTENDINKRTRENEKIAKELEEYGLRATRNNIVKWRLFHEINNEEKKLSAICIYCGEQLSLAETIQGRDVDVEHIIPRSKLFDDSQSNKTLAHRHCNSTKGNQTAYDFMKGKSESEFNAYVERVNLLFEKNLISKSKRDKLLMPESKIPDNFIDRQLRETQYISRKAREILSTICHNVYCTSGSVTSELRRLWGWDDVTMTLQLPKYKKLGLTEIVSWESDYGNNQHEREVIKGWTKRDDHRHHAIDALTIACTKQGYIQKLNTLNSKRTREEIENEVKGIIYNEKLSSMEKYLISKQPLTVKEVEEAVSKILISYKTGKRVISKGTRKSGSKGNKRIVQRGIIIPRGKLSEEHVYGKVKVVEKDRPLKYLFENPDLIVKDYIKNLVIKRLEENDNNPKIAYSSTLKNPILIKNNIPLKYASCYKEEYVIKYPVDQNFNKVDKVIDNGAKNILNSRLAKFNDDPKKAFKDVSTSEGKSIRWYEDESLNKPIYSVRCLTGLSAVVPVKRDEQGREIGFVKPGNNHHVAIYYDKDGNLFEHVCTFWHAVERKKFALPAIIENSDEIWDLIMESPSGKFNEPFLKQLPPPGSKLKLSIQQNEMFILGLPEEELQYALVSEDYATLSNYLYRVQKISSMYYVFRHHLETQLIDTKEYLSANRFYRITSFKSLLDSNPYKLKINILGKINLDQKNLIF

SEQ ID NO: 1843 - protein, 1037 aa, unidentified
  REGION 1..1037: note = Description of Unknown: Cas Enzyme sequence
MTEMNASGYILGLDIGSNSVGWAVLTRDQSTGHAAGLARVGVRIFQDHVNQGFETGAEEPPGQKRREMRGQRRLLDRRKRRLYKLARILQDSGLFPLDDMNSPEARHQFFTNLDKRIADELEETPGEPAQPHQPALPYLLRAQALDKKLPLHHLGRALYHLAQRRGFRSNRLFASKKDEDSKVVEPAIKDLKQKIEAAGARTLGEYFSSLEPEKERIRRNYTSRQMYRDEFEKIWSSQAPHYPDVLTDELKAEVDRAIFFQLPMKSNKHLIGKCELEPDRTRAPWGLFTAQRFRLIQRVNDARLITPEGEIRELKPEERTKLVNALETKKTLKFDRAKKIIGVSEGHKFNFEEGGEKEFPGNKTAAALKAVFGKRWPSLDPQEREDLVEDLLSMESEEALARRGEKAWGLSPEQAAKFADIHLEKGYCRHSRQALARLLPLMEAGIPYATAKLQIYGQKPLPEPESALPIVGQAVPELRNPVVSRALTETRKVVNNLIRVHGKPAVVRIELARDMKKSRKERGKITLQNRKNQDTRKAAMERITKETEIAEPSGKDIEKLRLADECRWQCPYTGRSFCWAELFGRTPQVDVDHIIPRSRCLDDSFNNKTLCFIDENRDVKQNRTPFEAYHGQPDLWADILGRVARFQGQARRAKLYRFQMEEAAPDDFASRQLNDTRYAATLAKKYLGLLYGQEALRNVQIGRGDITGFLRNVWKLNFLGGGEKKRDDHRQHAVDAVVIALTDAKAFQDLGRAVGQAEKNGRERRIFFSPPWEGFQDQVREAVLGTLVSHRVSRKVSGPLHEETYYRGLGQEPGKVRVRRRLGSKQGGLTMAEIKDIVDNRVRKLVEEKLTALGETNPQKAFADEKNLPRLPNKNGDPVPIRKVRIEKPLKPYTVGQGMRERHVVSESNHHLEILETVNRRGQKQWAGALVPLHEAVRRLRAGEPVVQKDHGPDKRFLFTLAPGEIVELDQEGGRALFRVRSVYEGNIDYVSLSDARKKTDIKATHQWKKSAVNVLGKLNCRKVVVTPLGEVRRAHD

SEQ ID NO: 1844 - protein, 1428 aa, unidentified
  REGION 1..1428: note = Description of Unknown: Cas Enzyme sequence
MTKNILGLDLGTTSIGFAHIIEGDSTEQSSIKKIGVRVNPLTTDEQTNFEKGKPVSVNADRTLKRGARRNLDRYQDRRKNLIDALLKANIITTETILAENGKNTTHSTYFFRAKSAVEKIEKEELARVFLAINKKRGYKSSRKAKNEDEGQIIDGMTVAKRLYEENLTPGQLAYQLLKDGKKYLPDFYRSDLQSEFDKVWDFQKQFYPEILTDEFYKELKGKGQRATSAMFWAKYGFNTAENKAKSREDKKLQAYLWRSDAVDKELEKEEVAFVITEINNNLNNSSGYLGAISDRSKELYFNNQTVGQYLYEQFKKNPHTRLKNQVFYRQDYLDEFEKIWETQAKFHPELTEQLKSEIRDIVIFYQRKLKSQKGLVSFCEFESQEKIINGHKKTIGLKVAPKSSPLFQGFKIWQVLNNVLVRKKGNKKRVVKETAPTLFDEEKEIFVFDLETKQKLFDELNIKGNLKSAKIIELLGHKSADWEMNYSELEGNRTNKILYDAYLKILELEGYDEDLLKLQGKDDIDVSELKAPVLEIKNMVKRIFEVLNINTEILEFDAELDGKDFEKQASYQLWHLLYSYQEDDSKTGNDTLFRLLEEKFGFKKEHSQIMANVAFSDDYGNLSSKAMRKIYPHIKELSYDKACLQAGYRHSASSLTKEEIANRPLKNQLELLKKNSLRNPVVEKILNQLVNVINTIIETNSKKDEEGNITEYFKFDEIRVELSRDLKKNAEERREMTTNINASKIAHEKIFKLLQNEFHIKNPTRNDIIRYRLYEELKNNGYKDLYSNTYIPREILFSKQIDIDHLIPQSKMFDDSFSNKSVVFRKDNIEKGNRTAFDYILEKYGEIGVEDFKLRIEMLFEQGKKNKEEGISKAKYQKLLKQESEIGDGFIDRDLRDSQYIAKKARNLLYEICRVVTPTTGSVTARLREDWDLINIMQELNFEKFKTLGLTEKVEKKDGSFKERIVDWSKRNDHRHHAMDALTVAFTKHSHIQFLNFLNARKNENHKEHNAIIGIEGKETTWKYDDDGNKKRVFNLPIPNFREQAKEHLENVLVSHKAKNKVVTKNKNKTKSKNGEKTKVELTPRGQLHKETVYGKYQYYINKEEKVSAKFDEETIKKVANPIYKKLLLERLSENGNDPKIAFTGKNILSKNPIYLNEKKTETLPETVKLTWLEEDYSIRKDITPDNFKDVKTIEKILDEGVKRILLNRLKEFGNDPKKAFSDLDKNPIWLNEAKGISIKRVTISGVKNAEFLHYKKDHFGNEILDKNGKQIPVDFVSTGNNHHVAIYRDEKGNLQERVVSLFDAVQLVNLGEPVIDKNYNQGSGWQFLFTMKQNEYFIFPNEKTGFNPKEIDLLDPKNKKEISPNLFRVQKLATKNYFFRHHLETTVDEVVQLKDVAYVSIRSTSPLGNIIKVRLNHLGDIVKVGEY

SEQ ID NO: 1845 - protein, 1339 aa, unidentified
  REGION 1..1339: note = Description of Unknown: Cas Enzyme sequence
MKKTLGLDLGTNSIGWAIIEQGDGTKKLTAAGSVIFPEGVARVKGNEIAATEQRTRSRATRRLYMRRRMRKQRLLLHLIKNGMCPLSEEGLRNWKANDRYPLEDGFVSWFKMNPYELRARGLQEKLAPMELGRILYHLAQRRGFQSNRKGGDGEQESFHEGLEDKGIAGYNETLKLIDEYVTLGKAGHELGKEHKPIRKRYFKRSNLVDEFNQIWDVQRTYHSILTDALKAELGDGKTGDLFFQRPLKGKKSEVGRCTLEPGKRRAPISSIEAELFGALQTLNNIRRDDRPLNAEERERVLPLFFRRSKPSFDFEDVLKALKLKDAERSFNYKKKDKLPGARSIAHLADLWNEDAMSIVQAFGTMAPDMVGERKTWSDRYSAIYNADDWDNLSERKAKGQDTGTKRDLKEYAITVWRFDDEQLKLLEKFNPKQGYHNLSTRALRRIIPLMYGIDGQAPMGYHDAVVLANLPAIFKVVHKVSGKDGKPVTEMTKGPNGHLVPKVDDRWAAMSELERTSVRNGIRERLADHRDYNVEMLLLNGLIRHYRDSLGEAGGRKGFWNAEWDQRLTNGIAETLSLEQKRSKGEAALDALRAKVKEAFLHHIEQHQKVQFEPLMRRDERVKQWLMDNFDLRPKDVDKLYHHSAVNIYKEQGDRLGDPKTPGLKNPMVYRALHSLRMVVNKMIEAKLIDRKTQVNIEMARELDSANKRKAWERYQAVMRKKNESAEKAVREHFASMGRHTEPSDEDIERMWLLEEAREVFGRVLCIYTGKEFGVADLYNGGVEIEHTWPRSKTVDNSMANKMLCATWYNREVKKEQLPPNLPNYDKEAMVKGKMLPGIKESAAPIKKLWDKYEGFVRGCKASSKNAATKDAKDKAIQDRWFNQFFRDYWRTKYEHLTAEEIKPGFMNRQLVATGQITKLARAYMNSYFNRVDCLKPEALSAFRKEWMGESFVHEKDRSKHTHHAVDAAVCAAVDRAAFDALAHHYEEQDEKNVAGSFDHPWDSFGTDMRKLRDAALVYHVHKPGIGRTSAYQRKVKLKDGRIVAVKATGDAVRGSLHSATYYGRIARKKAGTDEYELTTVIRKSLDHSSFFPFKEADKSKVVDKRMKELLEHADLEKVKADGGLEIKVKCGNDFILQKIKKVRVFEPSVKNPKALKTHRDTLPGLEHKHHLWVTGGENPILAMYVNDKGRFAHSVFSLFMLAQYMKGKSGRSSLLSALPRIHPERPGYTLAMRNGKPFVLHVGQLVVLYKDAEEEVDMNNIEEMNRRTYVLRKVEDDPRVNLVNVLDARPDKEIEEASQWDINDPFKWLRFSPHGMKALFDGIDITLAPIPNGPMLVM

SEQ ID NO: 1846 - protein, 1425 aa, unidentified
  REGION 1..1425: note = Description of Unknown: Cas Enzyme sequence
MKHILGLDLGSNSIGWALIEQDFDNKQGKILGLGSRIIPMEQKILSKFEEGTTVSQTAERTKFRGIRRLRERHLLRRERLHRVLHLLGFLPPHYDAQIDFTKRFGKFIGDTEPKLAYNNEGFIFLESFNEMVEDFKKHQPQLFYIKSNGEESKIPYDWTIYYLRKKALYEKISKEELAWIILNFNQKRGYYQLREEEEEKENDFEIISSKVLSVVKKEKDKKYNKYWYDIILENGLVYTAAFYNDFVYSWVDQEREFVAKRTLLKNGSEKVELSYLPTFDEIAKMNKQQQDKFYQKIKIKTENSIGNKPVGAYIYDHLLQNPNQKIKGKLVRTIERKFYKEELKAILEKQVALQPELFTEELFVDCVRELYKNNEIHQNSLSSKDFEHLFLNDIIFYQRPLRSQKSNISSCSLEYRFCIDKETKQRRKTYLKVISKSNPYYQEFRVLQWLSNLKIYRKEDDKDVTSEFISSIEDKETLYEFLMSEKEVSNKSILEFLLMKSLREIYPFAKETELKKELKKEITKYRWNYVYEEENDNKKYPMNETGYEIKKRLKEVKNIPDNFLTKDIEYQLWHIIYSVTDKYEYEKALMKFAQKHNLDTESFVENFKKIKPYPSDYGAFSEKAIKKLLPLMRFGKYWNYSDISEPVQARISDIINGVDNESIKTIVREKADKYQLGQEVDFQELPLWLAQYVVYGIHSEAADIQHWTSPSDLEEYLKGFKQHSLRNPIVEQVVTETLRVVKDIWEYYGKVEQNFFKEIHIELGRELKKTAEERNRVTREINENEETNLKVKKKLQELFEDKSVENVRPYSPIQQEKYRLWQEQKERSPYTGQPIPLSKLFTDEYQIEHVIPQSRFFDDSLSNKVICEAAVNAQKGAQLGLEFIKKHGGEIIEIGLNKKVIILNEKEYKELVNKHFANNRAKKAKMLMEEIPEKMVERQLNDTRYISKFISQILSNIVRSPQEDNGVNSKNIIPCTGKITAALKQDWGLNDVWNDLILPRFERMNKLTQTELFTTYSEKYQKKIPTVPLEYAKGFQKKRIDHRHHALDALVVACATRSHINYMNNQNALDKHKTKEENQNARVDLRTVLCEKKYNDNAEDNYNWIFKKPWNTFTQDVRSALEMVVVSFKQNLRVINKATNYYEKWVEEKGKMVKKKVKQEGINWAIRKPLHKETISGKITLERVKVGKGKILTATRKSIDSSFTEKTIASITDTGIQKILLNYLAHKGSPELAFSPEGLEEMNKNIAKYNDGKDHQPIYKVRIFEEGSKFPLGEIGTKSQKYVETAKGTNLFFGIYQGKEKRSYATIPLDEVIERQKQGLTSVSEHNEKGEKLLFSLSPNDLVYVPMEGEDAESIDYANLSKEQRERIYKIVNFSKKRLYGVPNIVAIPIIDKMEYTQYNKIEFLKEKESCIKLKIDRLGNISKA

SEQ ID NO: 1847 - protein, 1432 aa, unidentified
  REGION 1..1432: note = Description of Unknown: Cas Enzyme sequence
MKHILGLDLGSNSIGWALIEQDFDNKQGKILGLGSRIIPIEQKILSDFKEGTTVSQTAKRTEYRGNRRLRERHLLRRERLHRVLHLLGFLPPHYDAQIDFTKRFGKFIGDSEPKLAYNNEGFIFLESFNEMVEDFKKHQPQLFYIKSNGEESKIPYDWTIYYLRKKALQEKISKEELAWIILNFNQKRGYYQLRGEEEEKSTKNVEFYSLKITDVIADTPNNKGEIWYSIHLENGWVYRRASKISLEDWKGKVRDFIVTTELNEDGSIKLDKEGKEKRSFRAPSEDDWNLLKKKTEQNITFSGKTVGEYIYDHLLQNPNQKIKGKLVRTIERKFYKEELKAILEKQVALQPELFTEELFVDCVRELYKNNEIHQNSLSSKDFVHLFLNDIIFYQRPLRSQKSNISSCSLEYRFCIDKETKQRRKTYLKVISKSNPYYQEFRVLQWLSNLKIYRKEDDKDVTSEFISSIEDKETLYEFLMSEKEVSNKSILEFLLMKSLRETYPLAKESELKKELKKEITKYRWNYVYEEGNDNKKYPMNETGYEIKKRLKEVKNIPDNFLTKDIEYQLWHIIYSVTDKYEYEKALMKFAQKHNLDAESFVENFKKIKPYPSDYGAFSEKAIKKLLPLMRFGKYWNYSDISEPVQARISDIINGVDNESIKTIVREKAEKFQLSQESDFQGLPLWLAQYIVYGIHSEAADIQRWTSPSDLEEYLKGFKQHSLRNPIVEQVVTETLRVVKDIWEYYGKGEQNFFKEIHIELGRELKKTAEERNRMTREINANEETNLRVKKKLQEFFEDKSAENVRPYSPVQQEKYRLWLEQEERSPYTGQPIPLSKLFTDEYQIEHVIPQSRFFDDSLSNKVICESAVNAEKGALLGLEFIKKHGGEIIEIGLNKKATVLNEKEYKELVNELFANNRGKKAKLLMEEIPEKMVERQLNDTRYISKFISQILSNIVRSPQEDEGVNSKNIIPCTGKITAALKQDWGLNDVWNDLILPRFERMNNLTQTELFTTYSEKYQKKIPTVPLEHAKGFQKKRIDHRHHAMDALVVACATRSHINYMNNKHALDKHKAKEEKQNARIDLRTVLCEKKYNDNAEDKYNWTFKKPWNTFTQDVRSALEMVVVSFKQNLRVINKATNYYEKWVEEKGKKVKKKVKQEGINWAIRKPLHEQTVSGKITLERVKVGKGKILTATRKSIDSSFTEKTIASITDTGIQKILLNYLAYKGSSELAFSPEGLEELNKNIYLYNDGKPHKPIYKVRSYEKGSGRFVLGERGAKSKKYVQGAPNLYFGIYQGKEKRSYATIPLNEVIERQKQGLTSVPELNEKGEKLLFSLSPNDLVYVPMEGEDTENIDFTNLSKEQRERVYNVNDFSSTCYFTPNRIAKAIYPKEVDMQRKGDELSGSYDTKTASIEGVQIKESCIKLKIDRLGNISKA

SEQ ID NO: 1848 - protein, 1424 aa, unidentified
  REGION 1..1424: note = Description of Unknown: Cas Enzyme sequence
MKHILGLDLGSNSIGWALIEQDFDNKQGKILGLGSRIIPMDQGILSDFKEGATVSQTAKRTEFRGIRRLRERHLLRRERLHRVLHLLGFLPPHYDAQIDFTKRFGKFIGDSEPKLAYNNEGFIFLESFNEMVEDFKKHQPQLFYIKSNGEESKIPYDWTIYYLRKKALQEKISKEELAWIILNFNQKRGYYQLRGEEEEKSTKNVEFYSLEITDVIADTPNNKGEIWYSIHLENGWVYRRASKISLEDWKGKVRDFIVTTELNEDGSVKLDKEGKEKRSFRAPSEDDWNLIKKKTEQNIVFSGKTVGEYIYDHLLQNPNQKIKGKLVRTIERKFYKEELKAILEKQVALQPELFTEELFVDCVRELYKNNEIHQNSLSSKDFVYLFLNDIIFYQRPLHSQKSNISSCSLEYRFCIDKETKQRRKTYLKVISKSNPYYQEFRVLQWLSNLKIYRKEDDKDVTSEFISSIEDKETLYEFLMSEKEVSNKSVLEFLLMKLLRETYPFAKETELKKELKKEITKYRWNYVYEEENDSKKYPMNETGYEIKKRLKEVKNIPDNFLTKDIEYQLWHIIYSVTDKYEFEKALMKFAQKHNLDAESFVENFKRIKPYPGDYGAFSEKAIKKLLPLMRFGKYWNYSDISEPVQARISDIINGVDNESIKTIVREKAEKFQLSQEAYFQGLPLWMAQYIVYGIHSEVADIQRWTSPSDLEEYLKGFKQHSLRNPIVEQVVTETLRVVKDIWEYYGKGEENFFGEIHIELGRELKKTAEERNRMTREINENEETNLKVKKELQQIFENKSAENVRPYSPIQQEKYKLWLEQKERSPYTGQPIPLSKLFTDDYQIEHVIPQSRFFDDSLSNKVICEASVNAQKGAQLGLEFIKKHGGEIIEIGLNKKVRILNEKEYKELVNELFANNRGKKAKLLMEEIPEKMVERQLNDTRYISKFISQILSNIVRSPQEDNGVNSKNIIPCTGKITAALKQDWGLNDVWNDLILPRFERMNNLTQTELFTTYSEKYQKKIPTVPLEHAKGFQKKRIDHRHHALDALVVACATRSHINYMNNQHALDKHKAKEEKQNARIDLRTALCEKKYNDNAEDKYNWTFKKPWNTFTQDVRSALEMIVVSFKQNLRVINKATNYYEKWVEEKGKKVKKKVKQEGINWAIRKPLHEQTVAGKITLERVKIGKGEMLTADRKFIDSSFDTKKISKITDTGIQKILLNYLAYKGSSELAFSPEGLEELNKNIYLYNDGKPHKPIYKVRSYEKGSGRFVLGERGAKSKKYVQGAPNLYFGVYQSKGKRSYATIPLAEVIERQKQGLTSVPELNEKGEKLLFSLSPNDLVYVPMESENIENIDFTNLSKEQRERVYKTVSFTGNQCFFVRQDVTTSIVNKMEYSSLNKMEKGIDGIMIKEFCIKLKIDRLGNISKA

SEQ ID NO: 1849 - protein, 1486 aa, unidentified
  REGION 1..1486: note = Description of Unknown: Cas Enzyme sequence
MKKVLGLDLGTNSIGWSLIESDFDKKEGKIIGAGVRIIPMGQDVLGKFDAGQSISQTAERTGYRSTRKLYHRNNLRRERLHRVLHILDFLPNHYDQSIDFEKRLGQFYPEKEVKLNYKEVGDRHEFIFQDSFKEMTEDFKSTGYNGPTPPDWTIYFLRQKALTTKISKEELAWIILNFNQKRGYYQLRGEEQDEDNNKQFVQLKVQDVEDSGEKVKGNILYNVTFTNGWIYDKQITKTEEWIGREKEFIVTIKELKNGDLKYSYKAVNSEEDWAAIKAKTQQEIDKSKLTIGQFIYQTLLEKPSQKIRGKLIKTIERKYYKEELVKILEEQAKHHPELQDKTIYNRCITNLYSKNEAHRNNIQNKDFVHLFVNDIIFYQRPLKSKKSTIGTCRFEYRTYLKTDEKGNKEREKEYIKAIPKSHPLFQEFRLWQFCNNIRIYESVLLESSSKKEDADITSGFLQTEDDYTAFFEYLNEKNEVDQKNVLEYLLKKKTDLKKVPKEELAKYVWNYDPERKYPCNQTNYLISSRLKKVEGVDLEKFLTKEKEVEIWHIIYSVKDRNEYHQAIKTFAKKNGIDEDSFFDNFSKIPPFDSDYSSYSFKALNKLLPLLRSGKYWEKNAFCKKTNDRINKIITAEYDENIQKRVREKAIDLTEISDFKGLPLWLASYIVYDRHSEGSNVDQWTAPEQISKWLEEFSQHSLRNPIVEKVITETMRVVRDIWNHYGNGEQSFFDEIHVELGRDMKNPAKKRKAMSKRMTENENTNQRIRELLNELMNDPDIEGDVRPYSPSQQEILKLYEDGIYSNPTKSFSKVSEDEIDKIRRKNSPTKADIIKYKLWLKQGYRSPYSGQVIPLHKLFTREYEIEHIIPQSRYFDNSLSNKVICERDINADKGNRTAYEYLKIKNGSPVESYPLLSPDEYEQNCRTYFGSNTSKLRNLLSEDIPEGFINRQLNDTRYISKYVKGLLANFVRGKDEKEETSVNLVSLSGAITSVLKKDWGLNDKWNEITAKRFQRLNAIYDNNAFGGWDDKINAFRSDVPDDIKKGFSKKRIDHRHHALDAIIIACCTKDHINYITSINTERKNHTLVSKLRTHETVNVKNKTTGKMEAIPVAKHYKHPWNTFSVDAKNALEDIVVSFKHNNRIINKANNKTWQWVEKDGILTKTRIKQTKGDNWAIRKPLHKETVSGIVQLQNVKIPNGKISTASRVSLTEIKNVKHIEKITDPSIRKILFKHLENYIDETGKQNYLDAFSPSGIEDMNKNIKELNGGRDHMPILKVRLYEIGSKFEVGKSGNNKTKYVETAKGTNLFFAVYWNDKKDKRAFETVPLNEVIEYQKQVAHLPRSQKHDILPKPELGRFMFTISPNDFVYVPNEEEVNNPSLVNFEQLSQTQINRIYKMVSCTGSQCFFSPASNATEIIKSENGTNAKNERIQLFNDEQDVLDENGKGIMIKNVCWKLSVDRIGNIKLASKKEYITNNLKSEFKNNQK

SEQ ID NO: 1850 - protein, 1431 aa, unidentified
  REGION 1..1431: note = Description of Unknown: Cas Enzyme sequence
MNNKLIFGFDVGTNSVGWAAVQLAFEEANGKILGLGSRIIPMDQAEIGDFNKGNLQSAASQRTYHRGVRRLRERQLKRRERLVKVLKIMNFIPSEWEPNPRYSFAFIDEGERTRFKFQESYNEMKGLFLKKHPHMKSVSHDWVIYYLRKKALNNKITKEELAWLILQANVKRGYFQLRGDSELETEANKYFVSSIVDKIEDLEDDVRGKKRLNIYLRDDVIGGYESKEIPDWIGKEVEFIVTEKETKEGKKITLSTPDPKDWTLRKKKTEQIIAKADKTVGAYIFDKLLENPNAKIRGKEVHTIDRHFFKEELESILKVQANFHVELKDASLLGLATKALYDKNKAHRTNLMKFDMTHLLLNDILYYQRPLKTKKHLIANCKYENYQYKGKEGNVMFKPVKGIAKSHSLFQEFRIWDIIHNIKVIQISDQDENGIIRNDIDVSDEILTHTIKANLFDAFDRAKELSHNQILKAIGLNNKEYKLNYEVGSKLKGNELKAAVLKLGKGHEDVSNEIDNLLADGLRLELLWHAVYSLGDNIEHLRSGLKNKKLELSSELQNLLIDLPSFSKDYAAFSKKALKKLLPLMKCGKYWDVNTISDQVKERINTLLDAIDSEAVSDRSRDNLIGMEDISDFQGLNLTKASYAVYDRHSESINIEKYSSPEDIDVSKLVPNHSLRNPTAEKVLRETLLVAKDMWAKYGKPDEIHVEMARELKLPNDKRKEYTYKRNENYIRNQRAKAMLVELSKENSDINPFSKGHLDTFKIFEEGAVQNEKLIDKDIIAIRKKGDPSKSEVTRYKLWLEQKYISPYTGQIIPLSKLFTPAYEIEHIIPKTLFYDDSFNNKVICETKANRFKDNRTAYEMICNAGGTEVDSGIILLTKDVYEAQMKSMYASINYKKYKNLLQYDPPKGFSARQLNNTRYINRKLLQLLDPIVREDNEIEAISKNMLSMQGGVTSDLKNDWGLHDVWKRLLAPRFIRMNKISGSNDYYNKKGNRIDLSGYENELKRLDHRHHALDALVIACTTRAHVNYKNSLKSEKRRYDLEPKLLKPREKNNKKSYVLPWESIAQDAFDALEKVIVSFKNNNRVINKTINYYQKYIEQADGSWKKGYVKQATNNDHWAVRKPLHQETIYGRLTQVEYKDVSVSSAWGNVELIANSEIKSQLRKVHATYKGDYKKAKKYLKHSPLQLDGKEVNRITMRLENPNYATSQLTIDSTVKRKQLDKIVDQKLKAEIISHLEQYNDISEDAFSETGMVEFNKGRHKPVKSVKVKQDLGIAFPLGYSESTKHKYAKGAKGTNLYFVIYKNIETGEHEITSSSTLPFNDLIELEKAGEELSEYREGYEYFTLSPGDLVYVNDMDDKTLSVKEYKPSRIYKCVSFSKHQCFFVPHRISSVIVDKKEFSVKNKSERSIDEIMIKNSCIKLKIDRLGTLL

SEQ ID NO: 1851 - protein, 1040 aa, unidentified
  REGION 1..1040: note = Description of Unknown: Cas Enzyme sequence
MKKSEIHDELVLGLDLGTNSVGWALIRVERGAATGIVDAGVRIFAAGVNVDPTSGKNESRAVDRRRMRMMRRQLARKKVRRQTVLRLLSAVGMLPSEEAPARQPRKGDFTAWKKLLSVNAYELRTRALDEKLEPFELGRALFHLAHRRGFKSNKKELARSQAKPDANEDLKGLKGEIKSLDEAIRTTGCRTLGEYFFKNLDLERRVRTRHTSRKMYREEFDLIWAKQAGYAPNLLDEKLRKALVRAIFYQRPIPSQKDRVGKCELEPGKRRCAQALLHAQEARLLQDLNHLELVWPNGEQAPLDADQRAKLLALLETSERITFSRARKELGIKKSTGIEFNLEKGGREEIKGNVTAARIREVVGARWDEAGDALKADMVDTLMGMENEDAIAGRARKAWGFDDEMADQFSQICLEDSYAGHSSKALHKLLPHLRNGLPYAQAREQAYPNKAWRTAEIHDELPPCENLRNPVVQRTLAEMRRVVNTLIAEHGKPGKIRIELARDLKQSAKNREADWKAMRSREKQRKAARKALVEQVGMKNPKPRDVEKWLLYEECGRVCPYTGKSIGASALFGDNPQFDIEHIIPFSRSLDNSFANKTLCEVAANRNEKKNRTPFEAYGQTERWNDILLRVTKFSGEYTKEKLRRFMLEKVAGESEFMSDFASRNLNDTRYASVKAAENLAVLYPPDERLARIQVSTGRTTSLFRSAWGLNRILGGGDAKSRDDHRHHAIDAIVVALTTPGMTHELSLAASRSWLTTGRAGTFTDMPAPWPEFEEAVRQAIGRIVVSHRVDRYVNGQLHQETYYGQIRLAGGERWVIRKALSKLTESEIASGAIVDQAVRKAVEGKLTETGLKPDKCFQNGQNTPYLVAKTGRKIPIRKVRVVQSVNPVTVAPGTGKARHVVSGNNYALEVFACKDKNGNPAWRTHVVTRREAMRRLRQIRNSRQGSVIRRQDEEGNPLRFSLVIGDMVRMRYGNEMMTCRTQAISIRDYVFREHSDARDEKTVKQLKQRIRFRSDTALKDAVENKLAIDPIGRTHVSHD

SEQ ID NO: 1852 - protein, 1018 aa, unidentified
  REGION 1..1018: note = Description of Unknown: Cas Enzyme sequence
MQNEAVGSKVLGLDIGSNSIGWALLNNSKHEKGEILAAGVRIFEGGVNIDEKSGKSLSLGVERRQARARRRQIARRAMRRRTVVRILQEHGMLPAGNPSHNDPAWNKLLETNVYALRAKGLDQKLEPFEFGRVCLHLAHRRGFLSNRKAPPKKNEEQGVVAEKTKELEDEIRTKGARTLGEYLNRINTSEERIRQRYTLRRWYREEFEQLWEVQSGLDRDRLTPLLKSQLTRAIFYQRPLKKPRNLVGFCELEPRSRRAALALLDAQDFRLLQDILHTRVVQPNGAVRPLTSDERKKLYEHLWRVESLKFSKARKLLGLSKDTTFNLEEGGREEFQGNTTAARIREILGARWDAMSSESRNIVVDDLMGMQDEDALARRSRKLWGLEEQAAEALSQVGLESGYARHSRKAMRKLLPIMKEALEVEQEMSYAEAVIQAYPNRPQSAEAERLPPIENLRNPIVQRALSELRRVMNALVAQYGKPSEIRIELARELKQNAKAREDTWKNNRQRERERKKAAELIFNEIGIKGPKNTDIEKMLLWEECRRVCPFTGKGISAHDLLGDEPRFDIAHIIPFSRSLDNSFANKTLCDADENRHRMLDRTPHEAYADDSARYQEILARVKSFTGSFRDEKLRRFKMEGLEGPAEFLEGFASRQLNDTRYASRRAAEYVGLLFAPDERKRRVQVTTGRVTAYLRSAWALNGILGDGNRKSRNDHRHHAVDAVAVALTTPAAIRALTVAAQQSRRPGSFRDVPLPWPSFVDDVKQALSKVIVSHRVDRRVNGQLHQDTFYGRIRDAEGRERCVIRKPLAALTEADIRDEAIVDKAVRNAVLAKLKEEAKAPAKAFAEPANHPVLLTAKGRRIPVHRVRVFQNKEPETLGEDKTRLVQTGSNHHLAVFLAKDRKGNESYRGEIVSRLEAMRRLRDGQPVITRKDGEGNPLVFSLAINDMVELEWAGGRLICIVQKLSHRDYNFRLQTDARRATALGGDQIRIRSDSALYAAKVKKYCVDPLGRLHVSHD

SEQ ID NO: 1853 - protein, 1452 aa, unidentified
  REGION 1..1452: note = Description of Unknown: Cas Enzyme sequence
MRNILGLDLGTTSIGFAHVIENDHPLNSEIIQIGSRIIQYGNFDKIDKSGKVSESKNPSDDFNSGKGLSPNAGRTQKRGARRNLDRYQLRRANLIHALFRANIITGETKLAEDGKNTTHSTWKLRSQSSKERIGKEDLARVLLSINRKRGYKSSRKATNENEGKAIDGMDVAKRLYEEKLTPGQLAYKLLEEGKKHLPDFYRSDLQAELDKVWVYQNQFYPEIFTNEFKKELGGKGQKSTSATFWSKYQFNTAENKGTREEKKNQAYKWRSEAFSKQLEKEEVAYVITEINNNLNNSSGYLGAISDRSKELYFNKETVGQYLFKQLLKNPHTQLKNQVFYRQDYLDEFEVIWSEQKKHHSELTDELKIEIRDIVIFYQRKLKSQKGLVCFCEFESKAIEIETGKKKIIGLKVAPKSSPLFQEFKIWQVLQNVLIEKKGSEKRKTTNEQQGSLFEEAKEIFAFDLEAKNHLFEELNLKGNMSSKSIIELMGYKHQDWDLNYSLLEGNRTNKSLYEAYLKILDIEGYEVKDLLDVKSNKDEVELDDLKASASEIKNMVNQIFDTLKINTEILDFNPELSGKAFEKQASYQLWHLLYSYEGDDSSSGNEKLYELLKKKFGFKREHSKILANVTLSGDYGNLSSKAIRKLYPYIKENNYSTSCELAGYRHSASSLTREEIANRPLKDKLELLKKNSLRNPVVEKILNQLVNVVNTLIEKNSKRDENGNIVECFKFDEIRIELARELKKNAKERAEMTSNINTAKTNYEKIFKLLQTEFGVKNPSRNDIIRLRLYEELKNNGYKDLYTNSYIPREILFSKQIDIDHIIPQAKLFDDSFSNKTVVYRKDNLDKGSKTAYNYIDSKYGEKELEAFEVRIASLFELNKKNKEEGISKAKYQKLLKKETEIGDGFIERDLRDSQYIAKKAKNMLYEISRSVLSTTGSVTNRLREDWDLVNIMQELNFDKFKRLGLTELVEKKDGTFKERIIDWSKRNDHRHHAMDALTIAFTKHSHIQYLNNLNARRNEKNKLHGSIIAIETNETAIVTDDQGNKKRIFNLPITNFRQVAKEHLENVLVSHKAKNKVVTKNKNKTQSKMGEKIKVELTPRGQLHKETIYGKYRYYETKEEKIGTKFDLKTIEKVTNPIFKEVLLQRLSENGGDPMKSFGGKNALSKKPIYLNDERTEMLPEKVKLVWLEENHSVRKDITPENFKDEKAIQKVIDLGVKRVLLTRLGEFGGDPKRAFSELDKNPVWLNKEKGISLKRVSISGVKNAEPLHYKKDHFGNIILDKEGNKIPIDFVSKGSNHHLAVYSDENGNLQDDIVSFFDAVRLGKSSELIINKSYNQGLGWRFLFSMKQNEYFVFPNEKLEFNPTEIDLLNPENAKIISPNLFRVQKLSKVTYGNTAVRDYVFRHHLETTVEDKRELKEIAFKNIKSLGYFENIVKVRLNHLGEIVKVGEY

SEQ ID NO: 1854 - protein, 1235 aa, unidentified
  REGION 1..1235: note = Description of Unknown: Cas Enzyme sequence
MKTLGIDLGTNSLGWAVLGDAGFEDAGVLIFEEGVNREQSDSIETPAAARRVKRMARRLRFRRKMRRRQVLKILIENKMCPLTMEEFKAWHSKDEIFPKDNRAFIDWLKSTDSDNPYKDRADAASGKVADEVLGRAIFHMSQRRGFKSSRKDQLDDDADTAGEAKAKANKNASDDDDGDGGASGKKTKDKELGDIKNSIAELDKELTAKGVTLGQLLCEKLRASADLIDRERIRKRFTGRKQYEQEWDVIAKAQGLSAVLAKQIGDALFHQRPLREQSHLVGKCPLEPKRNRAQIGHPDYELFRALSFVNNIRVVEDEADKWGDNFKTPLDAAERKVAVDFFVRKTPFTFGDLRKKLEKEKQFQRLKGAKFNYDDGLSLSPSKTTAALVDIFGDGADESAIQKAFDALTFFDDNDKLVAWAQKHFGFEKDKAEKFAKTRVPEGRASYSLHAVRKINRFLEKGIELSQAVFLAKMPDVVPDFDAREAAIIGSVAEANELYRENKRVAYRDMAVENRTGILSLEKRLRSWFSSLADDEALDFESLYFRAPNADASYATPSKEDQRALERGILPRVNLGMIRNPIAQRSMTMLRRLVNELRKTGAIDAGTRIHIELARDVNDRNHRLAIQLWQKSNEKKRDEARTALRQHIAEPTDDQILKYILWKEQGEQCLYTGKTIGIKDLLGGSFDIEHTLPRSRSGDNSQTNLTLCDANYNRNIKKGRTPRECPNYDEIDVRLRPWRENVERLAKVFFAKQKAAKRAPADNPEAKSKARQGMLAARYELDYWKDKVRTFEMKSDDLTPSFMNRQLVDTGVMTRHAVALLKAVYRDVYPVNGAATAFARKEWGVQNQDEAKNRDSHVHHAADAMVIAALDRKRFTAICTALKASDETKVREAANVPPPFKNFAQMTHDQTAKILVKHVTRHNELKETRYKSLRLSSPKKTKSNGTIRFASAAGSTVRGQLHNETFYGKIRKPGESTEICVIRQELNSTNFKAEAALEKIIDKGIRDRVKMIIADRIDWGENFKEAMDKGGFTMESGVPIKKVRVEATASNPKNLRQHAATPSKHDYKTPYWVQSAGGSNFRLAVYLERGGLDGARKPIFVAENLLDHAQGKIEVPDNAEFCGYILPGAMAIAVENEEELRQPHFGDLVAKRLYTVRKFDKKIILMQFHKEARRSCDLEAALKTSGKASRGSSSIDFEKPHELLLLNPQKAWRSFRFEGIHFKMNFNGTIEWFDK

SEQ ID NO: 1855 - protein, 1383 aa, unidentified
  REGION 1..1383: note = Description of Unknown: Cas Enzyme sequence
MKKVLGLDLGTASIGWAIVHEAQQESEKSEILKLGVRVIQYDNFVNTVTGKESKEPEKDFISGKGISPNAGRTQKRSMRRNLQRYKLRKENLVEILKEKGFITDNTILSEEGNKTTFETYRLRANAATKEVSLEAFARILLMINKKRGYKSSRKAKSQDEGQLIDGMAIAMKMYEEQITPGQFVCQILKEGKKYVPDFYRSDLQAEFDNIWLFQKQFHAEILTDEFKKQIIGKGKVNTTKIFLAKYGIYTADNKGTDKRLQAYQWRVDALSKELTKEELAFVISDLNGTISNSSGYLGSISDRSKELYFNKQTVGQYLMAQLDENQHTSLTNQVFYRQDYLDEFNTLWETQAKFHKELTNELKEKIRDIVIFYQRRLKSQKGLVSFCEFESRQIEVEIEGKKKTKTVGSKVCPKSSPLFQEFKIWQILNNLQVIEKKTDAKRFLYQEEKDILFAELYILERLSKDAALKILYKNYKEFDLNFKDIDGNRTQAALFKAYQNIIELSGHGEYEFTKMKASEILEIVTTVFKGLGYNTDILVFDSSLDGKALEKQAMFQLWHLLYSFEGDDSNTGNEKLINKLMDLYGFEKEYAVILANVTFQPDYGSMSAKAIRKILPHLKEGNEFSVSCVHAGYRHSKSSLTKEELDNKVLKDKLDILPKNSLRNPVVEKILNQMINAVNTAIETYGKPDEIRIELARELKKSAKEREDQTNAINKSTLEHESYRALLKQEFGLSHISRNDIIRYKLYIELKDNGFKTLYSNTYIPQEKLFSKEFDIEHIIPQSRLFDDSFSNKTIETASCNREKGNETAIDYVLLKYGDVGLQEYQNRIESLFKNDFTKKTKLNKLKTKGIDIPENFINRDLRDTQYIAKKAKSMLEEIVRDVISTSGMITDRLRQDWQLIDVMQELNWDKYDKLGLTEIIENREGHKIKRITDWTKRNDHRHHAMDALTIAFTKRSHIQFLNNLNARSDKAGSIYGIEQKELYRDDNGKLKFKPPFALNEFRAEAKKHLENTLISIKAKNKVVTQNINITDKKGGVHKKIQLTPRGQLHLETIYGSIDQYVTKIEKVSAGFNEEQIATVAKKVYREALQARLNEFGNDPKKAFTGKNSLEKNPIWLDELHTYQVPERVKTVGIEKIYTIRKDISPDLKIEKVIDVKTRTILEARLSEFNGDSKKAFSNLDENPIWLNKEKGISIKRVTISGISNAEALHDKKDKEGKLILDKNGNKQPVNFVNTGNNHHVAIYKDEKGNLQENVIPFFEATARVSQGLPIIDKSFKQEEGWEFLFSMKQNEYFVFPNDLTGFNPNEVDLLNPDNYYLISPNLFRVQKFTIKDYFFRHHLETNVENNNSLKGITWLRHGLNGINNIVKVRLNHIGQIVSVGEY

SEQ ID NO: 1856 - protein, 1076 aa, unidentified
  REGION 1..1076: note = Description of Unknown: Cas Enzyme sequence
VHLFVNDVIFYQRPLRSQKSSIGNCSLEYRVFTAKDKEGKTIDKTEYLKAIPKSHPLYQEFRLWQWLYNLKIYTKEDDKDVTKQFIQSVEDYESLFDFLTERKEIKQEILIKYFVEKTGLKGRLLNNELVKYRWNYVEEKIYPCNETGTQIRTRLSKLQNVPDGFLTSDVEYRLWHLIYSVTDKVDFEKALKSFASKYGLDEVSFVENFKKVSPFKSEYGSFSEKAIKKLLPLMRLGKYWDWSEIDENTKNRIGKIITGEFDEEIKDRVREKAINLATEENFQGLPLWLAQYVVYDRHSEAVAAGKWNSVTDLEKYLDEFKQHSLRNPIVEQVITETLRVVRDIWEKYGQGAKDFFDEIHIELGREMKNTAEDRKRITSQVTENENTNLRVKALLTELLNDSNVENVRPFSTMQQEILKVYEEYAVGSNERYNPHTGNFEHDPISDEMLKISKTAQPTKPELQRYKLWLEQRYRSPYTGQMIPLNKLFTSEYEIEHIIPQSRYFDDSFSNKVICEAAINKLKDKQLGLEFIKNYHGAIVETGFGRSVRVFDEDAYQEFVKERYAKNRSKRNKLLMDEIPDKMIERQLNDTRYISKFISNVLSNIVRVDNNDDGINSKNVLPGNGKITSTLKQDWGLNDVWNDLILPRFERMNLLTNSAAFTAWNANHQKLLPTVPLEYSKGFSKKRIDHRHHALDALVIACATRDHINLLNNKHAKSPERYDLNRKLRRFEKVVYTHPQTSEQVVKEVPKDFIKPWANFTVEAKDALERIIVSFKQNLRVINKTTNKYEKFVEKNGKLVKELVPQTKGDSWAIRKPMHKDTVSGMVKLPRIKVPKGKNLTATRKAIDASFNSKAIASITDTGIQKILLNYLSYKGDNPELAFSPEGLEELNANIALFNDGKFHQPIYKARIFEIGSKFPLGQTGNKNKKFVEAAKGTNLFFAVYHDKNGKRSYETIPLNVIIERQKQGLPPVDLRDFRDFFLSPNDLVYVPTEDEQENVSTIDFSSLSRDQLSNIYKMVSSSGAQCFFVRQDIASSVVNKMEFSTLNKMEKSIYGVMIKEVCIKLKVDRLGNISKA

SEQ ID NO: 1857 - protein, 1562 aa, unidentified
  REGION 1..1562: note = Description of Unknown: Cas Enzyme sequence
MMKRILGLDLGTNSIGWALIQQDFENKQGEILGMGSRIIPMDQGTLGDFGKGIGVSQTADRTRFRSIRRLRERYLLRRQRLHRILNVLGFLPKHYAEQIDFENRLGQFLVGKEPKLAYQSVWNDNKEKMEFEFIFKESFEEMLEDFRLHQPQILVNRKGEHALIPYDWTIYFLRKKALKQKLTKEELSWIILNFNQKRGYYQLRGEEEESLKSVNEYVINLKVVQIEKGEVDRKNDKRHWYNVTLENGWIYTATFTAEPQWLGIEKEFLITEELDEEGNIKIVKDRRTDTDGKEKRKITPLPSFEEIDLMTKTEQDKIYKKIKAKTEITISNSGKTVGSYIYDTLLQNPKQKIKGKLVRTIERKFYKEELIAILKKQMELQPELFSDDLYTDCIRELYRTNEDYRISLSKRDFVHLFVDDLIFYQRPLRSQKSSISNCPLEFRAYKIKKKDERGNLVKDENENDIYELDENGKPKIKKEYLKAIPKSNPLYQEFRIWQWLYNLKIFRKEDDVDVTNEFVRSIDDYERLFAFLMGQKEVNHRDILNHFIVPVLQEKFPGAKTTALKKEIEKEIAKYRWNYVFDDTKEKEDEKSKKYPMNETAYLIRKRLEKVEGIAENSLSTEIEYKLWHIIYSVTDKVEYEKALKGFAQKNNLDETSFIGSFKSFPPFKSDYGSFSEKAIKKLLPLMRNGKYWKWEDIDTKTQNRISKLLTGEFDETIKNRVREKAEKLQLQTEMDFRGLPLWLAQYVVYDRHSEAEITGKWDSVNDLEEYIEDFKQHSLRNPIVEQVVTETLRVVRDIWKKYGNGEKDFLNEIHIELGRDLKNNTERRRQFANLVSDNEAANLRIKELLIELKENSDGKLYVEDVRPYSPKQQEALKIFEDGALSTDNVPEDVLKISKTAQPSKSELQRYKLWLQQNYRSPYTGNPIPLSKLFTHEYEVEHVIPQARFFDDGFSNKIICESAINKLKDKQLGLQFIKSHAGEIVQDGSKQFKIFTETEYRDFVKNNYAKNSSKRKKLLMEEIPDKMIERQLNDTRYISKFVVNVLSNIVRADDGKDEEYNSKNVLPGNGKITSALRQDWGLNDVWNELILSRFERMNLLTNSTVFTVWNDNYQKYLPTVPLEYAKGFSKKRIDHRHHALDALVIACATREHIQYLNNENAKSQKRHLQIGLAKKLRKMETIEVKRWKQDVNGVWKKSDETIRKEVPKDYIKPWETFTIDAKNALEKIVPSFKQNLRVINKTVNKYEKYVEKNGKLVKERVPQIKGDSWAIRKPMHEETVSGHVDLKWIKLGKGEIAAATRKSIDKSFGLEKIQKITDTGIQKILENYLKYRDNNPELAFSPEGLEELNRNITQFNKGKYHQPIFKVRLYEKGKGRFTLGQNGNKNQKFVQGAPNLFFAVYENKETKKRMFDIAPLNEVIEHQKLQESLGIPKAQRTSIPLKNILEERGKEVEVNFLFSLSPNDLVYMPKIDEIVNEIDFTHLTNERLRRIFMVNDFSATCYFSPNSLAKNIAPKEVDLNFDQKKNKLTGSFDTKTASFEGRQIKDYCIKLKIDRLGNISKA

SEQ ID NO: 1858 - protein, 1571 aa, unidentified
  REGION 1..1571: note = Description of Unknown: Cas Enzyme sequence
MKKILGLDLGTNSIGWTLLNATENGKTLKPESIDAIGSRIIPMDATVLSDFDRGNSKSQTAERTRFRSIRRLNERNLLRRERLHRVLHILKFLPEHYDDQLGWDKSINKTYGKFIESKEPKLAWKEVSTNKYEFIFKDSFNEMLEDFKDHQPELVANGKKVPYDWTIYYLRKKALKNAISKEELAWIILNFNQKRGYYQLRVEEEEDNPNKLVEYYALKVVNVEKTDDKKGKDYWYNIRLENGWIYRRPSNTFLDWEGKTKEFIVKTDLDDEGNPKLDKEGDIKRSFRAPKEDDWTLLKKKTEADIDQSNKTVGTFIYDALLNKPNQKIRGKLIRTIERKFYRSELKAILEKQKEYHPELTDNELFRQCIEELYPNNISHRRGIEDKSFTNLFVDDIIFYQRPLKSKKSLIANCPFESYSYLDKETGEKKSDPIKCIPKSHPLYQEFRLWQFVLNLRIYQKERLVEQDIEEYVSNGALQARAKEKLETDVDVTSEFLKDEQDYVALFEWLNDRKEIDQKAFLRYPAFGLKKNASDYRWNYVEDKSYPCNETRSLILNRWQKSGIALENLTADIEESLWHILYSVNDKHELEKALNSFASKNGLNDDFTENFKKFPPFKSDYGAYSSKALKKLVPLMRIGDKWTEEAIDQNTRARIEKLISGEFDEKIRNRVREKSIKLTEINHFKGLPLWLASYIVYDRHSEAKDITKWHEPADIDKYLNTFRQHSLRNPIVEKVILETLRTVRDIWHKSGQIDEIHVELGREMKNPADKRARMTKQITENENTNLRIKALLTELINPEFNVENVRPYSPSQQDILKIYEEYALNSNERYDVSLEQFVPDPELPDFVDEIIQKFKENDVKKRPNRSEVLRYKLWLEQRYRSPYTGEMIPLGKLFTSAYEIEHIIPQSRYFDDSFSNKVICEAEINKLKDNELGYEFIKNNAGRKVEISFGKTVEVFSIEAYEKYIRDNYSRLRGKMKKLLMEEIPDKFIERQLNDSRYISNEVKKLLSNIVRTKDGNGEYEQETVSKNLISVTGSITDRLKKDWGLNDVWNSIIIPRFERLNEVTGTTDFTTTNQNGHPIPTMPLELQKGFNKKRIDHRHHAMDALVIACATRDHVNLLNNEAAMAKSNVNRYQLSRKLRRYEKTIVVRNGEQKEIEVAKDFIKPWQSFSYDAHAALSKIIVSFKQNLRVINKTTNKYESYHDSNGKLKTGKNGLPVKQLVAQSKGDSWGIRKPMHAPLPYGARNYSFTVLEITSNLGKRNFIENDEIRDKVEKVVAEHGTIGKAQSFLKKNPLKDSNGNHIKFTVYNVPEIRYRKRQPIFKLANRGQGGVKTTEQAINLINKVSDKVIRQALLLHLEENGFELDKAFSMEGIERFNSKRNKPVYKLPIAEASSQKFPIGYQRNKNRKFGEAESNTNLYFAIYWNEDKLKREFETIPLNIAIEHQKQVAHLPKTERTPVPVNKEKGRFLFALSPNDLVYVPSLEELENPSLFNKDRLTADQVNRIYKMVSSSGNQCFFIQDHVASAILNKVEFSALNKMEKTIDSIMVKEICWKLNIDRLGNIVSIIKGHR

SEQ ID NO: 1859 - protein, 1546 aa, unidentified
  REGION 1..1546: note = Description of Unknown: Cas Enzyme sequence
MENNFKIILGIDAGTNSIGWSLVRRDFERKHGTILGMGVRIIPMSQDILNKFGEGNSVSQTAERTRKRSIRRLRERHLLRRERLHRVLNILKFLPAHYSEEIDFTSRPGQFRHETEPKVAYKKVWHETKNKYEHEFIFKDSFTEMLNDFRQSHPDLLEDKNGNPKQVPYDWTIYYLRKKALTQKIQKEELAWILLNFNQKRGYYQVRGEDEEETPNKLVEYHSLKVVNVTADPPQKGSLDTWYSLELENGWVYRCPSKTPQFDWKGKVRDFIVTTELNEDGTIKKDKEGKERRSFRAPGDDDWTLIKKKTEQEISRSQKTVGEFIYDTLLATPDQKIRGKLIRTVERRFYKDELRLILQKQTEFHPELKDEKLFVACINELYRNNENHSRQLKAKNFLYLFIEDIIFYQRPLRSQKSTINNCSLEFRYYLDDSGSQRTKYLKAIPKSNPYYQEFRIWQWMSNLAIYRRDDDLNVTNEFLSNTEDRERLFEFLNNRKGIKQKTLIKFLLDKKGLKGKELNSEVEKYRWNYVEDKEYPCNEIRSEIINRLAKVKGIPADFVTREIEQKLWHIIYSVTDKTDFEKALKKFAIKNNLDVLSFVEAFKRCPPFESEYGSYSEKAIKKLLALMRLGKYWSYKNIDDKTKGRIEKIINGEFDENIKDRVREKTLHLTDTTSFQGLPIWLAQYVVYDRHSEASTAQKWNSVEDLEEYLRNFKQHSLRNPIVEQVVTEILRVVRDIWLKYGNGAKGFFDEIHIELGREMKNPAEERDRITRQITENENTNFRIKALLAEMFNDGDVENVRPHSPMQQEILKVYEETVLNSGIEIEADILRISKSRQPSSSDLKKYRLWLEQKYRSPYTGEIIPLSKLFTPEYEIEHIIPQSRYFDDSLSNKVICESAVNKLKDNYVGLEFIKNYHGQIVECGKGKKVKIFEVKDYEEFVRKHYAKNRVKRAKLLMDDIPEEMIERQLNDTRYISKFVCSLLSSIVRADENDDGVNSKNLVPCNGKVTNELRQDWGLNDVWNDLILPRFEKLNQLTGTNLYTAWSENHQKFIPTVPLENSKGFSKKRIDHRHHALDALVIACATRDHINLLNNQFAKSSIRHDLNRKLRRFEKKAYVHPQTGDQVEREVPTEFLKPWNNFTADAKNAIERVIVSFKQNLRIINKATNLYQKWVEKEGRKYKQLHPQSGINWAIRKPMHKATIYGLVSLRKTKKVSFAAALDNIDNIVDKSLKREILSLLQKGFDKKKIKKHFNEQGLNRNGNGDSRVDIYYWDENCVATRNSIIEKFNTENFDESDLDKITDTGIRKILKRHLRNYMGRVDENGNAIPPQLLAFSPEGVEDMNNNIKTLNDGKPHQPIFRVRTFEAKGNKFAIGQTGNKIHKYAEAEKGTNLFYAIYEDASGNRNFETIPLNVVIERQKQGLSSVPDYNGKGDKLKFSLSPYDLVYVPTKEERQNIGNIDFSNLAPAQIKRIFVVNDFSETCYFTPNSFAKAIARKEVDLRYDPTQKKLVGSFDDKTASLDGEQIKEICLKINVDRLGNIIPSGRL

SEQ ID NO: 1860 - protein, 1428 aa, unidentified
  REGION 1..1428: note = Description of Unknown: Cas Enzyme sequence
MKKILGLDLGTASIGSAYVLEAEKSADQTKIVYLGTRIILSSADAENFSKGLSCSPTTDRTFKRSMRRRLQRYKQRRSSLIQQFKKIGIITNTEQIIREPISETHELLRIRSKAVSERVSLEEFARILLTINKRRGYKSNRKTSKSTEEDGKLVDAMAVTKELIKLKKTPGQYMFERFKRGKYAEIDFYPFDLINELKQIWEVQGQKYPDVLTEGLLSSLLKQKTGKAKELIYSKSDLNPAEVPIDYQKGKKLRKTILNKYFAYESRSLAVTNIIPVEQAITAIVAICKQINNSSGYLGAIGDRSRVLYANNQTIGQYLYERIKANPHDRIRGEVFYRQDYLDEFDRIWECQQNYYPAILTNDRKQYIRNRIIFYQRPLKSKKSELAFCEFESREVEHNGKKYTEGLHVAPKSSPVFQHFRLWQRLGQIEVSPLRKWDKQSNELFEQQNNADREGILNTEAKQKLFSYLNLLDHLTDNEILNILGYSPDKWKINFREIIGNRTNNLMMKAFFSMKEMTDGEQIDWEKNLTKITNGQSLISPEQIVDLIRQFFEREGITTSLLYFDPATDNFREQSHYSLWHLLYSYEDDNSPTGTTSLCKTLAKRYGIPHELCPLLASLTFERQYGSLSTKAMRKLLPFMQEKRYDEACKLAGYRHSAWITKEENAKRTLKNKLPLLRKGSLRNPVVEKILNQMTHVINTHIAEYGNPDEIRIEMARDMQANSKQRKAMTAAITEATKRNTQFIEEIQKEFGFNPSKNDLIKYKLWKELAPLGNKTLYSNIYIPKEELFTAKFEIEHIIPRALFYDDSFSNKTLELNSVNKLKGNKTALDYLDTLGQEKANDYILRVEELKKIGAITQAKYKKLLIREKDLGDDFTNRDLTNTRYIIRHAADMLLQVTPSIVHTNGSITAILRRDWGLLDILKELNLPTYESIDRKISDPEEKLTQSVDRKDGQAIKMIKDWSKRDDHRHHAMDALITALTTRKHVQYLNGNSGAEETDKAQKLEQLKALRKQLIGSDGHFIPPMHDIRVQAKEALSRVIISTKVKGKVTTPNTNIICSRDKTTGRKIYVRQTTLTPRGALHLDTKYGINRYYQEREVSIGSKLTQEEIRLVSSPHIQSILLERLRAFDNNPKSAFTGRNSVDKKPLEDKNKKLVYTDKKVKQTILANRFVKRDQVNSKLNLDKVIDTGIKRILEGRLQQYGGKYETAFSDLENNPIWLNEEKGIAIKSVRIRGKNNAIPIHQTDTCPIDYVANDNNHHLAVYVLPDGTIEDDIVTFFDAVERSRQGLPIVDKNKNQSLGWKFLFSIKQNEYFLLPQQAEKIDIDTGEISTQTTFSPKDLSSEYIMNPDNYAELASHIFRVQSISKTPQGNRDVRIYLFKQQYISGSQKDSLHLKGITYRQISSAKDLAELVKIRVNHLGRIVSVGEK

SEQ ID NO: 1861 - protein, 1390 aa, unidentified
  REGION 1..1390: note = Description of Unknown: Cas Enzyme sequence
MKKILGLDLGTTSLGWALVNESESGNSSIEKVGVRIIPISTDEENDFQKGKSTTLNANRTSKRGARRNLHRYKLRREALLKLLLKNKIIKEGTKLTNESGKEQDPFKLWELRAKAATERIELEELARVLFAINKKRGYKSNRKAKDEGDGEAIDGMELAKKLYEDDLTAGELMLQRLEADKKGSPDFYRSDLQNEFDRIWKKQQSFYSEFLNDNFKQKLFEKNKGATYKICEEQFKLEGIKRTLKGKALQVENYTWRVKGLSERLDLEQLTVVFQEINGQIANSSGYLGKISDRSKELYFKKLTVGQYLYPKICDNLHYRLKGQVFYRQDYLDEFEKIWETQSKHHQVLTSDLKVHIRDIIIFYQRCLKSQKGLISVCELEGKEVVITKEGKTKRKIIGPKVCPKSSPLFQEFKIWQKLNDLEFKNIISKEKRIPELDLKNELFQELNIREKLSAAKVLEYSGLNARDGWEINFKNGLDGNQTNAALYSKFKQIVEFSGHEINWNKLSAAQITATLEDIFSALGINTQILQINTDLEGHEFIQQAAYQFWHLLYSYEGDESKTGDEKLVEKLQQRFGIEKEYAKILSKVVFKDDYGSLSTKAILKIIPHLKAGHDYYESAALVGYNHSKSLTKEENDNRILDSKLELLPKNSLRNPVVEKILNQLVNVVNAIIEQHGKPDEIRIEMARDLKKSAKERAEMTQSINRANQLHDEIRKKLTSIYPFNTGVRITRNDIIKYKLWEELESNGHKTLYTNTYIPLEKLFSREFDVEHIIPKARLFDDSFSNKTISTREFNERKGNKTGIDAVAEYLGEDRKEDYLARIEKLFKDGKINKAKYIKLKMTESEIPDGFIDRDMRNSQYIAKKALELLFRVCKDVNPTSGGVTARLRQDWQLVDVLKELNWGKYEKLGLVEYEKTKDGNQVKKIKDWTKRNDHRHHIMDAITVAFTRPSHIQYFNYLSARHDENHKEHYKIKGIEDKETELDKNGKRIVTPPMPLKEFRAEAKKYLESTLVSFKAKNKVVTRNKNNTKRKSKKHDQPLLTPRGQLHKETIYGKKNRYVTNEEKVGGNFDVEKIQKVAHNRYKEALLLRLEEFEGNPKKAFTGKNALSKNPIWINTAQTDQVPERVKLVELEEFYTIRKEISPDLKIEKVVDKGVQTILQQRLNENDGNKKKAFSNLDENPIWLSKEKGISIKRVTITGVSNAEPLHFKKDHLGNEIRDENGIPIPVDFVSSGNNHHVAIYMDEKGKLQDQIVSFFEAVIRAKMGEHLIDKSYNAYLGWQFLYTLKQNEMFVFPNPETGFNPNEVDLENASNYSKISPNLFRVQKLSRVSYGNSVVREYVFRHHLETTVQELNELKNISYKNIKSLQHIKDIVKVRINHLGQIVKIGEY

SEQ ID NO: 1862 - protein, 1470 aa, unidentified
  REGION 1..1470: note = Description of Unknown: Cas Enzyme sequence
MGNKVNLGLDIGTNSIGWSIVNCDFEKNLGKIVGAGVRIIPMSQDVMGKFDSGVSISQTAERTGYRSVRRLTQRNLLRRERLHRILNILGFLPKHYADSIDFENKYGQFKDGIEVKLNYKKDEEGKHQFIFQDSFKEMLEEFQAKSSEIKIPYDWTIYYLRKKALKNKITKEELAWIILNFNQKRGYYQLRGEEEIKEEGKEVKFEVLKVTKVEDSGDIMKGKGDSLYDIYFEDGRKYTKQTTKPEDWLNKKKEFVVTSSTLKSGELKYSYKAVDSQTDWLAIKTKTQQDIDNANKTVGEYIYNTLLSNPKQKIRGKLVKTIERKYYKDEFSKIIKKQSEFHEELRNVDVYKDCIENLYPRNESHRNNIKDKDFLYLLRDDIIFYQRPLKSKKSTISDCNYEFRTFLKKVDNEGKDELIEAKHYLKGASKSNPYFQEFRLWQFLRNLKFYEKEDEKGNVIDIDITDQLLKDESDWCNLFEFLNTKVDVEQKNVIDYFIKNKQIEKSAKGNYRWNYVEDRKYPGNETKAQFLNRLKKVKGINADEFLTPEKEYKLWHIVYSVKDIEEFKSAIKNFAEREKLDETFIENFISFPPYKTDYAAFSEKALKKLLPLMRIGKYFDEEGIAQETWDRFQQIIERVNKIDATKEQAEIQEQIRNLADDDIPKQLIKSFLNTKNGNELKGLNTYQACYMVYNRHSEVGEVINWKSPEQIDQYLEEFRQHSLKNPIVEQVVTETLRTVRDLWKFYGKGSEYFFNEIHVELGREMKNDQKKRKRISDQNTKNENTNTRIRKILEELKNDGLENIKPYSPSQQEALKLFEDGVFQNPEASYKDLAEEEVDKIRRNANPKTSEIIKYKLWLEQGYVSPYTGKMIPLNKLFTTEYQIEHIIPQSRYFDNSMSNKIICESEINELKDNRTAYQFILEERGRKVELVGNKTTDLFSVKQFEEHVNRYFKKNRSKLNNLLSEDIPEGFINRQLNDSRYISKLIMSLLSNVVREEGETDSTSKNLVPVTGVITNKLKQDWGLNDKWNELIAPRFQRLNEMTKSNDYGYFDKKINAFRVQVPDEIARGFSKKRIDHRHHTLDAIVIACCTKKHTNYLASLNSQRENHGLRKSLLVKNKEGHLTKHFKLPWDGFSNEVKINLEKTIVSFKQNLRVINKANNKTWQWVDEKGKLVKKLVKQTKGNNWAIRKPMHKETVSGIYDIKTPKGKIATSTRVSLSNITTDKIFDKITDESIKSIFKKHLEHYRNEKGVLNYDDAFDDVGIEKLNDNVIEYNNGKFHQPILKVKIFEVGSKFQIGLTGNNPSKYVEAAKGTNLFFSIYEDLDKKGNKKRVYVTVPFNEVIEHQKQLAHLPINEKTEVPIDNTKGDFLFSLSPNDLVYVPTDEELENPSSIDFNRLNNEQYNRIYKMVSSSTIQCFFIPMSVAISIHNKKEFSALNKQERDINGLMIKERCWKLKIDRLGKIQKLVT

SEQ ID NO: 1863 - protein, 1376 aa, unidentified
  REGION 1..1376: note = Description of Unknown: Cas Enzyme sequence
MMDKIFGIDLGTNSIGWAIRELNQSLDNQITKQGVLLFDKGVASEKGNEFPKVQKRTESRGKRRNYQAEKYRKYALLEFLINKGFCPLSMEELEEWKKYRKGERRRYPQSEKFINWLRFDFNGDGKPDFYLIEKSKHESYYGFRAFAANEKYKQVFKENPYLLGRVLYQLVQRRGFKGRDAEEAETMLKGSTKTGTKGRNEIADYLDKYETLGAALYFFQQKNGGRIRQRYNLRKDYENELKEICRIHNISDQDYKMLWKAIIWQRPLRTQKGLIGLCTYEKNKRRVVVSHPIYQEYKTWVFINNLKIEAPEGIKYEQYLKDKVYPCFIRKSDFKVEDIINKVEKSGGKVNSSFAKGRKNRETKVVALSNFYDFKEIFGESWKEKLDFNNIFNRDFQQEKKINSTYTIEDLWHVLQTFDSKEKLIEFGAIKLNLNEEEAKRFSEIKLSNGYATLSLSAVKRILPYLQRGIKYSTAVYLANLPKVFGTNTISDEIVENFIGELDIVYKEVEEKRKLNSIVNSLIKSHLEEDHRYFIENDRALDNSEESLIKEKIVLELGERTWLKFSDSERTKMFDYVAKKFRDFLRKQINDKKDIFLKLPRLHQEIFNSLQEKYDLSDDRIKYLWHPSEQEKYPNAILKHQVEMNGITFFIEDSKLNQFLEKNHVAEKQLISMKLLGSPEPISKGFKNPMALKTLHKLKQLLNYLLQTNQIDEQTKMVVEIARELNDNNMRAAIRIFQRQREDENTEYSQIILEINKECNTSFDVDDKILLTKIRLWKEQNERCFYTGQKINLCDVFDGNKFDLEHTIPASMSFDSELKNLTLSDTDFNRNIKKKQIPFQLANYEEVKANVAFMKDKYEELERQIKDNVRAVKGISDKESKDRLIQKRHILKFRKDYWKNKYNSFEIEEFKLGWRNSQLRDTQIVTKYAVPYLKTVFKNVSVEKGQVVDDFKRIYKVMLDEKKDRSKHSHHAIDAAILTLIPNSYYREQLLEKYNKEKENKKKFHALPLAWENFKPKYIIDIEEKVLANNLIDDRTLTPTFKKVRKRGKIQRKENGDLLWSKGDTIRGQLHTETFYGAIKQPLRDENNKILFDENKNMLLDDEIKMVLRKPLIYKKDSNSPGFKTLEEIEKVIVDKTLFEQIKLQVGDQKLRDALEKGVWLLDKKGNRINQIRRIRCYAIAGRGTLKYETALSIKKHDFSSNKEYKKNILSMNKDNVYCLFYEGKVKGQLKREFKIVSPYDLSILNCNSISELKNENYFSTCELKDGSTISLKGVIKKGTKVIPYDKTINELTDLDTVMLNERVYKVYKFNLMGTPNIYLQNHIEARQDKDIEKALTQIDIIINPMRYKLKADKFNFAIEGVDFEVKLDGRVDFNF

SEQ ID NO: 1864 - protein, 1058 aa, unidentified
  REGION 1..1058: note = Description of Unknown: Cas Enzyme sequence
MSDVVSTVGRNLVLGLDLGVRSVGWALLEYEGDDPIGIRASGVRIFEAGVEGDIEQGKEESRAVARRMARLQRRQFFRRAQRDRRVISALQQHGLMPSGPVRNSVFRHETILALDKAIYEKFAMEVPESDRHRLANTLPYWLRARAATQSLELFEIGRAFYHLAQRRGFLSNRRGAGKNEEKSTVYQGIGELRNAMESTGSKTLGTFFAKLNPTSIDSKRIRSRWTHRDMYAREFELIWIEQAKHRPELFNKAFKKQLRRAIFDQRPLRSAKHLVGECPFETEATCPKGAQKRAPLHLDIAQQVRTWQTLNHLRIVFPDHEEVQLTLEERQMLFAILDREGDMTFAAAKKLLKDSRGSKFKFTLEEGGETRIPGNRVNGRLREVFGDRLDTFTAEERAQVLQDIRCFEKAEALERRGRKRWGLDPETAKKFSQIEFEDGYAALSRMAMEKILPHLEAGFSYREACDLAYPKSEEGQSGKHVTIMGLPPITQAPLGALRNPAVTRVLCQLRKVINALIRTYGKPDIVRIELARDLALPRDKRQKLSKSNRERQGQRTEAKEEIGEKSGDMNPRRGDVERVLLAKECNWTCPYTGKHFGMAELMGAQYDIEHIIPYSLCLDNSFANKTLCYHEVNRTEKGNKTPWQAFGADKARYEAMIDRVRCFSGHHARRKLERFLMDDEGLEEFLGKFTASQLNDTRYASKLASKYCALLYPGTEQHKHVKASKGGITAELRRAWQMNKILGGGEKSRDDHRHHAVDAIAVALTTPRIIKRISDAARKSELAHERFWKHLPMPWEGFLDDCIKSIEQITVSHAVMGRVRGPLHKGTHYSPPKADPEGKGDFVHVRKPIAALSKSEVEAIVDDTIREIIKKALGNGDPGKVFKPVEDHPFLMTKDGQKVPIHRVRIKKREPVFKVGENERARYVTSGANHHIEIFACKDKKGNEYWDAEVVSLFEAIRRKGKGEPIVRREREGFLFSLLNGDSIRMQGSDGDSKLFVVRGFSAFSSGQIVIDFLTQCDARPISKVPRQGRTRGPDTLRKSAGKKVKIDPLGNVLPAND

SEQ ID NO: 1865 - protein, 1081 aa, unidentified
  REGION 1..1081: note = Description of Unknown: Cas Enzyme sequence
MAVKSEELKGAPYILGLDLGAASLGWAIVGLADGKPARHIDGGVRIFPEAVKNLEQGRDEPKGAQRRSARQMRRQTDRRRRRVASAFRVLQKAGLLPPFPEGADPADSLARHDLINRLDRDLASAVPGLIDPALEHRSRSVFHYRLRALAIHQDLPPYAVGRAFLHIAQHRGFKSGRIEEASESGKGDERESKAKKERSEVKIRIESLPAEFERLGACTIGEYWSKLDPNQKRIRGLGNWSARQMHLDEFDLIWQRQAPRHPEIMTPALYRIVRRRIFYQRPLKSAAGLIGQCELEPQRRRAPLAHLLYQRFRILQTVNDLRIASSARLSRPLTPEQRAKALDVFSSRQTVTFGPLGKKLGLLPGESFSHEEGDRKDAPGNRTDCKLREVFGERWDALAEQDKNVIAGCVRSMDDSAALCRLAETRWELDHLQAARLSTVQLEQGYGRLSLAALRKLLPLMEQGLPYITAVEKVYPDRALAPMVELLPQVLDLKNVRNPAVVRALTELRKVVNGVIRLYGRPERIQIELARELKKPKDVRKSIASENRERDSLRKSAIEKIFKECGLGRPSEVDIQKAILWEECRHECPYTGASINFHDLFGSDARWEIEHIVPYSRSLDDSLTNKTLCSRETNRRKGNRTPFQAFGNTPEWEAMVERATKFQGDRRAMARKLARFTIEGGVDEILDEFTQRQLNDTKYASRLAMEYLGLLYGGVCDENGVRRVAAVSGGVTAQIRKGWRMHSILRDGPSQGEAKPRDDHRHHAIDALVVALTDAGAVQAISRASERSRLDHRHGFRVDDPWTGFLDEVRAVLGAIRVSHRPDHHLRGALHAESLYSPPRTEGGAEPRHRIRKWVSSLTPGQAGEIVDSAVRKAVEAKLKELGQADPRDAFKNNANLPALGNRHGDPVPIRRVRVFVSGSPQRIGAGASIRYVMSKDNHHLAVYRLPPGKKGTERWTGEAVNLLEAVARKQGGRPVIAPANELGAPLVMALYKGDMLEMTVPKSEPVERELFVVRGFSVERTGRPEINIVRHNRAAEIADLKGAGEWKRIRNWDEFRLLEPRIVRLDALGRVMPDGGQPNS

SEQ ID NO: 1866 - protein, 1072 aa, unidentified
  REGION 1..1072: note = Description of Unknown: Cas Enzyme sequence
MSTSPTAQRILGLDIGVASVGWCLLEMDGDSPSRILGTGSRIFSPGVIGDFKNGRDEPKNQKRREARQMRRQLWRKRRRLVKLHRALIRSKLLPDPGAFDPESIDLSLKQLDRQLAAQDPLMSDRRGAQVFHYRLRARCVTGKVEPYELGRALYHLAQHRGYLSNRKTKKKEGEAEDDGAVAKGIGELSAKITASGLPTLGAYFASIDPEIERIRSRWLGRNEFIVPEFNAIVAEQVKHHRHLTDEQWEVIRDAIFRQRPLRDQSHLIGKCSIEPTERRCPVAYLPAQRFRILTSVNHLRILTMDGEVSRASRPLTPVERTLLLEALETESSLGWAKARKLLNLKAKEAKFSIEIDGEKGLIGSRTAAMMRVAIGARWDTMLANEQQSMIDDVLQYESQDALAKRGILHWKLSKEDAKSLAETNLEPARLNLSLRAIQNLLPHLELGLSVMEAKIAAYPSQSGAGEPWDLLPPIRPDRVWQGHCSGGRSYQGIEIRNPAVERSLSEVRKVVNAIIRGWGKPDQVRIELARDLKKPRQERKEETTRMREQQGRRDQALSKMVQEGFANISERNSRSDVEKVLLWEECGGVCPYTGKSISFEDLFGASPRFEVEHIIPYSLCLEDGFGNKTLCEVNENRNIKRRSSPFDAYHSTSKWEQIITRVKQFKSRSASKKLKLFQSDKNGTEIFGDFVDRQLNDTRYASVLAANYVGLLYGGQIDVTRKSRVCVSAGGATAIVRRKLGIEGVLGGGEKNRKDHRHHAVDAIAIALTGPREVRAIALASESAILRGEASHRLKIEAPWEGFADDVKRSIDGVVVSHRVDRRLSGPMHQETNYSRPICDAKGVVKDALLRHSRCRLDSLKSGDVEDIVDPRVREAVRRQLMALGQTDPKIAFKGGQNLPTMRHGDGREVEIRKARIKLRKTVNAVGRGSATRYVAPGSNHHMAVVDVLGPNGKMLSRELEVVTLLEAFRRKQRGEPIVQQDWGVGRRLAFTLRSGDMVEMDLGGTLAACVVSSISNGLVEMKIHKDARPATEIKKAGVAGGRLKFATRAFLQGLQRKIEVQFLGAVSLAND

SEQ ID NO: 1867 - protein, 976 aa, unidentified
  REGION 1..976: note = Description of Unknown: Cas Enzyme sequence
MHDLFLALVAGGLLPIEGDPRRPLSLRIFHTLKSLDASLLASGGDPIRLPYALRAKALVEPLEPFALGRALYHLAQRRGFKSNRKAARKEGEEETGKVRGGIESLRQRMTSEAAPTLGSLFSRHNPEDHSASPNHRIRGRYTSRDMIETEFEAIWAEQSKHHSKLLTPSLKVKVHKCVFFQRPLKSAEDLVGWCSLEQGRWVKIRKTHRRDGRPLEKPSWVPVYKAPRRMPMAHPQAQRFRLLQKVNDLKILWNDGTTTELDAAQRKWLIGELERGSVSFAAMKTQWGIGRRGKLNLAEGPAKSLPGDLTFARIEKAVPGLWGRLDSVRRESLVHALRHAEDPTLFATALQRDWQLSPKEAVALADTSLEDGYLSISRKAVEKLLPWLEQGIPYSSVVKQVYGDESAPRPVDKLPRVVEAFPALRNPMVSRTLTELRKVVHAVIREWGKPVAIRIELARDLKKSRDARSAISKKIADRTRDRDKAREAIRPLKAEPKARDIEKYLLWQECGGPMALCPYTGKPITLHELFQESSPWDVEHIIPFSKSLDDSFANKTLCWAEHNRNVKRNRAPMEAYTPEILADILGRIENWREGPGKAVKLQRFRQTELDGDFISSQLNDTAHASRLACQYLSLLYGGLWDEEGRRIYASKGQVTSMLRGLWHLNPLLGGGEKNREDHRHHALDALVIAVTSPAALKALSDASKTGWESHRSRFARFALPWVDFEKDAAAALDAITISRRVRRKLQGRIHKETSYGVDGESLVQRVRVEELSTKDVARIIDPEVRRRVESRLEDLGVTDPKKAFKEPKDHPYLLSKDGRRIPIHRVRIKVSGTVMPVGQDHRLRHVESDANHHMTIHEAKDAKGRTIWKADVVSQFEALRRHAAGEPVIKREEGFVMSLRSGDTVQYMEDGQLKAAWVRTVTIEPRIGLVSHRDARLKQEQEKDGDYLRVVISKAKELRIQKTQVDPLGRTRISHD

SEQ ID NO: 1868 - protein, 1077 aa, unidentified
  REGION 1..1077: note = Description of Unknown: Cas Enzyme sequence
MSTSKVVERVLGLDVGVASVGWCLLETQGGQAHRIVGMGSRIFPAGVEGNLDAFKLGRDEPRNQKRRMARQMRRQLWRRRRRLLKLQRFLVSLGLLPKLDAYDPDAIDRGFKALDKQLMAADPLMADRRGAQVFHYRLRARAAAGAVSAFELGRALYHLAQHRGFLSNRKAARKEGEEDGEVKEGIENLKQAIAASGLPTLGAYFASLDPEVDRIRGRWLGRNELIVPEFEAIRQEQSKHHPTLSDGVWEEVHKAIFRQRPLRDQSHLIGRCSLEEGERRCPAAYPEAQRFRILQQVNHLRLVKLDEEGREVSERPLSDVERQKLIGVLASDGDLTMPQAKKALGYKSKEVKFSIERGGEKRLIGDRTHSRFTVEVGVEPIWSALSPDDRRRLIDDLLEYESQDALAKRLQRRWGFERDAARSAAEFAIEQARLRFSLKAIRRMLPFLEVGQSVQEAKIAAYPEHAGADNPWDLLPPLKPDRVWREHCSGGRKYDGIEVKNPAVERSLSEVRKIVNAVIRRWGRPDEIRIELARDLKKPRKEREAESGRMREQEAWRNAALQKMVAEGFELVAERRSRSDIEKVLLWEECGGVCPYTGKAISFEDLFGQSPRFEVEHIIPYSLSLEDGFGNKTLCEVNENRNRKKRMSPYDAYHGTPEWDAIIARVRHFKGRSAMKKAKLFQSAKNGQEIFGDFTERQLNDTRYASRLSSDYLALLFGGKSDIDRRQRIFVSAGGATAVMRRKLGLERVLGGSEKNRKDHRHHAIDALTIALTGPKEVRQIAHASELAMLRGEAAHRLKIDAPWESFAADVQRVVDAMVVSHRVDRRLSGPMHQETNYSKPIKDARGAVASGDRRHLRCSLERLSAKDVASIVDPVVRRAVEARLTALGATDPKLAFKGGQNLPTMRHGDGRDVPIRKARIRLGKTLDVVGNGGRSRHVAAGSNHHAAVLARLGADGRPAEFSIEIVSMLEAYRRRARKEPIVRRAYPDGWVRQYTLRSGDSVMFDEDDGERESAVVLSVSARQIQLIRTADARPTTEIEKAGKAGGRLALTPKQYFERNCQKVMLQPLGDVNSAND

SEQ ID NO: 1869 - protein, 1074 aa, unidentified
  REGION 1..1074: note = Description of Unknown: Cas Enzyme sequence
MASSLAAERVLGLDIGVASVGWSLLETVDGKPTRILGMGSRIFSPGVDGNLDAFSKGKDEPKAAARRAARLMRRQLWRRRRRLLKLQRVLVRFGLLPALEAYDPESIDRGFKSLDRELMSRDPLMKDHRGAQVFHYRLRARAADGRVEAYELGRALYHLAQHRGFLSNRKSAKKDGEEDGQVKSSISELKARMDASGAKTLGSFLATIDPEVERIRAKWLGRNEMIVPEFEAIRSEQAKHHTQIDKDAWESIRKAIFTQRPLKDQSFLIGKCSLEPTELRCPVAYPEAQEFRILQAVNHLRLTEIVGGVKQTERALDAEERAKLVAELMSSGDLTWPQAKKLLGFKSKEAEFSIERGGEKRLIGNRTQANLLVEAGVEPVWNRLSAAERVRLVDDLLEYEQEEKLSRRLVKRWGFAPAIAKQVATVALEPARLSFSLTAIERMLPFLREGKSVQEAKMAAYPEQAGADQPWDLLPPLRPNQVWREHCSGGRPYNGVEIRNPAVERSLSEVRKVVNAIIRRWGKPDVIRVELARDLKKPRQERKDATDRMRKQEKWRDEARDLMVQQGFPHIKERNQRADVEKVLLWEECGGVCPYTGKPISFEDLFGQNPRFEVEHIIPYSLCLEDGFANKTLCEVHENRNRKRRMSPHEAYYGTDQWDAILMRVQHFKGPTASKKLRLFRSVTNGFEVFGDFTQRQLNDTRYASRLAKEYVALLFGGKVDAESRQRVFVSAGGATAIVRRKLGIEGILGGGEKNRKDHRHHAIDALAIAITGPREVQAIARASEAAVARGEPSHRLKLEAPWPEFVDDAKRVVDGIVVSHRVDRRLSGPLHQGTNYSRPMRDFSGTVRDEALRHQRYPLESLGAADIKDIVDGAVRRAVESKLAQLGQTEPKIAFKGGANLPGVQRSDGRVVPIRRVRVKLRKSLDSVGDGPRKRYVAPGSNHHMVVVERRMADGSTSRELEVVTMLEAFRRKSRGEPIIQTEWGEGARLLFTIRSGEAVMLVRDGARVPALISSISAGQLELKLHQDARAATEIRKGGVSAGRIVLTPQAFVNSIDAKVVLLPTGGIRIAND

SEQ ID NO: 1870 - protein, 988 aa, unidentified
  REGION 1..988: note = Description of Unknown: Cas Enzyme sequence
MQKLHRILVRHGLLPDPGTYSSEAIDRAFKALDSSLASTDPARSDRRAASLIQYRIRARALDVPLRAHELGRALYHLAQRRGFLSNRKARRTEEDDGVVKAGIHALKEAMVASGSRTVGEYFATLDPETARIRGRWLDRNEMVRAEFEAIRAAQAPHHTDLGVEAWDEICEAIFRQRPLRDQSHLIGRCSLEPDKVRCPMAHPEAQLFRILQSVNHLRIVEIEDGQEVAERALTAEERSRLIESLKKVSHLSVAQAKKLLALSPRLSKFSIERGGETKILGDVSSSRLSAVLGDRWEVASPDERSRLIEDLLDYESEMALQRRLVRRWKLTRDEAASLCEVALEQARARFCVDAIRRLTPHLLQGHSITEAKIAAYPEQAGADAPWDLVPPVRPDRIWRAHCSQGRPYNGLELRNPAVERSLAEVRRLVNAIVRRWGKPDFIRIELARDLKKPRGERKDASKRMREQEKRRSDALARLVEEGFGHVASRNARSDVEKVLLWEECGGVCPYTGASISFESLFGPAPRFEVEHIVPFSRSLEDGFGNKTLCAVDENRNRKRNRTPYEAYSGTGGWEQILARVRQFSGPAARRKLRLFMSEQAGEDVFGEFVERQLNDTRYAARLAGDYLGLLYGGQIDSDGVRRIQVSAGGATALMRRKLGLEGVLGGGEKNRKDHRHHAVDAIAIGLTGPREVQQIAAASKLAVDSGAAAHRLAIPAPWERFSEEVRSHLDNLVVSHRADRRLSGPMHQATNYSRPILDCRGRALGGCRHLRRPVAALSPGDVENIVDPIVRRAVQDALQRRGEGDPKVAFKSEEHLPTMTHPDGRVVPIRRVRVRVGRTVETVGAGPTERHVAPGSNHHMAVVETREKGVRTHLEFIVVTMLEAYRRRSRGEPIVRRDWGVGKSLVCTLRSGDLVLLKLDSDLVPSVVSSVSEGVFEFKAHSDARPATELRKAGRAGGRLKLTTGQLREAFQGKLDIRPLGEVHRAHD

SEQ ID NO: 1871 - protein, 1048 aa, unidentified
  REGION 1..1048: note = Description of Unknown: Cas Enzyme sequence
VIRESNSPARSEAIVLGLDIGAKSIGWALIQGPETGKPKIIGLGVRIFEAGVDGDIEQGKDSSRAAARRDARQMRRQTFRRVQRKRKLFSLLQSAGFLPATADTLAAARDKAIKEIDKRLLATLGKTYGSAGSTARKLPYVLRAEALQRPLTAEELGRAIYHFGERRGFKANRRTDRQSEDTGVVYEGIAEVQRQKGDRTLGQYFADLDPTQDRIRGCYLGRADYEDEFSRVFDAQQSHHAALTPKLRRRLRRCLFWQRPLKSQKALIGRCSLLTNRRRCPMAHPIAQEFRLLQAVNHLSLFNADGEMRLLTNAERLKLLGALRTDGDITFTQVRKLLGLKKKDSRFNLEEGGEKKLPGNRTGRAMTDVIGGEWAKLSPHQQALLVGIVRGSPDAASLRGQVGQSFPTLMPHCDALDKAALEDKPAAHCKRVLADLVDRMKDGIPYATARADFEATHNLGMPTEPVDQLPPVRTALPAITNPAVIRAMTELRKVVNEVVRVYGKPDMVRIELARDLKKPRRIRQLLSERMRTREGERSVASQNLKSVGITNPSRADVEKILLAEECGWVCPYTGKSFGMADLVGSHAKVDVEHIFPRRYLDDSFANKTLCYAAENRAVKKDLLPFEAYSGDETRYREILDRVRTFQSGARDEKLRRFMADGVEEGFASRQLIDTAFASREAAKFVGLLFGGIVDIRSDKRVRTSTGRLSALLRGAWKLNSILGTDSSPKGRDVDHRHHAVDAIVIALSSDAIIKSVSDAAGKYAFRSSGRWHVDVPDQEGLLEQAACEVKTIVVSHRVDRRLAGRLHEDSIYSPPRADGAGGTYHVIRKPLQRLTPADITGDKIVDPRVRRLVQEQYAKLCHALGKTKPSDLFTDDSRLPRLPNRNGPPVPVRKVRLRVRDKAIRIGDAEHRARHIMRDADGLHHTVIIATRKRERETWEEAPTSRLEVQDRKRKGEPVVRTDWGPDSGFVLHLCKGDSIELDTPDGGRAVYVVRGVAGTDIAVVQAWDASRENRTAETRIRSPNKLRERHPRPVVVTPAGRVFPRGG

SEQ ID NO: 1872 - protein, 980 aa, unidentified
  REGION 1..980: note = Description of Unknown: Cas Enzyme sequence
GISTLDRARLLDPDDPTSQRTLAQTVRDEFSQQNGRFVLKSEDPTSGPRGRIRKHYTSRKMYYDEFIAIRNAQLEFGTPIQMGDWKKIEKALFHQRPLKSQKHLVGRCTLEFDSRGRGRRRCTIAMPEFQEFRLLQTVNHLRITLPGQLSEPLTDEQRQTLVNYLQVHGDLLLQPPRRRSKSGAIESVVSLLDLPKGTTFSLKPFQDGGDAHDDADEDDDTKLIGNRTAAKLRPILGDRWEHLSDAEREQVILQVLYISNPDSLKKLAIRKWQLAPDAAEALSRVSLEEGFGGLSRKAIRELLPYLRNGPSYAEARKQRYPDSFKALEPCELLPPLSKWNDDVRNPAVIRALTEVRKVVNAIVREYGKPERIHIELARDLKRSRKERQEIWKKNEEQRKLRDKAAKKILEELGVANPRRDLVEKWLLADECNWECPYTGKSITPRTLEHFDVEHIFPRQYLDDSFANKTLCDHEFNRNKKKNRLPAEVLSGDELDVVLARVKRFNGPAAAGKLKRFQRDEVPEDFVARQLNDTRYNARLAADFLGTLYGGRSGADGNQRIVTPTGNLTWILRTGWELNSILSGTDEKDRRDNRHHAIDAVCIALATQKTINLAADLAKNNFLAGVRFNKFLQDLPKQTPWPDFLNTVRASIEQIIVSHRPTRRIAGPLHAETNYSKPFVKYESPPAATSEGGARRANRPKPPIVQYRVRKSLDKLSEKDIVGDAIADPQVRAAVQRKYEELCAFATTKADKTPAKMWSDLSKIDNFPRLPASAKRVKKGENTLGSPIFKVRLVTDTKPRTVGKGMRQRQVASGKDSNYATMIYAIVDKDGKEVRWEHEIITRLDAHLRLSANGGGRGRRKDVESADKTITPPERILTPRTSEEIRDMAEPPFKLKPSELLRFLFALVKNDMVELDGPEEIRSIYRVQSISADEIMLCEHPRSNVGISDRTPWNRIRTVSKLRDRNLRRVLITPLGTCADR

SEQ ID NO: 1873 - protein, 1084 aa, unidentified
  REGION 1..1084: note = Description of Unknown: Cas Enzyme sequence
MAAPTKTSRRVLGIDLGSNSLGWAIVLEENEKPTGLVDAGVRVFEAGVDESRGTIERGKDASRAKARRDARLQRRQLMRRARRVRLAFRILQQSGLLPGGADPADSKQRHELLNQLDKDLAAKHLPESDRIAGHLLPYRLRAKAIHERLEPHELGRALLHVAQRRGFKSNRKTGKRDDEGVVKKGISQLEQEMKDAGAETLGEFYAKIDPEARRIRTRYTSRKMYENEFERIWTTQAAFHPVLLTDQVKRRLYRAIFHQRPISSQKGLVGRCELEPKSRRAAAARLVHQWFRLLQRVNDLEFICPDGEVLRLTDERMTAERQRLIDALETLGDIEFSGKKTKTKKQDEQPQRPKKPKKDSRPTVRSLLGLSDEHEINLERGGEKKLPGNRTNAAMAEIFGPRWFEFSDAERDRIIDDVLSIQNDAVLERRGKGVWGLSEEDAKAFAEVELEPDYASLSCRAMTKLLPALKNGEQYATARRRLYPERFQADVALGKLPPALKAVPQLRNPAVARALTELRTVINAIIRVHGKPELIRIELARDLKRPRKVRERIWEQNRENQTAREGAKVRFLQEMGIAQPRGDAIEKVLLAEECNWKCPYTGRPISMRALLGDSPEFDVEHIIPFSRSLDNSFMNKTLCYHDENRNRKRNRTPFEAYGVHESLANQWHEIMVGVRNFQGSAGKAKLRRFEMEEIPDDFAASQLNDTRYASRLSADYLGLLYGGRVDESHEQRVQPNTGGVTAFLRAEWGLNFILNDGPRKERKDHRHHAVDAICIALSSAKIVKMLSDAASRAVPGRRFDPVEPPWPTFDADARKAIEAINVSYRVSRRVSGPLHEETNYSPPFKVVNEDHKLVEYRHVRKPLDMLSRDRLDAIVDPVIRQRVLDKLTELNETDPKKAFKLPENHPVTAARDGRKIPIHKVRIREKVAAITVGGDTKEPDRKTGRERYVSPGSNHHMEILAVQSKNAEVEKWEGVLVSMFDAAKRVLDKRPVVKRDHGDGKRFLFSLGLHEIVRMDENGTRMLCRITGISEGLIELRPHTEARPGSVLKKIKGGRIFRTADTLRKSHAEKVTVDPLGRVHVARD

SEQ ID NO: 1874 - protein, 1043 aa, unidentified
  REGION 1..1043: note = Description of Unknown: Cas Enzyme sequence
MAEGKDSAYLLGLDIGSSSIGWALIELDGTKPRGITRTGVRVFEAGIEGDVEGGRGEPRNTARRGARQQRRLLDRRARRMKKLLHLLQRHGLLPDGLPEQVIPELDATLKTRHAPQLGDGGDSLLSHVLPYWLRSRALDEKLEPHELGRALYHLAQRRGFLSNRKARKKDEEKGKVKEAIGELQQKMTEAGARTLGEYFSKLDPQEERIRNRYTSRKMYEDEFEKIWGAQSQYQGALLTDELKAQVHRAIFYQRPLKKQKHLIGHCELEPQRKRAPWATLICQRFRLLQQVNNTRVITADGEERRLTTEERAKLSDTLETQGDVTFAKARRALALSTGCSFNWESGGEKRFPGNRTNAKLAAIFGDRWWQLSEDDRRRVVEDVLTIEKEDVLRRRGAEVWGLEPEAANALAQLELEPGYCRHSRRALRKLLPHLEQGLTYMEAVERAYPDHRERKQALDALPRVSKAAPELRNPIVARALTELRTLVNGIIREHGKPALVRIELAREMRKSAQQRQDTWKRNRQNEKERQQAAQKVLEETGIANPSRTDIQKVLLYQECKQTCPYTGKHISMAALLGDNPQFDVEHIIPFDRSLNDSFINKTLCEANENRSRKRNRTPYEAYGGDAKKWNEIIERVKGFHGSAARAKLALFQTQDVQSLDDFISQQLNDTKYASTLAADYLALLYGGRSDQSGKLRVQASRGGITAHLRNAWELNAILGDGGEKSRDDHRHHAVDAIVTALSDPAAIKKLSDAARSEWRWWRADFEPPWEGFLNDVRNAIDGIVVSHRVSRKVNGPLHEETIYSAPRDNRGDLCEDGQFVHVRKKLEDITKPDLDEIVDEPVRKRILAWLDQAGGDMKKAFANPDNHPFLETKDGRRVPIHKVRVRKAQAPIAVGQGSRERYVFSGSNHHLEILETTDKKGRTRWEGALVSRYEAMRRLRAGEPVVQRDHGADKRFIFSLAGGETVRMHHDEGDAQLYTVTVISQTRKGTVTIEFLRNRDARLSRVIRKTKGARVRKTPQSLLESQGQKVLVTPLGEVRAAND

SEQ ID NO: 1875 - protein, 1055 aa, unidentified
  REGION 1..1055: note = Description of Unknown: Cas Enzyme sequence
MSSYILGLDVGANSIGWAVVPLQNGAPAGVTRAGVRVFAAAVANLEEAQPETANAQRRLARLTRRRLDRLARRLEHLFRLLQRHGLLPPDPAPSPPASRLEAAHRRHDLLRRLDADLLSEWAARGARGEVPLPDPATLPHVLPYLLRARALDEKLSPYALGRALYHLGQRRGFLSNRRAGAKEEEGEVKKGIDSLAAEMAAAGARTLGEYFSRLDPQSARIRGRYTSRRMHEDEFALIWAAQCVHYPDRLTDDLKKQVHHAIFYQRPLRFRKDAIGPCQFELNRRRAPMALLACQRFRLLQSVNHLQVLLPDGRPRPLAESERQALIAALEEQGDLKFAQVRKLLALPRDTAFNLERGGEKKLPGNRTAAALRAVFGAARWAQLTPADRDRLVDDLRSIQQDEALVRRAMRVWGLDAAAAQQLAAVRLEQGYLNLSRQAVAKLLPLLEAGKPYATAVAEVYGPRPAPPPVDQLPLVSAALPHLTNPVVQRALTEVRRVVNALIRQYGKPECIRVELAREVKKNARQRHQIALRNRENERLRRAAAERIVREVGIANPSRADIEKVLLAEECNWHCPYTGKPISMAALFGEHPQFDVEHIIPFARSLDDSFMNKTLCDAEENRRVKRGRTPFEAYGSQPERWAEILRRVRAFKGSAADAKLERFRCESPPDATELCSRLLNDTRYAARAAAEYLGRLYGGQSDAGHRRRIQVATGQVTAFLRREWGLNAILGDGDEKSRDDHRHHAVDALCVALTDAGIVQALAAAAARAPAEGRRCFARLAPPWPSFLADARRAVLEITVSHRVRRKVSGPLHAESFYSRPHRDPQGRECRHIRKPVEALSPDEVAAIVDDKVRECVRAALRAKNLDPDAIRNSRAIAQAFASPADHPCLVARDGRRIPIHRVRIRKVVNAFTLGDRHVVTETNHHVEIFARLNPDGEVARWEGKVVTLLEAVQRLRAGLPIVNRDHGPDTRFLFSLALREAVRMDDGQGGRMLCVVVVVSQTQQGRIDLEFRRHHDARPGMQGERIRKTPNSLRLAHAEKVVVDPLGRVWPAHD

SEQ ID NO: 1876 - protein, 1075 aa, unidentified
  REGION 1..1075: note = Description of Unknown: Cas Enzyme sequence
MEEQQKYILGIDLGTNSLGWALLKANPSPAENDRLKPYGIKRVGVRVFEEGVKDYDLSKEQSRGKNRREKRLMRRQFERTFRRLSHLYSILQSHSLLPKTAEYSIPLNKSKKPDSSERSQKRISKSEGRHRELNSLDQNLMEKWAKKIAGEGATKEAVKAAKRDLGSKLPYFLRAKALRDKLEPYEIGRIIYHLAQRRGFKSIRKSQQPENEGKGIKGKMKTLQNKIDDGKFITLGNYFSAIPAGLKIRNDHDFDFTEHYTTRGMYEAELRAVWQKQKEFYGDLLRDELKGKIWNAIFDQRPLKSQKHLIGECRYEAGKKRAPVACLEAQEFRILKQVDSIRIEPPDAIAHNLSLDQRAELIKILSEKKELSFEDAKKKLGIEDSKFSIESGGEKKFKGNTTVARLGKFFGKKEWNKLPDEQKKEIADLLVSDKTDAEVEQYGIEKLHLQLDNAREFGQLGLEDGYSALSMMALNKILPIMRKGIPEVTAAREAGYQDLIGLAAEKQLPPVQSHLPELTNPIVKRALTELRKVVNAIIREHGKPESIRIELVRGLKKNKQWRDQIIRDNRENQRRNQEYRAIIENLKELHIEKVEAKHILKWRLAEECGWNCPYSQEGFEPIDLLRDDSPLEVDHIIPQSRVIDDSFNNLAICHHKENRNKSNKTPWEAYHGDPEKYDRIIAAAKKFGNRAKLNRFLWNDEQLKEFVNNFSESQLNDTAFASKEARKYLSLLYGQDALKRVQVGNGAITKTIRGLYHLNRILNDGGDKSRDDLRHHSVDAIAIGITDQWIVTYLNAAFEKAFRVSDKWVYRHLKIDPLAFFNEAKQAILDLKVSHRCDRKVNGEMHKETYYCRPPKENGEYVNGKTFMRLRVYQLDQGTIATIPDDNVRRAVEDKLKELGGNVEALKKNHPTLNGIPIRRVKIPVNLKVEKIGRSCRERFVNTGNNHHIEIIGIQDTTGNIVEWDGEVVTTFEAMRRNKNGEQIIRRDHGPNRKFLFSLSRNESVLMKGADGVESLWTVQKIDKNNILFFVKHNDGRKLSDIPAAGRSRKPESLRIYEAKKVLVTPLGDIRWAND

SEQ ID NO: 1877 - protein, 1090 aa, unidentified
  REGION 1..1090: note = Description of Unknown: Cas Enzyme sequence
MVTTKGGKYILGIDLGANSIGWALLEAGPSKEGDGKLKPFAIKKAGVRVFEAGVEGDIESGKDESRSVSRRNARGARRRIERTARRMSHLFHLLQKAGFLPAGDGTALAHKEKGKHTAEELREFRMKAAAERHKIVNEFDLQFLAKLGSKDELAAKKLPYLLRAKALDKKLEPFEFGRALYHLGQRRGFLSNRKANSKKDDELGKVKQGILELEGKMEELDARTLGEYFSKTNPEEVRIRSRWTSRKMYDDEFNSIWGAQSKHNPKLDDKLKKAIHRAIFFQRPLKIQHHLIGKCPYEQGRRRAPWAILDAQMFRTLQQVNNSYLISPEGEVLEFTPEWRKTLLDELDKKNEIKFSAAKKLLGLKKEYQFNFEKDGKGEFLGNSTAEDLIDIFGEEKWNGFSREQKDEIIQDVLSIVSEDGLAKRGREKWGLSGEKAKEFGQLQLEEGYCGLSRQALKKLLPRMEKGKKYMEAVKDEYGTVVSGDKFEALPPITEVLPDLKNPTVKRALNELRKVVNAIVREYGKPDIVRIELAREMKKNRKERKSIWDRNQEQRTWREKAAEEIIREAGIKDPKRADIEKYLLWQESNCQCPYTGKEISIKKLFSGDVDVEHIIPFSRCLDNSFLNKTLCLAEENRNKKKNFTPFEAYAGSDPDQYAKILEGVKKFEGDAAKEKLRRFRMEHIKDFDDFTETQLNDTKYASKEAKKYIGLLYGTEQLSRVQASKGQITADVRNVFNLNKVLGDGGEKNREDHRHHAVDAVAIAVTDRSLVKMLSSSAAKAEKEFSPKKFDRAKIEKLWPSFFEDVKESIMAINVSHRVSKKVNGRLHQDTFYSPPKKDEQGKSYCCVRKPVARLSKGDIEDIMDPAVREAVQKKLKELGGDPKKVFQDPQKHPFLTAKDGRKIPIHKVRVKNIGSPFQVGGQGRERFVSSDTNHHLEIVEVKDKKGNMKWDGHVVSQFEAMRRLRGGEPVVKKDHPGEKFVCSLAQNESVQLKDDRGNQVVCTVKGISQLSAGPIIITLRYNSDARPTSVYQQQIKKRKELKRTKDEKLAEELSSEMPVFIFRGPESLRESNGKKILVDPLGNIRWAND

SEQ ID NO: 1878 - protein, 1043 aa, unidentified
  REGION 1..1043: note = Description of Unknown: Cas Enzyme sequence
MPNPQRIPYVLGLDVGANSIGWALVGLTEGVPRRLVAAGARVFDAGVQGNIQAGQAESRGTKRRQARQQRRLADRRGRRMQKVLHVLQHAGLLPPGEARCILPELDAELITRYRRHPDAQHLSTDLTHVLPYWLRCRALDHPLEPFELGRALYQLAQRRGFLSNRRAPKKKDEDEGQVLGGISALQRQMDAAGARTLGELFANIDPRQERIRTRYTSRRMCEDEFEQIWTAQQGFHPTLLAEKLKARVRDAIFYQRPLKDASLFIGGCKLEPGRKRAPWALLAAQRFRLLQMVNNTAVITKEGTERALAEAERDALLEGLEQTDKLTFPQARRRLKLPRSSVFNWESGGEKRFIGNRTNAALSAIFGERWWALSPQEREQVVEDVRSFEQPDALSRRGVSAWGLTPQQAEALAAVRLEDGYCRHSRQALARLLPHMESGLSYMEAVQKEYPEHGKAERPHEVLPPLLDTDLDVRNPAVLRALTELRKIVNAIVRRYGKPHCIRIELARDLRRTAKQRQRSWKQARRNERARSDAADGLLAEAGIEQPSRRDVEKVLLADECDWTCPYTGQSFGWADLFGSSPAFDVEHIIPLSRRLNDSFIYKTICEVRENRQVKGNRTPWEAYGHDAQRWAQIVGRVKKFKSTARKAKLALFEVQQVEDIEDLASRQLNDTRFSSRLAAQYVGLLYGGLVDAEGTRRVQASRGGVTAFLRRLWGLNSILGDAWEKSRADHRHHAVDALVVALTDPGAVKSLSDAAARGWQMGRRSFAAVQPPWQGLLDEARAAVLEVNVSRRASRRVSGALHKATFYGPQKEGENGPAYFHLRRELADLSRKEVDAIVDPHVRELVKAKLQQIGLAPSKAFKDPRNHPSITARDGRSIPIHKARIRVNVSAVPVGQAEPLRWVKPGDNHHMEILETTDRRGRPKWEGHLVPLLEATRRVRAGEPVVRRQHGPGKRFLFSLAGGELIELDDPKLGRGICVVRTVSAEKRGSVSVELCRALDARPKRIIRDTGGWVKHSPDALRKAGASKVSITLLGEVVPSND

SEQ ID NO: 1879 - protein, 1008 aa, unidentified
  REGION 1..1008: note = Description of Unknown: Cas Enzyme sequence
MKCLRIQPVEHHTWLFRLFGRGLSGEPLTAFQLGRVLYHAAHLRGFKSNAKERARAEKDKESGKVYGGIKDTRVLMGEDLLPTAFAKLDPEASGQRIRARHTSRDDREKAVRSLLDVQAAHHGALKNPDVRDQVFECIFHQRPLKPVSHFIGRCRLDPSSPRAEMAMPSLQRLRILQLVNDLEVTPPGELPRALDGRERALVRDYLLSGKSLTFTQLRERLGFPAKPRMPKDTKYPRPPFHEFNFERADSDMKLKGDSTTSCLAPILGEQWQTMNLATKDAFVAAILDDDAEDEKEVAENLVHEFGITPEDARKVVEAPLNTDRGSFCAESARTLCAKLDTATDVPARFATVLTELKKARGNAADDSKASVAGFDFLPPYLPSQKDGPAFADSRNDLRNPSILRVLRELRIVVNVLIRKHGKPDRIRIELARDLKKPRGAREEIAKIQKERAGEREKARQQIIEKEYRANPTSTDIDKWLLGCECNWMSPYSGESIPPSRVFAPESDVHIEHIIPRSRSLDNSFANKTLATAADNARKGNRAPHAAFSGDAQLWHEIEVRVSAFAGPGATGKLRRFQWTEEELARRYDDFTARHLHETAWASRLAKDYLSCLFGAENNDGIDADGTRRVETVSGVATGLLRQAWGLSAALLEQSDLPALPPAEEGKPKPGAADKLRNDHRHHAVDAIVVAFTEPQAIRRLSTALQANEDARDFALPPPCENLHAATRDMLAKINVSHRVNRRVAGELHKATYYQPVRASGKRYQRVSLDTFTNTAELERIVDKRIRAAVLEAWNRRTDEKIDPARYFSAANDANLPRIELKNKRDGSTRTVIVRTVTVPIDSITTVPLGDPGEPSRQLHAVTGDNYCVAVVEMPAKTPKGKNSLSFRAITRLDAARKIDARQSAERKKPLRVEELLPAPLAEGERILFTIRSSETLRLRQGKYAGLVYIGTASESGLEGQRLNDSRGAMIRKKMGSDARIRLAPKSLLEAKPEKVILGPLGEVFPCND

SEQ ID NO: 1880 - protein, 1063 aa, unidentified
  REGION 1..1063: note = Description of Unknown: Cas Enzyme sequence
MDSKSSPYLLGLDLGVQSVGWTIIDFDNDGKPCGIRRAGVRCFDSGVGSETEIAMGKDESANKPRRDARLQRRQTWRRARRLKKVFLTLQNAGLLPHEPVHSSEERHQLLLKLDAELAKQYLPPDDRIAAHLLPYRLRYLALDQNLLPFAIGRALYHLAQRRGFLSNRKANKKDDDEGVVKEGIKKIREDMEHTSARTLGEYYASLDPEEKRIRERWTSRQMYLDEFEKIWAAQQSHHPELLTEQWKQRIHEAIFYQRPLKSQKGLIGICELEPDQKRGPLASLEAQRFRYLQKVNDLEIATPEGQILRLDGEQRQKLIDLMENQVEISFDKIRTLFGLKKQRRKKVEGEEAQTEEPKYTFNLEAGGEKKLKGNVTLVRLKNELSDELAKLTPERLANMIADLIEYEKKDALEKRLVERYGLSPDKAGVVSDIPLEDGYCSLSLKALKKLLPLMEAGIRFATARKQVYGEYSGASKMCDYLPPVLEAKSQLRNPVVTRGLTELRKVVNEIVRIHGKPAFIHVELARDLKRSRKQREDITKQNRQNEKAREDAKKRLLKEMSSQEPRSGDILKVLLAEECDWTCPYTGEHFGMSDLLGASPKFDIEHIIPFSRSLDNSFINKTLCYHEENRNIKKNQTPFEAYCGQPDKYSEIIARVKRFKGSAGHAKLKKFLQEKMDEDFSARHLQDTRYMSRLATEYLGLLYGGVIDAEGRRRIQVSAGRITAFLRDEWGLNAILNDGGNEKNREDHRHHAVDAIVIALTYSQTVEYLSRAAEQAEEWGRRLFAPMDKPWTTFLDDIRRAIDAINISYRVNRRVSGALHEETYYSNAYKSQDKNGKPVEYRHVRKPLVNMSMDEINSIVDPTIRDIVREKLEKLGGEPRKAFADQNNLPYIQSKGGRLIPIKKARIRKKVSVIPLNKQNTRFAAPGSNHHMEIVAVLNDKGEEVEWEGHIVSLFEAYRRRKAHEPVIRDKRHDYGANKKFKFSLAGGEYLMMEVESGKESLVRTVVISERSLEFRLHNDARPITVLKKISKARITSSPSALFKRKARKVLVDPLGNILPAND

SEQ ID NO: 1881 - protein, 992 aa, unidentified
  REGION 1..992: note = Description of Unknown: Cas Enzyme sequence
DLESGKDESKAKARRDASGQRRQHWRRAWRRRKVLRTLQQAGLMPPGSLATPTDIHERILRLDQALREKFIPTGDRVAAHLLPYRLRAKALDECLEPFEVGRALYHLAQRRGFLSNRKAGKKGDDEGMVKAAISELSDRMTAAGARTLGEYFSGMDPEEERIRKRWTSRQMYLDEFEKIWTKQAEFHPQMTDEVKAQIHAAIFFQRPLKPQTHLIGVCDCDPPHRRAPVALRLAQRFRLLQKVNDLEVLEPTGFPRPLSSDERAKLIAALEQSGDLTFAKIRGKSILALPKETSFNLEKGGEKKLPGHRTDAKLAEIFGDKWPRLSEAERDQIVEDILTFEKSEALAARAQRAYGLDREAALRLAELELEPGYAMHCRKVLRQLVAKMEGGTRYAAARRELYPDQFQAKPAVDLLPPVKDALRNLRNPAVCRALTELRKLINAIIRRYGKPAEIHIELARDLKRSRKDRQELSKVIRENEKLREKAKERILRELGDQQPTRADIEKVLLAEECGWECPYTGKRFGMQELLGQNPQFDVEHIIPLSRSLDNSFGNKTLCYHEENRNHKRNRTPWEAYHADEQRWHQILERVRRFQGASARGKMRRFLMEAIPDDFTSRQLNDTRYASRLAAEYVGLLYGGRADAEHRQRVYVCTGGTTAFLRNEWKLNTILGDGGPKTRDDHRHHAVDALVIALTGPATVKMLADAADNPWQHRRRLFAPIQEPWVGFLDQAREAILRINVSHRVNRRVAGPLHDESIYSPPQRGVGSSPKVVPSYHIRKPLASLSIHEVEDIVDPIIRARVKAVLDEKGGDPKKVFSVAANLPALRTRDGRTIPIRKARIRKSQNMVAIGKGPTQRYVAPGSNHHMAIVAKVDSEGNDREWEGVLVSRLEAAERARRRVPVVQREWGEGRVFRFSLAPGEMFTLEDGNGKGLYIVRSISQNRVEFVKANDARKKVDIKAAKHWLTHPPSVLFRKRCQKVSVGYLGDIVPAND

SEQ ID NO: 1882 - protein, 1084 aa, unidentified
  REGION 1..1084: note = Description of Unknown: Cas Enzyme sequence
MESTPERTFVVGLDLGSNSVGWAAVSGTRPDESGSFTATGLLRVGSRIFEAAVDGSLEQIEQGREKSLNEPRRQARGQRRGTERRGRRLHQLYRRLSRAGLLPALPSLADDPKCGEWQRGKSAAAQRREQLALARERDTALKALDRDLWAQHRGAVIARDEGDMPRQAHVLPYLLRARALDARLEPFELGRALYHLGQRRGFLSNRKAAPKDEDEGTVKKHIGELAQAIETAGARTLGEYFSRTDPESARIRGQYTSRAMYEREFHAIWSAQRQHHAELLTDRLRDELHRAIFYQRPLKSQAHLIGACEHEPKRKRAPKAILAFQRFRVLQTVNHTKVSSADGEVRWLSEKERADLVARLEQVERLKFIDAKKLLGIPRNSVFGFEGGGETAFRGNVTAARIGKAIGKRWDALSDADRDRLVEDVLTIQRPEVLARRGVRHWGLEDAAAQALAGVKLEAGHANLSRQALRKLLPLMERGLPYMSAVMEVYGRKGGGQPLERLPPVRDAMPQITNPAVLRTLSEMRKVVNALIRQHGKPELIRVELARDLRNPPGARQKMSQRNRKFEQLREAASKRAREYLRDEPRPADIEKVLLADECNWHCPYTGTGFGMEGLLGSHPVVDIEHIIPRSRSLDNSFLNKTLCLRSENHVKRNRTPWEAYAHTRKWEDLLLRVKGFRDIRGDGTAKRKLEWFMLDSEQVQERFGDFTARQLTDTRYASRLAMQYLGLLYGGTVDTEGRLRIQVTRGMATSDMRVALRLNRILGDGGAKTRNDHRHHAVDSVAIALTTPAMLKAMSDAARDAELSGRRPVPFVPYPWETFPQDVQKAVHSAKTSYRVSTRVRGALHKETIYGPPFQDGGKTHVHVRKALSAMSVGEVAQIVDASVREAVEAKLAAVGGDPKKLDLINDPPLLSGGNGRTVPIRKARIKLVGSPFSIGDRFNPRHVLTDTNHHVEVLEVSDKKGGVKWVGEMVTRFEAYRRWKAGDPIVQRDHGDDRRFLFSLSPGECVALQQGVCVSRIVRVRGVSWKARGYVEVEFVEINDARKKSDIKTAKQWGSNPLETLRRWGCRKVKINPLGDVYPCND

SEQ ID NO: 1883 - protein, 1127 aa, unidentified
  REGION 1..1127: note = Description of Unknown: Cas Enzyme sequence
MFSRANSVSDNDCSSVNAPAAPRDTASEAQPQPSQPSAGTNVPYVLGLDIGATSVGWAVLDLDAQGEPCCVRAMGARCFEASVDGDIEHGKDSSRAVARRQARMARRILRRRARRLKKVFHLLQRHGLLPAGPSRTPEERHRLLADLDRQLFPKYAPGGDRVAAHVVCYRLRAAALDRALEDHELGRALYHLAQRRGFLSNRRDDRRASEKGEKSQDTKVIEKEIASLKEQITASGARTLGEYLSRIDPEQQRIRKRWTSRQMYIDEFEAIWSAQSQHRPGRLTEALKRELRQAIFHQRPLKPQTQLIGRCELEPPRHPGALPPRRAPLALPVAQRFRLLQKVNDLQVIEPDGRIRPLTAEERNKLLQALSEQARMEFDDVRKLLGLSAPRKRKDKATGQQICTPGHRFNLEEGGETSIPGDTTTARLLPVLGDKWRTMPEPLRESLVRDLLDFNYPAALAEHLQRVHRFDRHEAEALSEISLEDGYAPYCRMALRKLVARMENGTPFATARKLEYPQSFAAKPPCELLPPVRRAVPDLRNPAVIRALTEVRRVVNALIRRWGKPEIIRVELARDLKKPRKEREKAWKGNREREKERKAAADRLLKEAGITNPSPADIEKVLLMEECGGICPYTGRPITIPALFGDSPQFDVEHIIPFSVSLDDSFVNKTLCWHEENRHHKRNKTPYEAYSGNRERYEEILRRVSRFSGRFRKEKLRRFQMTLADVKAEYGDDFTARHLTDTRYASRLAADYLGLLYGGTVDAAGRRRVQTSSGTATWYLRSEWDMNAVIPGLSGSPTGSASGTFIEKVRTDHRHHAIDAVAIALTSARVVKMLADAARNPEQHRRRRFAPVPPPWPNFKDEVSAAAEKIIVSHRVDRRVAGPLHAETNYSPPIVHENREYRHRRVPLSSITRSQIAQIVDDVIRQLVEQKVGSAGDPAKVFSDPRNLPVLRSRDGTRCIPIKKVRVREHVAATTVGAGPRQRHVVSGKDTLHHTVIVARQTPSGEVWEDNPVDRLEVHRRLRNGQPVIQTDWGSDARYVFHLCKNDCIEMDVESGNPSAGRQIYVVRSISKRDIAVRLHYDARTLEQIVRAKERGKFRISSADLLRRRNARKVMVSPLGEVLPCRE

SEQ ID NO: 1884 - protein, 1089 aa, unidentified
  REGION 1..1089: note = Description of Unknown: Cas Enzyme sequence
MAYAREDVGDYILGLDIGVASVGWALIGQKDGKPDRLIRLGSRVFDAGMDEGSFEAGKENSRNATRRQARQARRMTERRVRRQAKLYRLLARAGLLPEGDHPELLRGPPREERARYVHEQLKALDVDLKKKHLRGKPGRHRLEQVWPYWLRAQALTDKLEPYELGRALYHLGQRRGFLSNRKELAVLEEVQAERAQQKRKGKKKDEDELRDPRKKELGVVKADIARLETAMKAARAETLGQYFATLDPHEKRIRQRWTSRDMYKHEFAKIWEAQAGHHPAILTDDLKKKVYRAMFHQRPLKNQAFLIGWCEFEKGRRRAPWGLLIAQRFRTLQQVNDLRIVTSGNPAGDYLTVQQREALLARLEREGDLCFKQAKELLVPLGLPKGARFNWESGGEDRFLGNRTNAKMFTVFGDRWWQFSEAERERIVEDVWSIQKPEALARRGKKAWGLDDAAAKKFGSLALEDDYCNLSRQALAKLVPMLQDGLPYATAVREAYGQKDCKPMDLLPPAARQYPHIRNPMVLRVLSELRKVVNAIVRKYGKPAIIRVELARDMRRSKKQRTEVWKQNRQNESLRKKAIKMIFDELQRENPSRGDVEKVLLAEECDWTCPYTGNRFNMNGLLGPTPQVDVEHIIPFGRSLDDSFVNKTLCDVDENRHKKRNKTPFEAYGGTAQYKHILARVRAFKGRAADEKLRRFQMEKIESIHEFANRQLNDTRCAAKQATHYLALLYGGQYEKGGQRFIQASRGGVTAYLRNEWQLNTILGDGGTKSRDDHRHHAVDAVVTALTQPGTIKMLSDAAERAAKEGRRRFGRLEDPWPGFLQDVRAAVEAANVSHRVSHKVNGPLHEETNYGPSRERDEHGKPNSFTVRKAIEQLTPNEVEDIFDEDVKKIVKAKLDALGGDPKKAFKDPGTHPFIETKRGRRIAIHAVRIGVNKRAEPIGRGVRERWVLSGSNHHVEVFKLPDRNSKPQWVGRVVSSREAMGRLAQNPRRPVIVDRSLPPGAERFLFSLAGGDMVRVKDDCGKPALYVIRSVWDTPSGVRIRWARHNDARKDADIERAGREPMLSVLARRECQKVILNPLGEVRYAHD

SEQ ID NO: 1885 - protein, 1065 aa, unidentified
  REGION 1..1065: note = Description of Unknown: Cas Enzyme sequence
MTPGENGERARAPYRLGIDLGSGSIGWAAVVEREGAPSEILAMGVRRFDAGVLGDIEQGKDESRATARRDARGPRRQAWRRQYRLRKVFRLLQKMDLLPPSKDDSHDERHRVLAQLDRQLRGSAETPGPASSHLLPYLLRARALDEKLSRHELGRALSHLAQRRGFQTNLKAAKKDEEVGVVKKGISDLENLMEQAGSRTLGEYLASLDPQQYRIRGRWTSRKMYQDEFNQIWTAQSAYHSDLTDEDRDRLYHAIFDQRPLKSQKGLIGICELEPNKRRAPAACLEFQEFRILQRVNDLEVIQPDGECRALNPEERTKVLGELAEKGEVTFGRIRTLLKMRPSREYGRNYAFNLEEGGEKRLVGNRTAAKLVAILGDGWRELGPEKQRQLVNEILSFESEAPLIGRLESGWGFEPHVARAVAETPLEPGYAALSRKAMRTLLPLLAESVAYATARKEVYGDVRRDQEVLDTLPAKHECAVLRNLRNPAVARALSELRKVVNALVGRYGKPVEVHIELARDLKHSRDRRKRMADQNQENEKSRAAARRKILEEMGDERYCTDRNVLKVRLADECNWECPYTGKCISMEALVGDQPQFDVEHIIPFSRSLDNSFLNKTLCYHEENRKGKRGRTPFEAYGRTPQWEEILSRVRRFRTDARTRKRKLELFQVERLPDTEDFTARQLSDTRYMSRLAADYLGLLFGGQIDVEGHRRIHVSPGRVTAYLRQRWNLNAILGHPDDKERDDHRHHAIDALVVALAGPREVHLLSRAAEEAEELGETRLFPRDAFDPPWDAFLDQARQTVEAIHVSSRVSRKLSGKLHKETTLSKRIPVTDSKGRVTYVHHVRKKLDDPSFSTRDIAKIVDDRIRRIVAEHLDRNGGDLKKAFSDRNNHPCMRAKDARIIPVQIHRVRIRTSAKPIVIGKGTGTRYVVRAPHSNHHMEVVAIVDGDGNETHWEGCVVDRLQAMECKRNANQIIQRDHGKWKMFKFSLTRGEHVVMAHKGGNEGLYRVTGISEKEVEFVLHYDARPTKVRRKAGPRVRGGPDQLREWGARKVAVDPLGNILPAND

SEQ ID NO: 1886 - protein, 1062 aa, unidentified
  REGION 1..1062: note = Description of Unknown: Cas Enzyme sequence
MVQSAKPYILGIDLGVQSVGWAVIDLDVDGWPCGVRRAGVRCFDSGVGSETKISAGKDESGNTKRRQARLQRRQLWRRGRRLNKVFNLLRKAGLLPAGEARTPQQRHELLYELDAELAKTHIPDRDRVAGHLLPYSLRALALDQPLPPFAFGRALFHLAQRRGFLSNRKSVGKSDEEEGKVKAGIVELQQKIEQCGARTLGEYFAGLDPEQEPIRNRWTARQMYLEEFEEIWAAQAPHHPTLTDEWKQRIHQAVFHQRPLKSQRHRIGMCELEPDHRRAPRGCLENQRFRYIQKVNDLEIQTPDGEIWGLNEPAHADLRAKLIELLETHAEIAFKSMRSKLRLKKPKGSEADYLFNLEAGGEKKIKGNATNAKLLKVLGHEYGELSPDQLSAVVDDLIEYENRDALARRLTARYGISPEKAEDLADLTLEDGYASLSREAIQQLLPWMQEGMRFAAAKKQVYGEYRGGQKVYDSLPPVLEAVPQLRNPVVCRGLTELRRAANAIIREYGKPETVRVELARDLKRSRQQREDITKKNRQNEKARDEAREEIRAKTELGIAEPRRSDILKVLLANECNWGCPYTGKPICMGTLLGPHPQFDIEHIIPFSRSLDNSFMNKTLCDIPFNRDVKQNRTPHEAFSANEQQWHEMIARVKRFRGSAAYGKLRKFQQEQLDDDWATRQLQDTRYMSKLAAEYVGLLFGGQIDAHHTRRVQVSAGGVTAYLRDEWGLNAILNDGGDEKNREDHRHHAVDAVVIALTSPATVKALSDSAELARQRGHRLFTPIEKPWSTLLDDTRNAIEAVNISYRVNRRVSGALHDETYYSKAHQSRDASGKKEVEYRHFRKPLHKMSAQEVKNIVDDTIRGLVNAKLEQIGGEPKKVFADLGNHPYLATGDGRRIFIHKARVKKRLTVVRLGSADSPRYVAPGSNHHMEIYAVLDKVGNETRWEAKTVTLMEAAARVRAREKKPVVQRDHGPGTKFKFSLAGGEYLELDGDNGQRRLVRVTVISGKKVEYRLHNDARPITLLRQVEGGRAGLSLSADSLRKANARKVAIDPLGNVFPAND

SEQ ID NO: 1887 - protein, 1037 aa, unidentified
  REGION 1..1037: note = Description of Unknown: Cas Enzyme sequence
MVANADGGYVLGLDIGAASIGWALLDQNRSKPSRVVSCGVRVFDAGMDQGDFSSGKENSRSALRRQARQARRLLNRRARRQAKVLNLLIKAGLLPQGKASDTLPGLDKELLRKHSAAQPADSPDRKRLPHTLPYWLRARALETKLEPHELGRALYHLAQRRGFLSNRKAPPKKDEKPGEVKAHITELEKAMNGRTLGQYFASLDPMEERIRKRWTARKMFEDEFDRIWAAQAPHHSAILTDDFKKKFRKALFHQRPLKNQKHLIGGCEFEPGRFRAPKALLVAQQFRTLQQVTDARILSPQGERFLTADERDKLLEALERDDLTFGRAKKLLGLARGEKFNWESGGEERFLGNRTNAKLAEVFGERWWTFADAQRDQIVEDCLSIHKDEALARRGQKKWGLDNEASTRFGQIVLEDGYLSLSRRALAKLVPMLRDGLPYATAVDEAYPERKKAKKPIEFLPPPTQVYPHIRNPLVLRVLAELRKVVNAIIREHGKPAAIRVELARDLRKSAKQRQESWKRNRRNEKLRKAAAKKILDELGYQNPSRSDIEKILLAEECGWVCPYTGRSFNMKALLGQTPEFDVEHIIPFSRSLDDSFLNKTICEIRENRDVKGNRTPFEAYAGSPEKWKDILSRVKDFKGNAADEKLRRFQQETIEGIDDFTKRQLNDTRYASRQATDYLALLYGGLYELGGKRFVQASKGGITAYLRNQWQLNTILGDGGTKTRDDHRHHAVDAVAIALTEPATVKALSDTAVRAAQKGTRWWRERIEDPWQGFLDDVRQAIDSLVVSHRIARKVNGPMHKDTNYGPTDQDGKVRQRIPLKNLSAKDIEAIADERVRKAVADKLAQLGGTPDKAFADAANHPFLEARDGRRTPIHCVRLRRSLTAFAVGEGQCARWVTSESNHHAEIFETTDKKGSKKWVGRVVTRYKAMRRLARKEPIINMTPDGPGKWRFSLSSGELAELDGGDGKRKLFSIRTVSVSQNGYIRVAYAAANDARLKKDIIAAKEWQEVGLNTLARLNCRKVIVTPLGEVRYAND

SEQ ID NO: 1888 - protein, 1052 aa, unidentified
  REGION 1..1052: note = Description of Unknown: Cas Enzyme sequence
MPDRISGEYVLGLDIGASSVGWAVLGAHKGKPPNLIRLGARVFDAGMEEGDFAAGKENSRNAARRQARQARRLLSRRVRRQRKVFNLLVKAGLLPAGDPATVIPALDATLRATHTVPLAKHSPERRQAEHVLPYRLRAMALSQKLEPFEVGRAIYHLAQRRGFLSNRKSPPKKDEKPGEVKEHIHELEKKMQEAGAETLGQYLAGLDPEAERIRRRWTSRAMYLAEFAKIWAAQAMHHPTTLIQELGKRLHRAIFHQRPLKSQAGLIGTCEFEQGRRRAPWGLLLAQRFRLLQQVGNARIVTPQGASRDLAAGERDGLLSVLERQGDLTFAKARKLLNLPRGHGFNWESGGEERFIGNSTNAKLAEVFGERWWTFTDAQRDQIVEDALSIHKDEALARRGLRRWGLDAEAAAKFGQTALEDGYCGLSRQALAKLVPMLQDGVPYSTAVKEVYGDRHTEPLDALPPPAPTYPHIRNPMVLRVLAELRKVVNALVKEHGKPAAIRVELARDMRRSKKQRTEAWQKMRQNERDRKKAAARIAAEVGVQEPSRADVEKVLLAEESGWVCPYTGKCISMQSLLGASPEFDTEHIIPFSRCLDDSFLNKTLCEVKENRDQKRNRTPYQAYAGDPGKWQEILARVKRFKGSAAEAKLRRFQQEAIEDAGNFANRQLTDTRYATRQATDYLALLYGGLYEKDGRRFIQASKGGTTAYLRNEWQLNTILGDGGAKSRDDHRHHAVDAVAIALTDAGTVKMLSDAAARAAKEGRRRFGRVEEPWPRFLDDVRQAVEGMNVSHRISRKVNGPLHKDNSYGPSSERDAEGRPAFFTLRKPIESLSANDVKLIADDRVRGAVKARLDEFGGDAKKAFGDRNNHPLLESSRGRRIPIHCVRLRKAEAMIDVGQGPRQRYVVSGSNHHMEIFEVKDKNGKTQWKGRVVSRYEAMRRQATRRPVVDRAPRDCGQWVFSLASGEIIELDRGDGKRGLFRVRTVSQTQDGYIRVEYVNINESREKGVIKEQDKQAKERRCWMSSPLPVLAKMGCRKVIGTPLGEVRYAND

SEQ ID NO: 1889 - protein, 1054 aa, unidentified
  REGION 1..1054: note = Description of Unknown: Cas Enzyme sequence
MKDVGTSKPYVLGLDIGVQSIGWALIGLDDGDRPFALRRTGVRCFDSGVGSETQIQLGNDESTNAKRRQARQQRRQLFRRAQRQRRVFRILQRAGLLPGSSAAAVDRHELLQRLDAELATQFGVPGDRVADHVLPYRLRARALGEALPPFALGRAIYHLAQRRGFLSNKKAQGDDKEEGEVKQAISKLHAEIERTGARTVGEYFSRLDPEDTRIRKRWTHRQMFLDEFEKIWAAQAPHHPRMDDGLKQKLQRAMFFQRPLRSQKGMVGRCELEPDCRRAPLASLQAQRFRYLQKINDLEITTPDGEIRTVTAEQRAVLSAAFEEKGELTFAGIRRVLGLKKTKGDEHDYEFNLERGGEKKLFGNRTGEKLARALGDRWRNLSASEQETLVHEMLCFQHEDALARRLEKAWKFDPATAAAVAAVRLEPGYSAYSRRALEQLLPKLADGVRLNTIRKDLYGDRLAESKVWDLLPPVREAFGSLRNPVVCRALTELRKLVNAIVRHYGKPKMVRIELARDMKRSRRQREDATKEMRKNEKQRDAAKAKILAELGISDPSRSDVLKFLLAEECNWECPYTGKPITPRQLVGQSPQFDIEHILPFSRSLDDSFANKTLCYHEENRNVKQHRTPWEAYHGDVQRWHEILMRCRRFRGSMAGEKQRRFQMEELPEDFAERHLNDTRYASRLAAEYVGLLFGGQVDREGKRCVQVSAGRVTAFLRDEWALNAILSGGREKTRDDHRHHAVDALVIALTEPRSIKLLTRAALRAQELGRRLLVPLDPPWGEHESFLADVRSSIETVNVSYRVDRRVSGALHQETLYSPPHHAIDGKGKPAEYHHIRKPLVNMSADEVEEIVDQSVRAAVKAKLEQIGGEPKNIFAEPANHPYFRTKDGRLIPIHKARIRKKVSVIPVGDDRRRRYVAPGSNHHIEIVANLDAQGHEESWGGLLVSLYEATRRVDAGEPVVQRDHGPGKKFLFSLTGGEYVLMRQESGENHQLCRVVVITDGQVEFRLHTDARPSTVTKKSPGARIRVSPGAMKRRGARKVAVDPLGNILPAND

SEQ ID NO: 1890 - protein, 1047 aa, unidentified
  REGION 1..1047: note = Description of Unknown: Cas Enzyme sequence
MNDQEFPSYVLGLDIGSNSIGWALLEAEPVGTTGRLSPKTIKKAGVRIFEDQVNQGFETGREEPPGVKRRQARGQRRQTARRAGRLKHIFTILQNAGLLPPGQGSSPEDRHHFFLELDQFLNELNSRETSSSGPTLHLLPYLLRAKALDEKLAPDELGRAFYHLAQRRGFKSNRRAGPKEEKPGEVRKGINQLRQEMDETGARTLGEYFAGLDPEQQRIRGRWTARPMYEDEFERIWTAQSRHYPEILTAELKQDLQEALFFQRPLKSQRHLVGKCELEPGRPRAPLAILAAQRFRLLQQVNHTEVITPLGEVRPFSAEERAGLIDHLEINGDLDFKKAKKLLGLSKDHVFNFEEGSETKFLGNRTAAKLVKVFGAERWTGFSPEEKSRVIEDVLTIENETALARRGREFWGLNEEKAAEFSRIELEKGYARLSRRALQKLLPLLEQGLPYMTARNQVYGEAAPPEPLEKLPPLSGTLPELRNPVVARALTELRKVVNAIIREYGKPALVRVELARDLKKSRKQRKEITLRNRSNEASRQKAAQQIIKDVKEIQQPSRADIEKYLLAEECNWVCPFTGKSMSMADLFGPEPQFDVEHIIPFSRCLDNSFFNKTLCWHEENRNIKHNRTPYEAYGSNPQKWAEIIERVGRFDKKSSREKLRRFRLESLDEIQDFVSRQLNDTRYASRLARKYLGLLYGAEANRRVQVGTGQVTAYLRGVWDLNRILGGGVKTRDDHRHHAIDALATGLTDPGTIQMLSRAASGARREGRRLFAQTDPPWDAFLEDTRRTIQNLTVSHRVSRRLRGPLHEETHYSPPKTDNEGRTVRHVRKPLKKLTSEEVKNIVDDVVRAKVEARLMEVGEKDPRKVFNNKDNLPFLETRTGRRIPIRKVRIKKVESTFSVGRGPRERHVVSKDNHHLEIVETKDAKCRPVWEGHLVSLFEAARRRRAGEPVIKRDHGPDKRFLFSLAVGEIIEMDGDNGGRALYRIRSVWTEEDRGRVAFVRIADARTIGEIKKSGQWFKPMISKLRERNCRKVTVGPLGEVRWAND

SEQ ID NO: 1891 - protein, 1055 aa, unidentified
  REGION 1..1055: note = Description of Unknown: Cas Enzyme sequence
MEYVLGIDLGTASLGWAILELGGASGSEQPTHEIVRSGVRIFEAGVDGDIEQGRDSSRAAVRRQARQPRRQNWRTQDRKRKLFKLLQLARFLPQSTSDKAEDRKALFDNLDLNLGVVHLPSGDHAAHQQLPFFLRTRGLTQQLQPFELGRALYSLSQRRGFLSNRKSQTDDNEDGKVKSAISELGKVLNGRTIAQFFVEDVTPDNHDSDLRRVRQRYTARDMFREEFDRIHSAQEAFFPDVSETQWKQIKDAIFFQRPLKSQRHRIGKCEIDRKRKRCLEAMDAFQQFRIWQTVQNLRLVDASLLGRQAILSMDEQQTLANALQTVPILTWPKVHRLLGFPKGVRFSIQEWNTKGIDGHRTNAAMIKGFGERWLTKPVVDRDAITREVLFFRKETALKRRAIDAWSLNPEQAEAICGVRLEETHARHSERTLQRFVDGMQHGRSYSEIRAELTGRNDSEVLDLLPAITKTGLEITNTAVIRAMSELRKVVNELIREYGKPAQVRIEMARDLKNSRKRRVKLHNDNEDRRKRRERAVEGILASIPGLKHSGADVEKWLLAEECDWTCPYTGIRITPRSLLGSTPHFDVEHIYPRKYLDNSYANKTLCHHDFNRNRKKNLTAYDACHTLPEWTEILERVRRFQGPVAFAKLKRFQTPSDDIPDDFTSRHLNDTRYNAVIAKKYLECLYGGTSDLTGRQRVFAVTGGHTFELRRQWHLDSVLSENDEKTREDHRHHAIDAIVIALTDSNRVHALQRAAEFAKERESRRFYEAVQDPWVGFQNEVQSAVDDIRVSHRPTRTLSGALHAESIYSKGHKLSSGKSEHRIRKSISKLTATDLQKEKIVDPKIRQIIKAKLQELGESNASKAFADPANHPYITTNDGARRIPIHKVRIIADKKPRSIGKGARQRFVASGKDSNFASMIYAIVDENGNETKWEHKVITRFEAHERLNTNRKQDGERVLLPSPEDFADNKQRVFKFALCKNDMLLVLGKDGTNELYRVQSLGDSEIQLCPDHIPGLRGRDRTQWDRISSIDSLRKRKAKCVHLSPAGKYDQTALN

SEQ ID NO: 1892 - protein, 1051 aa, unidentified
  REGION 1..1051: note = Description of Unknown: Cas Enzyme sequence
MAKQSPYILGLDLGTTSIGWAMVKLTRSQKRVPEKILKAGVRIFEAGVEGDIEQGKDSSKATKRREARQPRRQNWRTQDRKRKLFLLLQELNLLPPSESAKSIHRMQTLDNLDKELRSKHIPAGDHEAQQKLTYFLRDLAATDQLEPYEIGRAIYALAARRGYLSNRKSQGDDDEKAGVVKASIGELQTEITEMGEGTTLAQYFNRKVNPVSAGGKRIRRRYTHRNMFRDEFDAIQKAQANHLPLSVEDWDRIKGQIFFQRPLKSQKALIGECKLEIGEKRCPECLPIFQQFRILQKVNDLQVMMPDQSKISIKEIQGAREKLIDALQTKARLTANQAAKAADLPKKAKFSLEEHEGLDLIGHRTNVKMIEVFGDRWLELSATERDSITLEVLHYRNGNALVKRAQSAWKVDAEGAARLKNMRLEEEYARHSKKALEKLVAAMQSGTQYSTARQELYPESFEGGEVFEKLPPISEWDNDLGNPAVMRAMTELRKVVNSLVSQYGKPVRIHIEVARDIKNSRKRRKEIHQQNQKNKKARERAAALILSECGIENATRRDIQKWQLADECDWTCPYCGKGFGGNDLVGSNSEFNIEHIYPRKYLDDSYVNKTISCRSCNDHKGDFTPKQAFSGEQYEEILQRVKHFKGSLRDAKLKRFETEQPDEDFVARHLNDTRYNARVAASYLGSLYGGYYDDEGQRIVTPTGGLTWMLRTGWQLNDVLSDSVDVKDRDDHRHHAIDAIIVALSDQSRIQKVAVAASRAQEYEQRKFLDAVEYPWPMFKNDVSFAIQAINVSHRPTRSIAGPLHAESIYSKEHIVGGEPQIRIRKELRKLSVKEIMSDQIVDPAIRKLVQEKFQELGSKNPAQAFAEEENFPKLKNKNGDDIPIRKVRLKMNVTPRSVGKGEKQRNVASGKDSNFASMVYAILDKDGNETKWVHEIITRLEAAERYSGNLKKVDSRGNEKVLISDEQDGKRRFKFALRKNDMLFVDGEDGEPVLYRVQKMSKAEIQLCPHNHGTITNPERTPWNRITSTDKLRQRNATLANVSVVGEIGK

SEQ ID NO: 1893 - protein, 1016 aa, unidentified
  REGION 1..1016: note = Description of Unknown: Cas Enzyme sequence
MSKSVSTILGLDIGLASVGWSLIETHADIPTKIIQAGVRVFPMGMELDDRGKGTSRSVERREARLRRRQLDRRAMRKAHIRKLLFVNNLAPDRKADAQAWRAFEGLQPYELRAKGLDQPLTTHEFGRVIYHMAQRRGFLSNRKAPEREDDKPGEVKQATQALETEMKAAGCRTLGEFFSKLDPHQQRIRKNYTLRRWYIEEFDALWAVQTKAAPDRFHEALGKQLRQALFYQRPLKIKEGSVGTCELEAGKKRSRIALLDAQRFRLLQQVNNLRLETGPGKERALTPEERAKIMEMLATKASVKFGTIRKALKIRGDFNLERGGSEALVGDATTAIITAKIGSAWDDLDRAERDQFVNDMLSIDHAEVLKRRLMTRWALDEAAADALSEVALEDGHSALSMAAISKLLPHMEAGDPYMTAVMKAYPDNANWKPADEVPPFPNLRNPLVQRSLAETRRVVNAIVQRHGKPGRIRVELARDLKKAAKERESEWSRMRVREKERAEAREALQRLKEYHIANPKASDIEKWLLFKECGGMCPYTGKAITHAGLFGEHPQFDVEHIIPFSRSLDDSFGNKTLCCVDYNRNTKKNKTPYETSGGTPQWEEIIARVKKFNGVYAEAKLRRFVLENVAEGGAFLENFSQRDLAITRYATKAAYQALSRLYAPGEAKSRVEATQGVATSYLRRAWRLNNVLGLANEKTRDDHRQHAIDATVVALTNRSTVKALADAAVMGRAGAFTPIPEPWEGFKEDLASTIQGIVTSHRVSKKTNGPLHKETYYGIITDPSDLKTNRAVVRKDVASLSDKDVAGEVIVDPAVRDAVRARLSELGESDPRKAFKDRAQHPYLTAKDGRKIPIHKVRAFQKCDPLALETAPGSRHVVLGNNHHVEFFLVNDSKGNPTLKSAVISQLDVRRLVAKARKENVAPVIVRKADEEGNPLAFSLAIGEVVVLDDEGTLNKFVVQKLSSRDYVFKSLNDARIFKDVPKSELVRITSDSGLMQKFKGKLICDPLGHTYRTRD

SEQ ID NO: 1894 - protein, 1016 aa, unidentified
  REGION 1..1016: note = Description of Unknown: Cas Enzyme sequence
MKSDTSKTLGLDIGLASVGWSLIESHHGIPSKIIQAGVRVFPMGMELDDKGKGTSRSVDRREVRLRRRQLDRRAMRKAHVRSLLFKNNLAPDRKTDTEGWRQFESYNPYELRARGLDQPLLPHEFGRVLFHLAQRRGFLSNRKAPIKKDEKPGALKKATDSLSADMQTAQCRTLGEFFFKLDPHQRRIRGNYTLRRWYIEEFGLLWEKQASFDPEKFNPALRKKLCDAIFDQRPLRVKEGTVGKCDLEHGKRRCRVAHLEAQRFRLLQQINNLKIEEEIGKERFLTKEERSKLINELVAMEKLKFTTARKVLKIKNKFNLERGGAETLIGDVTSARIRAHIGITWDELDCFEREQFVNDMQSIESPEVLKRRLMQRWQVDESAAELLSEVPLEDGHLAHSLAAIRKMLPFMEDGAPYTTALMQAYPDKAQWKAADEVPKFPNLRNPLVQRALAETRRVVNALVKQHGKPDLIRVELARDLKKAAKERESEWTRMRAREKERSNARENIQRLKEYNIANPRASDIEKWLLFQECGGICPYTGKAISHAALFGDHPQFDVEHIIPFSRSLDDSFANKTLCHVDYNRNFKKNKTPFESSGGTEAWKEIIKRVDMFTGGYKDTKLKRFVMENVADEDGFLDEFSQRDLAVTRYATKAAYNALSRLYDPAVAKSRVQATQGKATSYLRRAWRLNDILGLANEKTREDHRQHAIDATVVALTTSSTIKSLADSAVIGRAGAFDPIPHPWEGFKEDLQSIIESITTSHRVDKRTNGPLHKETYYGIITDPSDLKTNRAVVRKEVASLSEKDVAGENIVDPAIREAVRTRLKEIGMSDPTKAFKERDQHPYMVANNGRKIPIHKVRIYQSCDPVSIEATPGNRNVVLGNNHHVEFFHATDKNGNPTLRSIVVSQLDTLRRVAQARREGKPAQIVRQRDEYDNKLAFSLAIGEMVEIDWKGRKVRCVVQKLSEMYYVFRPTNDARKVKSIPSEEVIRLRSDSALYNSNLQKLICDPIGQTYRTRD

SEQ ID NO: 1895 - protein, 1058 aa, unidentified
  REGION 1..1058: note = Description of Unknown: Cas Enzyme sequence
VDGNGSGLVLGLDLGAASIGWAILRNGESGDPGALVGAGSHCFDAGVEGSIEDAKDESRAKVRREKRMPRRQHWRRARRKRKVVHILQRASLLPAGPTTPSEALHDLIVELDRELREKYLRPGDPREAHLLPYLLRKRALDEKLEPFALGRAFHNLGERRGFLSNRKTQNTDEDPGQVKAAISELAQEIEEVGARTLGEYFASIDPTSTKLRRRWTARQMFIDEFNAIWDAQAPHHDAMTPELRDELYHALFDQRPLKPQTHLIGRCSLMPGRRRAPIALRVAQRFRILQAVNNLKITFPDGETRFLEEDERHKVYAALATRVKLLDKNGRLTFTKMRSKAVLGLRKGVTFNLQEGGESGLVGNRTDAKLAPIFGDRWSELSECDRDQVVEDLLTIEDTEAMERRASGRWGLDEEAAGKLADLRLEDGHANHCRLALGALVTRMEQGVPYATARLEIFPESFEAKEALEALPPVRDFEKDLRNPAVCRALTELRRVVNAIIRRHGKPAKIHIELARDLKQPRKERERRSKKNRANEKLRQAAAERIVTEQKGVRPNAGAIEKVLLAEECGWVCPFTGRRICMNTLLGPTPQFDIEHILPLSRSLDNTFVNKTLCYHEENRAVKGNRTPHEAYATSPDRWAEILERVSHFKSDLAREKLRRFKMEEIPEGFTDRLLQDTRYMSRLAADYVALLYGGRSDASGRLRVQVSPGGVTYHLRRAWQTNAILGGPEKNRGDHRHHAIDAVMIALTTAGVVKQLGDAARKTTPRKYPFSSLPDPWPGFNDELKRVIDEIIVSFRPDRRIAGPLHAETIYSKPIRTRDGQKVTHVRKQLHNLTSSDIKNIVDPVIQGIVAKKLAELGGTPDKAFALADSHPTMITGDGREVPIHRVRVRVNERPRRVGRGSGARLVTSKGGTNHHVVIVAELDDKTDPNTGEPLERRWVDKVVSRLGAYRRLAARKRAGRPDQVVRRDWGDKRRFKFSLTPGEFVEMEDEAGQLGIYRLYGISKGDMEFRLHNDARLKKDITAAGDRVRCTPEKLRRRKARKVRVTHLGDIVPAND

SEQ ID NO: 1896 - protein, 1054 aa, unidentified
  REGION 1..1054: note = Description of Unknown: Cas Enzyme sequence
VADSEDVKYVLGLDIGSNSIGWALLRFDRNEKPLGIERCGARIFEAGIDGKIAEGDTESRAAKRRVPRGARRLYERRARRNRRLARSLQHAGFWPAERINDGNDLHRFLQQLDRKLISRAFSIADDPKLYHTLPYWLRAKGLSERLELDELGRAIYSLAQKRGFKSNRKNEGEIRDGATSERIGKTREEMTSRGLETLGQLAAARDVPFERIRGGIPNKDPLAERKQVEEEFNRIWKKQAEHHAALSEELRKKLFKIVFHQRPVWWRKTQIGRCEHKPTKRRAPKAILKAQRFRYLQSLNNVAIGRSKRPLTSQERATLVHELERCEELTFDELRTLLPSIPSSASINLEEGDVHKSLIGNKTAARLRRVFGETWERFSEDEQERIVDDVRSFENRDALKSKGMKKWGLSEEQAEKLAKKVELETGYFHLSSAAISELLPFLEKGKMYGEIERKKNIPKEEELSSFHRVFPDVKNPVVARCMAELRSIVNELLREIKRPPYKIRIELARDVLVSQYKKKDRQEQAKQNRIENAKAKKEIAQWREIAPEQVGRWDIVKWKLYKECCPTCPYTGETINEKKLFGPDVQVEHIIPRRYIWDNSFANLTLCMASENATKGRRTPFEAYGSQGNRYDDILNRVGQFKRGPLAAEKLRRFKMNDQELRDFLAEFTTRQLNDTRYAARIATEYLARLYGGRSENGKLRIEVTRGKYTSDLRQAWRLKEQIPALFGSDDKRSDHRHHAIDAIVVALTDTDTSQKLQKWGLAGENAGTHKWWKFAEPPWPTFVADVLREIDAVSVSHMPKRKVNGALHEGTYYSLRDFVDDKGKERGRVRKALKDMSLGQVKQIADPLIRSVVLNRLKELGSDEPKRAFSNEENLPILAHADKEVRVRRAAIHVKEALTRISIGTFRERRVISGSNHHVEILGVPGGDPKDMSQDKKWVARNDSPVTTLESQRRLKTGRPVVDRRDEGKKIFRCSLSRGDTIELDNPKGGRGLYVVTTLAIVRVGGRSYVNVYYAAVNDANRVESTSLVNQLGELNCRKIAVTPAGEKRSAND

SEQ ID NO: 1897 - protein, 1068 aa, unidentified
  REGION 1..1068: note = Description of Unknown: Cas Enzyme sequence
MENEKHYPGEVAYRVGLDLGSASIGWSVVQFAWDGEDWQPNGIEGLGVRIFTAGTEGNVEKGQDESRAVARRMARGARRTLARRAGRMHDLFLALVKSGLLPMPVDLNKGALAPIIDQTIKDLDRELVQQGGDSALLPYYLRTKALDHQLSPHELGRALYHLGQRRGFKSNKRADAKTASDERGKVKDGIKQEQLAMEGANVRTRGELLSRENPETKRIRGRYHARDMVEHEFNAIWTAQKAYHQDLLTEELREVIHECIFYQRPLKPVDHLVGYCSLEPGRWIQVKRNKRRDGRMLDTPRTVSIFKAPRRLALADPLAQRIRLLQRLNDLKIDHADGKTSSLNSEQRTLLLENLQNGDISFKEIRKLLGLAKQEKLNLENVSKNMIGDRTAEKMRAVLGTRWDSFTDIEKTKLVYLVLKAINISELVTTLETQWNMKPEIATSVADVDLEDGYLNFSRTACEKLRPGLEAGMSLNTIREEIYGASKPKDAIDELPIVAEAFPDLKNPVVSRVLTELRKVVKAIIKEWGLPQSFTLELTRDLKKSREARKEITKNIGERTKEREKARKALIDAGLVVNPKARDIEKYLLWAECGGPKAVCPYTGRPITLSELFAGASPWDIEHIIPYSRSLDDSFANKTLCWAEFNRTIKHNKLPMELGSEMMEGFIARIKQWPSASKEVKLRRFRKTEIDGDFITSQLNDTAYATRLAGDFLAMLYGGRYDSEQMRIKATKGQATAKLRGQWGMNKLLGGHEKNRGDHRHHAVDALVIALSTPSALKRLANASKNSYDIYRLTFDDIPMPWPNFFVDAGQALENIVISRQLKGKLSGRLHEETNYGLDKNDEAIKTARVGVESLTKKDLEKQYEKDGVGVVNPVIHSRILAQLESLGVDDPAKAFKDPNNHPFFVTKDGRQIPIHKVKLAFKATTMPVGQKYRTRHVISDSNHHMAVYETVDAKGNTKWTYEIVSLLEATRRHARGEPVVNKKPGFVMTLRAGDTIMYEKEGKLINAWVRSVAADGEVGLAVHTDAREKTEQIKDKTFLRFKINPLGKMNLRKTQIDPLGNLRICRD

SEQ ID NO: 1898 - protein, 1366 aa, unidentified
  REGION 1..1366: note = Description of Unknown: Cas Enzyme sequence
MKRILGLDLGTNSIGWALIEKDDKQGKILGMGSRIIPMGVDKTNFESGNAYTKNADRRQARSIRRLNHRFKLRRNKLLYVLNEIDMLPEFIKFSKPFPDPIHLQELDILPISNRSRQLTAIELYELRKKALYEKISLEELGRLFMLFNQLRGYAGGEEENEKDADKTENDEEKDKSYEVIVASAKIQQIEKTNKIERGKDVFELTIQSEDGTEYKGTSVVSSFRKDEETEIEIRINRSKKGEQNIKFALPYKSNWRKEMESLEHELSIAKNSEGEPMKLGEFIYNKLMCGEWQKVRKRVILRSRYVSEFDAIWKEQCKYHELLDKIPKEKLETIAYYLFPGKKESQEKYRKEAVEGGLFHIIRNQIIYYQRPLKSQEELVGKCRYEPDEKVLAKSHPLFQQFIIWQKINDLSINSITEISGKKQYAQRLLNPKERADLFQDLQIQKEISFSSLFKRLNLKANTDFLNGIVFKKGKLQGNETLIIFRKILSDDLFSRIKLNEFVNLVSLWEILYKKQGNEYDLKSERNQAIIEYLGKVGVTLDEKDIVKISKIRFKRDYGSISAKAISKLMVLMQTFEGYDLSVLDDAIVKSKIEHIETGEEDERIEKSLREYYLTFPEVFRSGGMQYAFAAMLLYGVHTAKCVEVENAKKDYHEIKLLEHGSLRNPIVEQIVNETLQQIKWIWKEFGFKPDEIRVELARDLKNNAEQRKKMSDANEKAAKVNGAIITELLRMELPVTSTNILKFKLWEQQKKCCPYSGQPIPLNNSNGLFSGHYDIDHILPLSRYFDDSITNKVLTRREINIDKGNRTAWEYITSSSIISEKLSEEAYIQNITNNFFGRKRTNLLLKKIPEDFIERQKKDTQYISIKVKELLAEIVGTNNVFTSTGIVTDYLRQHWGLTEMFKEITKDRFAFLGSTLGENWVERKFDEERNKHILKIKNWSKRYDHRHHALDALVVACTTPTHIHNLNNLNKKLQTWLQEARHEVFKNVNLSSDEILFAYFNLPAEKREKIQEQIEGFRKFDSPWDGFQEQTKNELLSTVASIKRKPKLLIQKNQKTGQEFLKIRGALHKETIYGTSANKYTFKVPISKISSMAKALDNIVDKELQGDLMNHIRNYESKKEAFSPDGIKEFNRNRKIKVNSVKIRFSKDAQKDDEGLLQRIERKNAHNKSLYVSTRDNFCFAVLIKDESRMYDILSFYDTVNIVNTDLMNGQKNIDQSVRRYFLEIHKEAQLLFTLSHNEVVYLPQTEELPIPLHQTDSCYDEFWNNRAERNKRLFIVVKFSGKLCYFVPVNMAKEISFTPLENKFSENVQLLEKGKTQKIFEFGSYKDSTPFYTEYTNGIRKQIKIQEHCIKVRIDRLGKIIPVL

SEQ ID NO: 1899 - protein, 1521 aa, unidentified
  REGION 1..1521: note = Description of Unknown: Cas Enzyme sequence
MTKILGLDLGTNSIGWALIDQNFPERQGEILGLGSRIIPMDQGTLGEFDRGNSVSQTKERTGFRGVRRLRERHLLRRERLHSVLNIMGFLPEHYARQIDFETHFGQFINDSEPNLVYKPNEQNGRPEFIFKDSFNEMLTDFKNQYPDLLEKNKKVPYDWTIYYLRKKALAHRIEKQELAWLLLHFNQKRGYFLLRGEDEEDSVNQSVEFHALKVIDVVDDGDRKGKADIWYSIILENGWIYRRKSKVLLDWIGKTKEFVVTTEFNEDGSIKKDKDGNEKRSIRAPQPNDWTLVKKKTEFEIEKSKKTVGCYIYDTLLKQPSQKIKGKLVRTIERQFYKTELRIILEKQMEFHPELQDRQIYSKCIRELYKSNDCHRHSLEGKDFVHLFLNDIIFYQRPLKSKKSLIADCRYEIRTFKNKDGSLGSEPVKCIAKSHPLYQEFRLWQFLQNLKIYRINAEVDGKIIPELDVTSAFLKTEDDWVALFDWLNDKKEIKQETFLKYPPFKLKKNLGNYRWNYVEDKIYPSNETRALMLSRLNKCDHVSEEFFTREVEERLWHILYSVEGTVEIKQALKTFAAKNGLGEEFVENFINFPRLKKDYGAYSAKAIKKLIPLMRRGKYWNEREVNEVVRKRIHDITERLSSIGNDKTRISEITDDDIPKQVLKSFVACKNPLQALNTYQACYAVYGRHSEEGEIVRWKNPSEVDHYLKTVFRQNSLRNPIVEQVIAETLRVVRDIWNHFGNGRENFFDEIHVEMGREMKNPADKRKQITEQNSANENTNLRIKALLSEMSLDPDIENVRPYSPAQQEILKIYEDGVLKSGLELPEDIIKISKNAMPSISELNRYKLWLEQKYRSPYTGEIISLGKLFTPAYEIEHIIPQSRYFDDSLNNKVICEAEVNKDKDNCTGFEYIRDNSGKILQLGMGKTVRIFTLEAYQDYVKFHFSSNRGKMKRLLMDGIPEGFIARQLNDTRYISKVVKNLLSNIVREENELETTSKNVAASNGSITSELKKAWGMNGVWNELISPRFMRLNQLTNSNQFGEWITRDSKNFFQNRVPFELQKGFNKKRIDHRHHAMDALVIACATRNHINYLNNESAGTTKRYDLRSALCFKDKAEGNGNYRWTFYKPWDSFTVDAKNKLEAVIVSFKQNNRVINKTVNRYQKWKRDEDGKLRKVFVTQEKGDHWAIRKPMHKDTVAGAVTLRFKKKVPLTNAIDQVEMVVDIPLKRQIKDLLRQGYDKKAILKYFKSTMNKFQDRDLSRVEMYFFDHENVASRVSIDESFNSTAIRNITDTGIQKILLNHLSKYNEKMGDSLIEHPELAFSPDGLDDLTKTLSFLNNGKEHKPIFKVRCYEPKGNKFNVGCAGNKKSKFVEAAKGTNLFFAIYQDSEGKRSFASIPLNVVIERQKQGLSSIPETNGLSNNLILYLCPNDLVYIPTEVERENNNLVDFNNLTKDQRLRIYKMVSSSGSQCFFVTSEVATPIWNKFEYSALNKMERSTEGIMIKDVCWKLRFDRLGHIINEDK

SEQ ID NO: 1900 - protein, 1082 aa, unidentified
  REGION 1..1082: note = Description of Unknown: Cas Enzyme sequence
MTSQTEGEYALAIDLGASSIGWVVMESMPDAVFGAQSRFRNAGVRIFEAGVEGQLESGKDESRGKKRREARSARRRLDRVSRRLGDLFRMLQRHSLLPQFPPEELRHAGDDAAPELSRRFARAGARDRLIAALDVQLVRKWQERLRAEGKTEAEMRSLPRKFFYVLRAKALDEKLDLHEVGRAIYHLAQRRGFLSNRLARGKDEKDEKEMGKVKERIGHLRKMMEEQGSRTLGEYLAGLDPDEERIRKRWTSRQMYQHEFDTIWAAQQAFYPDILTDELKAKISKRIFFQRPLRSQKHLIGECELEHGQKRAPMAIMAAQRFRMLQQVNHTRVITKDGEVRWFTPEERQALLNVLDVDGDLKFTKAKKLKALSNIDSFNFEEGGEEKFLGNRTAAKIAPVFGVRWNEFTDAEKDEIVNDLRSFEKEEPLVKRAKDHWKLSEEQARKFAGIKLEDMYCRLSRRALRKLLPLMEQGMAYMTAVTEVYGPKQAAEAMDSLPRIEQAMPELRNPVVFRALTELRKVVNGIVRQYGKPEVIRVELSRDLKRSRPERVAAWKKNRAIEKDRDNAAARITSEAGVQNPTRADEQKVLLAEECDWACPYTGKSITIQGLFGPEPQFDVEHIIPFSRCLDDSFMNKTLCDIEENRNVKRNRSPWEAYGSNPEKWEQIMQRVKRFRGDGRLPKLERFALREEELEKILEDFATRQLNDTRYASRLAVKYLELLYGPEAQKRKIVQVGRGQITAYLRSELGLNAILGDGDRKSRDDHRHHAVDAIAIVLTDPATVKMMSDAAAGAMSARRRRFAPIPPPWERFLNDAHLAIEAINVSHRVSRKVNGPLHEETFYAPIRSCGDGSEIGCYHKRKPLSSLSEGEVENIVDPVVRATVKAKLEQTGKKAPKDAFADETNLPCLQAKDGRRIPIRKVRVKTSVNAFSIGKGPGQRHVVTDTNHHMEIIETKDKKGNVKWEGRVVSRYEAMRRLRAHEPIVKRDHGPEKRFVFSLACGEMFEIENEELAVRDRFVVRGISQYAAGQCVISHVRPEDARKVPDMRKTGDYRRITPNELRKADCRKVTMTPLGEVRNAKD

SEQ ID NO: 1901 - protein, 1038 aa, unidentified
  REGION 1..1038: note = Description of Unknown: Cas Enzyme sequence
MVTSDGQLPYVLGLDIGTHSVGWAVVGLDDGRPVGLRRTGVRIFEPGVEEVQYQRGRAEPPGQKRRQARSTRRLTARRGRRMEKLLHILQGAGLLPEGEPDNILPVLDDQILDRYRAEAAPHSESADDESGPLSQVLHYWLRARALDEPLRPYELGRAIYQLAQRRGYQRNRRVPGADDEGGKVGEGISELRQSMQEADARTLGDYFAGLDPHDSRIRGRWTSRQMYEEEFGAIWDAQQAHHPNVLTEDLKDQVHEAIFYQRPLKRQSYLIGTCALEGDRKRAPWGLLDAQRYRILQKVNDTKVSDPNGIERCLTEEERATLYEALQRKAKLTFAQARKTLGLTPQHTLNWESGGEKSLPGNTTNARLAKVFGDRWWEMSRLDREQVVEDLVTFEKRDALARRGRRHWGLDEERAEQFADLHLQPGYCRLSRKALANLLPYMLGGMQYQTAVEQCYPDHFQPSEPLDSLPPLCETDLDVTNPVVRRALTELRKVVNAVVRRYGKPERVRVELARDLRRGAHARELASKRRDRNRAAREKAAQKVTSEMNIQDPSRMDVEKVLLAEECNWECPYTGQSFGMHDLLGPSPGFEVEHIIPFSRSLDNSYLNKTICEVHENRSRKGNRTPWEAYGQTDRWDAIIERVKCFHGDAARLKLKRFQEREAASLDELAQRELQDTRYASRLAMQYVGLLYGGYWDEEGSRRVEAVRGGTTAYLRDMWNLNALLGDGDLKTRDDHRHHAVDAVVIALTSPQSVKDISRKADEVRRSGRVSFVGAQQPWAGFLAEVADAIYSVNVSHRPDRRVNGPLHDETFYAPGPETDEDGRPTYFHQRKPVHGLTGATVKNIVDTTIRAVVQHKLEELGGTPEQAFKDPANHPSWTAGDGRDVPIHNVTIRTNVSAVPIGDGDARRLVKPGSNHHMEIVQTEGGRWDGRLISRLEAMERLRQGQLVVRRGQRFLFSLSTGDMLELDNEDSDGRRLCVVRSISQGKVEFVPAEDARRKGEIQADGCWTTRSPNRLRQLNAQKVIVTPFGEVRYAND

SEQ ID NO: 1902 - protein, 1045 aa, unidentified
  REGION 1..1045: note = Description of Unknown: Cas Enzyme sequence
MAAKSGAGLILGLDLGVGSVGWALMKTKNGVPCSCLALGSRVFEAAAEGNLAAGKDESPNVIRRMARMLRRQTERRARRRIKLANVLQKGGLLPDGPLDTLEARHRFFVNLDARIRKQYKEEAPAEFVHTFPYWLRARALDAKLEPGELGRALYHLGQRRGFLSNRKAAAKEDEEKGKVKPAIEDLKCDIKSSGSRTLGEFLSRTNPADPTGRRIRERWTSRQMYKDEFNAIWDSQRKFHPDLLTDELRNRVFQAIFFQRPLKIQKHLIGLCQFEYKGRKPRRRAPFALLAAQRFRVLQKVNDLRIVAPDFSERELRSDERGRLLEQLESHEELKFDRIRRILKLDPQSKFNLERGGEKRLVGNRTNAKLRKIFGKSWESFTGETREKIVNEIRSYSSEKALAERGMRHYGLNEELARKFGAVKLDAGYCSLSRQALEKMLPVMEEGTRYATAVKEVYGDEASAAVVSFLPSLRGAVAQQLVPEVRNPVVSRVLTEMRKVVNGVIRKYGKPDLIRVELARDLKKSREERKRIWKRNRERGKRRTGAAEQIIQEIGDGQPSRKDIELVLLYEECGGECPYTGKHISLTNLLSGESRFDVEHIIPFSRCLDDSFLNKTLCLHEENRSVKRNKIPWEAYGDSEERWDEIVERVKRFKGDARTAKLRRFLTKDLADLDGQCSRMLNDTRYSSRLAGQYLGLLFGSKHREHIQVSSGMVTAYLRDIWNLNKILGDGGLKNREDHRHHAIDAVVIALTGPRVVKELSRAASRVPIEKRRKLGDVALPWDGFLQDLQGLVDEMLVSHRVSRKVNGRLHEDTFYSRKPDADERKGCVHVRKRLDLLSPEDVKNIVDPMVAEAVLRKLEETTGDPKKTFASKDNHPSLRSKSGKTVPIHKVRIAKRQQTFQVGNCGRERHVTNDGNHHMEVLAVVDAKGKTKWEALMVSQFDAMTRHKNGESIVNRNHGNGKSFVFSISSGELFVLEEEGMDHLYVARTISNGNVEYAGVNDSRKKDDIKRSGDWKKKSVDKLRQLNCRKVLVTPLGEVRWAND

SEQ ID NO: 1903 - protein, 1159 aa, unidentified
  REGION 1..1159: note = Description of Unknown: Cas Enzyme sequence
LTQNYSMNTFESSKFFKYYFMKKRLGLDIGTNSIGWALVEDEKRILGSGVRIFPEGVVNLGEGEKEISRNSERRQFRGLRKQNFRRKLRKKILLKELSKAGLCPISPNELQGFFRANKFPDSPEMREWFRLNPYLLRAKALKEQLQAEELGRLLYHMAQRRGFQSNSRSARDDKEESVLFTGNQEEGKTGINETQSLIGNSTLGSYLATIYPPDGESYSAGRPRIRNRYTTRAMYQMEFNAIWSAQSKLNPLLSEEMRIRFGGTRKQNDPQDGILFFQRPLRSQKYLIGKCTFEPKKPRCPVSAIPFQYFRLYQFLNTIECNGERLSREEVDTAVDYLTASKTDKKIKDLRKLWKKKDEYYRFNYLEDDKVKNAQTLASLSGLSFNNRTWQELSQKEQEDIWHVLFSFEDKDSLEDYGRKKWKCSEKDLQAVLKIRLEEGYASLSRKAINNILPFLKDGHQYDIAVCLGGIRNAFGNTWDSLSPENKDFIITNVPEIVRSGIKGGYLDELKAFLVREFGFTEKQLNKLYHHSESIRAGEWVEKLPYGPAADRIIQKLRNPVVSTALFELRKVVNALIEKFGKIDEISVELARDLRNPRQKRWQIRMEQNRLERYNEEVKKRLNEHGKVPSVENMLRYKLWEECQHTCPYTGREISITQLFSGEVQIEHIFPWSNSLDDSWLNLTLCFADENRLKGERTPYQHFIRSGKATWEDVKKRVITQFYDTKEFPNRYRKFKRFTAEKFDEEGFIARQLNDTRYISKEATNYLSQVAEKVSVAPGNMTAILRGKWGLNTILSDTDAKDRKDHRHHAIDALVMATYKLAHLQELQKWNKYNRAAELRNFPMPWDSFRQDAELSILSILVSHKADRKVLTQRKFRFKKGKNEFQNTGISARGQLHMDTVYGKRKAPGQSEAYHVRKSLKGLSEAAFPKIVDSRVRALVYDRLRQRGIPIDQKSGKPKPETKEQKEAFKAAFDIPVLLPNRNGDPVPVHKVRISENLGNAANQNAGINRYVNPRNNHHVLIYQNDNGEMDEEVVTFWEAVERRRQGAPVISQQISGINRIALLTSNAPFLIGIDRDELKANIDNLAYLSKHIFRLQKFSSKDYNFRLHTESTITRDEAQYFCRFKSIKAFLEANVLPLRINTIGEIVGYAKAVLQANS

SEQ ID NO: 1904 - protein, 1044 aa, unidentified
  REGION 1..1044: note = Description of Unknown: Cas Enzyme sequence
MNERILGLDLGANSIGWALMDYRDGEATGIVQAGARVFEAGVEGDLESGQEESRGKARRDARQVRKQAERRARRHTKLAHVLQQAKLLPKGDLESGSTRHAFFLALDKKLRAAMGDGQSSDVPSDIAMPHVFPYWMRARALDAKLEPYAFGRALYHLGQRRGFLSNRKVPEKADEKSVVKQGIGELERLIEEAGARTLGEYFAQLDPSHPDAPRIRQRWTGRQMYLDEFDAMWSAQAKHRPKLLTDELREKVHGAIFYQRKLKAQKHLIGKCELEWQRGRRRAPMAILPAQRFRLLQKVNDLLIRAPDYTERPLTPDERAKLLDALERQAEMTFSKVRKLLGLPRQGYRFNFEAGDEKKLVGNRTAAKLRKIFGDDWDAFSDDEQTQVVEDVLTFEREDALERRGRNHYGLDEEAAEKLGQLELEPGYSSLSRQALAKILPFMEQGDHYINARDKAYQEDLDHFTELVPEFLPPVSDAPLPDMRNPAVARALSELYKVVNAVIQKHGKPDKIRIELARDLKRNRKQRKRMSKRNRQNQKDREKASKKIQTETGIQNPRRDDVLRVLLAEECNWECPYSGKHISMGSLLGEASQFDIEHIVPFSRCLDDSFLNKTLCYHELNRAEKRNRTPFEVWGDNPDAFNEVIERVKRFKGEAADAKLRRFKMEAIEGIDDFSSRQLNDTRYASTLAAKYVSVLYGRDWRKHIQVSAGQTTAQLRNAWRLNSILSDGGTKSRDDHRHHAVDAIAIALTDRKMVKSVSDAAQKAEHHGKLRWWTTVPMPWDNFVVDAQAAIDAITVSHRVSRKVNGPLHEETNYSPTRYDENGKPYVHVRKPVDALSPREVEAIVDPKVREAVQETLDELAGPPNKVFATAATHPILDSGIPIHRVRIKKVVTTFDVGKGERTRHVVSKSNHHMEILEVIDKKGRPKWVGIIVSQYEAMRRLHKKQPIVQRDHGPGKRFVFSLAPGDAIEIDSQRDHREIRIVRSVWKETSARFALAPIKDARKKADIIKSKDWSQPTVGRLAQIHAQKVTVTPLGEVRRAND

SEQ ID NO: 1905 - protein, 1050 aa, unidentified
  REGION 1..1050: note = Description of Unknown: Cas Enzyme sequence
MAAKTGEQTILGLDLGANSVGWALIRTSNGEPEQCLAMGVRIFDAAVGGTLLDLQAGKEQSPNVKRRNARMLRRQTERRARRRIKVAHLLQEARLLPSGDLDTLAQRHEFFLSLDRAICARHMAEAPTQFLHTFPYWLRARALDIALAPDELGRALYHLAQRRGFLSNRKSTAKEDEDSGTVKPAIEELASQMAESGARTLGEFLSRIDPADPHQRRIRERWTSRQMYKEEFNAIWQAQQPFHPELLTTDIRNRLFQAVFFQRPLRIQKHLIGMCQFEFRGYYPRRRAPLALLAAQRFRLLQKVNDLCVVAPDFSERPLTAAERELLLDKLETHDEYKFDQIRRLFKLSKDYTFNFERGGEKRLFGNRTAARLAKIFGEQWCRFSPEQRDAIVDEIRSYDSETGLAERGIRHYGLDAEAAKKLGSVKLQPGYCGLSRQALSKLLPLMEKGIPYMTAVKEIYKEDETMTAVACLPSLRNAVEQRLMSEIRNPVVTRVLTETRKVVNAVIQKYGKPELIRIELARDVKKSRDERKRIWTKNRNREKQRISAALEVLRETGNEHPNAKEVELVLLHEECGGICPYTGQSITIKNLLSGQSRFDVEHIVPFSRCLDNSFGNKTLCLHEENRSVKKNKTPWEAYGESPERWDEIVERVKHFKGDGRDGKLRRFLMKDLADFDEFSTRMLNDTRYSSRLAGQYVSLLYGSEHRKHIQVSSGMVTAYLRDLWKLNKILSDGGAKNRDDHRHHAIDAVVIALTGPALVKSLSDAAKSAPIENRRRPGIVPPPWDSFLEDVQQFADGIVVSHRVARKVNGRLHEDTFYSPQPAGEEGKPRVHVRKRLESLSPDDVKNIVDPMVREAVIRKLEQTGVDPKKAFAQRENHPSLRTRDGRTIPIHKVRVCKNQEPFQVGRDGRERFVTNDSNHHMEVVEIKGPGGRVKWEGAMVSQYEALRRHKSGLPVINRDHGEGKRLLFSLAPGETFQIDDDKSGEQQTYIVRSISNGNVEIVSLTDSRKALDIKKAKEWLKRSADKLRQLNCRKVVVTPLGEIRRAND

SEQ ID NO: 1906 - protein, 1253 aa, unidentified
  REGION 1..1253: note = Description of Unknown: Cas Enzyme sequence
VLGIDLGSHSLGWAALRLDADDQPCSILDAGVRTFEAGVEASYDEMLQGKQQSKAANRRSKRGPRRQFWRRAWRRYKILKCLVSGGLLRDAEGPNPDEFDLHDPADQDRFLKGVDELLRKRLRPAKGDSRRHLWEQIWPYELRASALERGLDPLELGRAFYHLAQRRGFLSNRKTDTTDDNDPPKKRKKKTKADNAPSDADADDRTATADAKEAKEDTKKVKETITRLGQEMEKTIPDPRFRTLGFYFARHVNPEEQRIRGPGRWTGRLEMYEPEFKAICDAQAAYYPELAEGGSFRKELHDAIFYQRPLKPSGHLVGHCDLEPGRKRAIQALPIAQRFRLLQKVNDLKVRAPDGTAELPLDAGQREKLIKTLTDEGDRTFKQIRKLLDFIEPKISKETKAVEVSGHVFNLERGGEDRIPGDRTAARIHACDKTAPGIKQRWTDMSERLKGELVVALVDYERADALVEHVQERFGFTAEQAAALSKTRLEESRCAFSFRALHGLDKGPNTIKGLVSRMNDGTSLETARRAYLDDRAKLWESRHPAQQFPRPQAFDLLPRVLATDWKHVPPTDKHGRGRRRRGKRKPLEPRPEIVRIAAPAFKNARDLRNPAVTRALAELRKVLNALIRRYGKPARIHVELAREMKKTPLQREVVWTNNRLRQEDRKAAKSAIRMCQEIGISEPTDDDAVKWLLAEECNWQCPYTGKTITARTLYSSPQFQIEHIIPRSVSLDNTFENLTLCDVDYNERIKRKQTPFQAAGNTSSWPEILARVKRFKNRRRAVKNPNRKAKKRVTVEERANPKAERFAWTPEQVKKFYDDEFTPRQLTDTQYAARLAMQYLGMLYGGETDRRGVTDERGVRRVQPSSGGVTAILREEWGLNAVIPGLPDSPAHKEPVNIRLDEKLRTDHRHHAIDAIVIACTGPKTVQLLSDAARRVELAELRREDLRDGQGRRRKRFDVLNPPWGTQQSFSGAVKAVVGGLNVSRRPERKIQGPLHAETNYSKEIKLDAVACRRQRVPLTALSEKDILADNVIADTRVKQAIRAKWEQLGRGKPKDAFKSEASHPRMLPSRKRPNAPPGPPIHTVRINVPDRPLPVGHGSSRRFVLPGKNTIHHAVIVEGQTRQGPRWRVETVSRLDVQRRRRRGLPVIQKDWHPDQLRMWLCKDDCIEMDDGAGTRRVFIVKMISKSGSATDIKVRLHHDARTDDHINQAGERAKFRIRSADTLRQRDARKVLVTPLGEIVYEDKQHRNAND

SEQ ID NO: 1907 - protein, 1046 aa, unidentified
  REGION 1..1046: note = Description of Unknown: Cas Enzyme sequence
MNDGKCTVLGLDLGANSLGWALIGFEDGKPREIIAAGSRVFEAGVEGDIEQGRDESRAASRRAARQVRRQTWRQAHRMGKVASVLQKAGLLPGGDVLVGHKRDALMKSLDQDLYAHFKNDTANNGQALDQLPYFLRARALYEKLDPHALGRAIYHLAQRRGFLSNRKTDKDDKETGVVKEGIHELEAAISAAGVRTLGEFFANTDPVYEKRIRARWTARAMYEQEFEALWEAQRQHYPDLLTVNLKKKIHHAIFYQRPLKSQKGLVGHCELEPDQRRAPWALLPAQRFRLLQKVNDLTVISPEGIERRLSDPERTRILEALEHTEKLTFPQARKLLESRPKGTEFNLERGGNKDIPGNKTAARLREVFGDRWDELSYDDQQAIVGEVLGIKTKEALIRRGRERWGLKEEEALARFAKVNLESGYCALSKKALKAVLPRMEEGVSFATARKECYNDLTTRLVCDELPSVWDAGIDLRNPAVMRSLTQLRKVVNAIIRKYGKPGEIHVELARDLKRGREERKEIWQNNRKREKNRDEARTFLRKDMGIPNPSRDDIEKYLLWKECGEKCPYTGKSISATALFGQNPQFDVEHIVPFSRCLDNSFANKTLCYHEENRARKKNGTPFEVYGGNEDEWQAIIQRVSDFQGEAAKSKLKRFQTRELDAFDEFATQKLNDTRYASRLAVRYLSWLYGDEALKRIQVSTGQITAYLRTAWKLNRVLNTDNTKSRDDHRHHAVDAIVIALINRSTVKRISDAAKKKQHDKGRVRGWEREMKEPWQGFFQQVEKVVGEIVVSHRTSHKVMGRLHEDTFYSPPRQDEQGKQYVVVRKKLDATFQAADIDKVVDPRIQQILRDWLDKHTGNAKQAFSDPSNHPYITISSGPKAGKRIPIHRVRIRRNISVFPVGSHGAPRYVTSDSNHHMAIFQTTDKRGNPKWFGELVSRFEAVERSRRHEPVVHKTSTEIADAHFLFTLAPNDIIALDGDNGNPKLCIVRSISKDLVEFAGVTDSRIKEDIRAANDWGKRRVNGLRALGCRKMTVTPLGEIHPAND

SEQ ID NO: 1908 - protein, 1043 aa, unidentified
  REGION 1..1043: note = Description of Unknown: Cas Enzyme sequence
GWAVLELDRVGGDPIYLRAAGVRIFEAGVEGDIEQGRDSSRAVVRRQARQPRRQQWRRQHRKRKLFQLLQELQLLPASETSDSAARKELFDKLDEELTQRLIPEGDHAAHQKLPYLLRDRAASTSVPPFELGRALYHLAQRRGYLSNRKSQQKDDEEEGQVLGAISEMGQKLSEEHLTLGAYFHRKVDPSQERIRRRYLSREQYRTEFSRIHEIQASAHSELSADAWKRIEEAIYFQRPLKSQRHLIGRCELEFDKRGKGLRGCPLALPTAQQFRILQKVNDLRVTTATRRNDPLTKPECQKLIEALNEVADLTWAKVKTLLKFKAKETQFSLEEWDEKLIGHRTNAKMLAVFGPRWLEFSEAEQTAITLEVVHYRKPEKLKERAKKMWGLDDEAAERLARTHLEDDYASHSRRAMEKLINGTDKIKGMKDHESYSTVRKALYPEKFTSRKSVDRLPPVNQWKDDIRNPAVIRALTELRKVVNSLIQRFGKPEYIHIELARDLRNSRQKRKDIWKQNQENKKRREKAVEAMLTEGISGRPNRNQVDKWLLAEECNRECPYCGKTINMRSLMGNDAEFNIEHIFPRRYLDDSYLNKTIACRKCNDLKGDRTPATAFSGAKLAEILARVERFQGSAAKVKLDRFKMESPPEDFTDRQLNDTRYNSKLSAEYLQLLFGGRADQWGHQRIVTPTGGLTSKVRACWELNDLLGAPNNEKEREDHRHHAIDAVVIGMQNHKQIKHLADLAELSERHRTRLFFETIPVPWTDFKQNVGKILEEMYVSHRPTRTLAGPLHAESIYSKNFGTEKKPEHRIRKHLSKLTAKEITGDQIIDPRVRAAVQQKYEELGKGLPGKLWGGNDETNFPRLSREDGQGGSGSLIKKVRLSSDAKPRSVGKEARARNYASGKDSNFASLIYANLDNSGKEISWRQEVMDRLSAHLLLSANYRILGEKVLIGDQTQARKFKFALRKNDMLLAQGEEGVPVLYRVESLSTNEIQLCEHHQSKTPKNLRNPWNRITGIDNLRKRSARPVSISPSGELFEILAVN

SEQ ID NO: 1909 - protein, 905 aa, unidentified
  REGION 1..905: note = Description of Unknown: Cas Enzyme sequence
RLTLDELGRTLYHLGQRRGFLSNRKTDRDEDEEAGKVYGGIDELTGFMEESGCETLGQYFATVDPTDPEARRIRGRYTARKMYEHEFERVWESQRPHYPGLLTDTLKKQIYNAIFFQRKLQSARDLIGICEYECRAKGCDVDRKRAPWALELAQRFRIIQVVNNLTYELGSGEKYSLTETEWRTLVDKLDREGDLKFSQVKKLLDLPKSTTFNLEEGGESTLRGNRTSSKLRKVFEDRLDSFSPEDRFQIVEDLRSYEKVEALEKRGREKWGLTPEKAKEFSKINLEADYCNLSRQAMEKLLPLMEEGNYYMEAVKKVYGEQLYEWETEYLGPVADAPFGELRNPTVFRVLTQLRKVVNRIIKTYGKPDEIRVELARDVKRSKKERQNLAKRMRDQEKERQAAANLILGFDKNLKFSREDIEKVLLMQECNCLCPYTGKMISMGSLLGPNPQFEVEHIVPFSRCLDNSFFNKTLCHIEANRTKRNRTPHEAFHGTPDWDAMLERVKKFKGRGAAEKLKRFQLFGKALSESVGDFKSSQLNDTRYASRLALEYLRVLYGGDWHKRLLASKGGITAELRSAWKLNSVLNDGDVKTREDHRHHAVDAIAIALASRDMVQIVSQAAQMAEKQGHRRWWKLIQEPWEGFLGDCKAAIDRIVISHAPNKPVRGALHKETNYSPQKLNSEGETVVHVRKSIEALSESEVNNIVDHAVRDAVLKKMQEVGKNKPADAFKNGMNTPFHKNGKPILKVRIASKTPVIPVGEAERVRFVSPGNNHHIEIFEQTDKKGKTKWVGRVVSLYECYRRQAKGLPVIDRVHPDGGRFVFSLSKGDMVEMRNEQGDRKLYVVRKMSKNNQGTIQLLFLDHSDARDVTKVPVKGRLKVPNIMFQEECRKVSVTPLGEIRYAND

SEQ ID NO: 1910 - protein, 1632 aa, unidentified
  REGION 1..1632: note = Description of Unknown: Cas Enzyme sequence
MENKILSLDLGSNSIGATLRDLTDKENQFKKTTVITFDTGVGKDDKGKFTLSHAAERTGKRSLRRLYQSRKYKLWETLEILRKEGYCPIKEDSLYKWKHYDKEEAIKGKGGRTYPLDDILFDNWIKLDFNNDGIPDFTSPYQLREELATIKLDFSSDENKHKLGRALYHIAQHRGFKSSKKLQNKDDDKDEINVEHFDKDKGAEGKKRKSFLDAIEKLNLEINTTSTIGEIFSEIEKNNRQHGTNIRIRKELHQYVTRKMLMQEVEIIFLKQDIPFSNIFKNKKGDNLTISQSPMFWQRPLRSQKGTIGKCTLETNKYRCPISLPAFEEFRAWSFLNNIQYKTKHDDSADWTQISLKYRKEIYADKFLRVSKKDFYFGEIADWIKKKNEHDNWQFNYDFKTNVSACPVSAKLKDIFGEDWQHFKLETEKIKYVRKKNNVIKEQKITYNIDDIWHILFESDDEDFIEEFAINTLKLDKKTNKFLSLYKSMPVAYSMLSLNAINNILPFLRLGFIYTEATLLAKVPKILGDEIWSESKDNILSHLKTHVIDKNREEKRILNIVNNLISKYKALSNDEKFAERNYDYKIGDTDTLLPVGSLETDTNQILIAIEDSYGKSTWSKLQHDEQNNITEQVTKEYQIFFSDKERRFKKLPHLQESMKMFLANNFDFLLCPNTFKVLKDGETACACPACKKLNALYHPSQINIYPPAKEGIYKYGDIKKKMVMLGTPQTGAFKNPMALRALHELKKYVNYLIATEQIDEQTRIVVEIPRDSNLDDSNKRWAWTEYQSRRAEENKEFRDAIYELLKDPEATGSIANADNDSDIDKFRIWYEMLESDDAIEGYEKDKKFIPLVKEISTKKNRKGIDEDIEEFNEDNYLKINKSLFFKLQKAKENIQAKYLLWKEQGCVCMYTGRIIKLTDLFQENLIDFEHTIPRSKSLDNSLANLTVCYADFNRNIKKNQIPYNLENYNKPAYGYDGSILSRLEKWEQKVKDIRLHVEFWKTESKRASTKERKDQCIRQRHLWQFEQNYWEDKVSRFTMKEVKGGFKRSQLVDTQIISKYAYHYLKTFFNTVDVQKGVVTAEFRKIFGIQETGIKKDRSKHSHHAIDAIILSLIPSSAIREQMLTIWYEIQENEKLLLSNTEPNKKAIKDDIQLLQDKLTQLKYQCNLPDVNPIISKVEAEILINNIAKDQTLTPAKKRIRSRGKVVALKDKSGNNIYKTDSEGNLIQRRDNKGNLLWKNDEKGKLLIDENGNKIPVFEPKEKWAKGDAIRGQLHKDSFLGAIKLVKKDEEGNWLKKENGEFEFEDVKYVIREELVYKKDAKSPGFKDLQDLGKQIIDKALFNIIKLQVEETGNFKDALANGIWMLNKKGEKVNKIRRVRIEVSASNPISIKEQTYKNINSSKILPDRKHKEQYWAVNGENVILALYQKDKIDKENNIKSERNLEIISLKDSAGLLSMEQIDENREIILFKKNKSGKEFENENGDKEKPYSLLKPGMKVIFYDEKIEEIRRKENEKYVDYVRRISYRMYSVVKFSGGRITFQHHLEARPDKKLQVAYPKDKVFMKDEKGNEIKYGVGGTSGFSRPVSDALRLNGYNNYEPWPRLLYSKDSLNMAIEGKHFRIKPDGEVEWLF

SEQ ID NO: 1911 - protein, 1444 aa, unidentified
  REGION 1..1444: note = Description of Unknown: Cas Enzyme sequence
MSRILGLDLGTNSIGWCIRETERHEREEYSKVFSKNITDFQNEIVDYGVVIFQKGVGEGKSGEFSLAAERRKNRSKRRLYNAKRYRKWELLKILVENKMCPLTLEELRLWSIGNWQEVEGKKKNLGRIYPVGNEYFQKWLTFDPVYFGQKGVSDNGKSILKTPYDLRCELICSEEQDETAKKQKVGRALYHLVQRRGFKSSRKNGKSRYAENAELEKIKLEKPNFHISTLAKEKIDEGKRFRASGVIQRKYFEDEFYAICEKQNIGAELTDRLYKAIYFVRPLRSQKGLVGNCTLEKRKTRIPISHPKYEEFRALQFINNIKWRKTGLPVFEPIPMQLKKKIFEELFFRRLESGKNKGKVHSESYFKFDNIIDKYSENGKYEFNYENKPNISACPIIASFMNVFDDEWQNKFIKKENSYGINWDGLSINYVCKYGKKNGQNRILKADEIWHLLFDYIQTKDKQEELNTFCKNVLEFNDDKSKEFSNIDIPQGYGSLSHNAVCKIIPFLQSGYIYSEAVSFANLKKVLGSTFDNTKEKAEKTITTTIKETSEIKEKLTIVNSLIQQFFSNNNTIRAKGLDNHIKAIAIQDTTNKLRSYFRESHLVINAESDRKKFETEILDLYLKFLDGRQNKDEKASSYLNKNPEIDYYRLPRLDEVIKQNLKKEFDLSDIAIKHLYHPSDIDMYPMSKLEIRISVDGIEQLVKQLGSPQPPSKGWKNPMAMRTLHELRHLLNYLLKVSKITPETKVVVEMARELNDANKRWAIQTYQRYREKENKEFAKAIVGVAKEKYPNIDETNIENINKVRLWWEQIKDNEALYKQIENLKEDVQKYRLWKEQECVCMYTGEMISLTDLFDGSQTHFEHTLPVSDSFDNSLANLTVCKEYYNTNIKKNKIPTQLGNYLNDVNGYTAIKPRLKKWEEKVEHLKTLIDTNKIKTKKTQDPETKKSLIQNRHLLQFDYDYWKKKLNTFIVKEIPNSWKNSQLIDTQIISKYARAYLKTVFEKVDVQKASITNDFKKIYRIKGNETKDRSKHSHHAEDAATLALIPGSARRETILKEYYEAIRNKKKYTLDPYNGFDTKHVLDIEKNITVFHVCNNKYITNTKKKNRKRGEIVFLKNKKTKKHMLNESGKPIPMIATGDTIRGQINEESYLGAITPPLYQNGKAVKKNNKWEIRREKNGNPEIWIVKRLPIDSINFEKDIIIDEQLKQSILNQINEGRSVNELTDLSENKIRHIRCRVKTGKGFQSREKTIELKKHSHTSKQEYKKNVLSKIADNFLCLFYQNKPKPDEQIQSRARIISLFHFRYLEFDSLRDIWNDENWNNYRINDKLSLPLVKIITQGTKVLFYEKSKDEIGYLKTREIQQRIFVVFKFNESLVSNKYYNYIYFKNHLDARPNPDIDKECEDKFDPQKYQSGLRLKPENINCLFEGIDFEMKPDGEIKWIKK

SEQ ID NO: 1912 - protein, 1366 aa, unidentified
  REGION 1..1366: note = Description of Unknown: Cas Enzyme sequence
MKKILGLDLGTTSIGWAYVKEAENTNEHSSIIRLGVRVIPITTDEESDFNRGKSISVNADRTLKRGMRRNLNRYQQRRDMLIDVLMQHGLINEKTVLTETGKRSTFETYRLRSMAATDNITKEELARVLLMINKKRGYKSSRKAKKNEDGILIDGMSVARKLYNEGLTPGQYVYNILKQGMKNIPDFYRSDLLNEFNQVWSYHQQYFPEILTDDLKKQVTGKGQRITSQIFYGRYKINTAENKGNRAKTKLQAYQWRSEAVSKQMPIETVAYVLADINNEISNSSGYLGEISDRSKKLFFNNETIGQYQYRQLEKNPHCSLKNQVFYRQDYLDEFEKIWETQTVYHPELTSELKSKIRDVIIFYQRRLKSQKHLISNCEFEKHHKAVPKSSHLFQHFKIWQNINNLEYKNLETREKIRPDKEQKECLFHELNLRNSLSKEQVLMLLTENPKNYELNFREVEGNRTNAALYSVFKKILELEGYEFDFTRMTAQEIYETVEPIFEYLEINTKILVYDSSLPEKEQFEQPAYHLWHLLYSFEEDSSKLGDSKLKERLTEKFGFKNEHADLLAKIAFKQEYGSLSARAIRKILPFMKEGDRYDEACIKAGYNHSFSRTADEQAKRNLKVRLDTLKKNSLRNPVVEKVINQMIHLINGIIDDKELGKPDEIRIELARELKKSAKEREEMTRQINKFQADHREISDLLQKEFGISKVTRNDIIRYKLYRELETIGFKTIYTNEYIPQEKLFSKDFDVDHIIPQARLFDDSFSNKTLSTKQINIEKGNDTAYDFLKERKLSEEEFSQYLSRVEDLYKRKIISKAKYNKLMMKGEDIPEGFINRDLRESQYIAKKAKQMLEEVVREVTTTTGSITDRLRQDWQLVDIMKEMNLTKFRELGLTETIEGKNGQMGEQIKEWSKRNDHRHHAMDALTVAFTKRSFVQYLNNLNARSDRGSSIYGIEQKELYRDNSGKLKFRPPFPLSEFRPEAKKHLESVLVSYKAKNKVVTRNLNRIRKKGTNNYSGQIALTPRGQLHLETIYGKIRQYVTKEEKVGTGFDIEKIEKVAVKKYRDALFKRLREFESNPQKAFGGRNSPSKNPVYVDDQKIIPVPEKVKLVWLEEIYTIRKEITPDLKIEKVIDKGIQNILKKRLGEFQNDPKKALSDKELNPIWLNREKGIAIKSVTISGITNAVALHDKKDHLGNPILDENGDPLPCDFVNTGNNHHVAIYRDEAGNLYDEIVSFYEAVHRINMGMPVITYQHASGARLLFTLKPNEYFVFPSSDFNPNEVDLLNKENYSLISPNLYRLQTISKVEYGNNVIRDYVFRHHLETQIINSKNTKWKTYKPVKSLSILDKIIKVRLNHLGQIVQTGEY

SEQ ID NO: 1913 - protein, 1361 aa, unidentified
  REGION 1..1361: note = Description of Unknown: Cas Enzyme sequence
MKRVLGLDLGTTSIGWAVVDQAASQEEKSKIIQLGVRVNPITVDEQSSFENGKSITTTADRTLKRGMRRSLQRYKQRREHLVGLLKKHGIINDDTLLNENGNATTFQTYRLRAKAAHEEISLEEFARVLLMINKKRGYKSNRRADSQEDGELIDGMAVAKKLYNEHLTPGEFAYHILQSGKRFIPSFYRSDLQNEFDKIWNCQNQFYPQVLTAELKDKLTDRSKKDTENIFFAIHHISSATVKDRKTATLTIYKWRVQALRQQLDLEQVVAVLASLNGAIAGASGYLGHISDNSKELYFGHMTVGEYLMRGLEQDPHFRVKNRVFYRQDYLNEFEQIWETQRRFHPELTAELKEKIRDTVIFYQRKLKSQKGLIAYCELEGREITVKVDGKEKRVMTGPKVCPRSMPLYQEFKMWQVINNLRLQSKIDGTQVPLTMEQKKLLHDALNVEGDMQAARVLKVLALKPKDYGINCDEVPGNTTNAALFKKYKSIVEWTGHDVEKFDKLSASEKIALVESVFKALKFNTDFLGDGCDEQSKAFRLWHLLYSYEGDNSNTGIDKLVDHICSLTALPADYAKAVAQVKFDDDYGSLSAKAIKKILPYMQQGMMYSEACEAAGYRHSKSSLTREEIAAKQLLQHLEVLPKNSLRNPVVEKILNQMVHVVNACQDAYGPFDEIHVEMARELKLTSKQREERTKALNQRTKETEEIKQKLIKDFNVPHPSRNDIIKYRLYMELAPNGFKTLYTDTPISHEKLFTREFNIEHIIPQAKMFDDSFTNKTLETAEANLDKSKMTAYDYVLSRQGEEGAKRYKAKIEKLFGASNPKKCERLLMRETDIPDGFLNRDLSDSQYIARKAKEMLGKITRVVVPTTGAITARLREDWQIVDVMKELNLEKYEKLGLVETYSDRDGRCVKRIKDWSKRNDHRHHAMDALAIAFTQPSHIQLLNHLNAHESDDIKANAYALMRRTLTKGGTFIPPMENFRTVAKKHLEAVLVSIKAKNKVVTPHVNRIKGSAHHQLTLTPRGQLHKDFFYSKKYFYATKVEKVGKSFNAAKIATVCKKTYREALLRRLQEYGGDPAKAFTGKNSLLKNPLYVDESNMKVVPSKVKTVTMEEFFSKRNLVDKDLKIDDVVDEGIKEILRKRLDEYGDVNEAFANLRDNPIWFNKQADIAVKRVTTKERITNPIYIHEKRDNAGRFILDEKGNRRPNDFVNPRNNNHVAIFEDEDGNLHEHIVSLYDAVNLARKGLPIVDKLYNSDKGWKFLYTMKRNELFVVPDLEHGFNPAEIDLMDVKNYPAISKHLYRVQKITKKDYFFKLHIDTTSEFQAPLKDIHWKRITKENDLKGFVKVRVDHIGHIVAVGEYN

SEQ ID NO: 1914 - protein, 1257 aa, unidentified
  REGION 1..1257: note = Description of Unknown: Cas Enzyme sequence
MKYTDFTGIYSVSKTLRFELIPQGSTVENMKREGILNNDMHRADSYKEMKKLIDEYHKAFIERCLSDFSLKYDDTGKHDSLEEYFFYYEQKRNDKTKKIFEDIQVALRKQISKRFTGDTAFKRLFKKELIKEDLPSFVKNDPVKTELIKEFSDFTTYFQEFHKNRKNMYTSDAKSTAIAYRIINENLPKFIDNINAFDIVAKVPEMQEHFKTIADELRSHLQVGNDIDKMFNLQFFNKVLTQSQLDVYNAVIGGKSEGNKKIQGINEYINLYNQQHKKARLPMLKLLYKQILSDRVAISWLQDEFDNDQDMLDTIEAFYNKLNSNETGVLGEGKLKQILMGLDGYNLDGVFLRNDLQLSEVSQRLCGGWNIIKDAMISDLKRSVQKKKKETDADFEERVSKLFSAQNSFSIAYINQCLGQAGIRCKIQDYFACLGAKEGENEAETTPDIFDQIAEAYHGAAPILNARPSSHNLAQDIEKVKAIKALLDALKRLQRFVKPLLGRGDEGDKDNFFYGDFMPIWEVLDQLTPLYNKVRNRMTRKPYSQEKIKLNFENSTLLNGWDLNKEHDNTSVILRREGLYYLGIMNKNYNKIFDANNVETIGDCYEKMIYKLLPGPNKMLPKVFFSKSREQEFSPSKKILEIWESKSFKKGDNFNLDDCHALIDFYKDSIAKHPDWNKFNFKFSDTQSYTNISDFYRDVSQQGYSLSFTKVSVDYVNRMVDEGKLYLFQIYNKDFSPQSKGTPNMHTLYWRMLFDERNLHNVIYKLNGEAEVFYRKASLRCDRPTHPAHQPITCKNENDSKRVCVFDYDIIKNRRYTVDKFMFHVPITINYKCTGSDNINQQVCDYLRSAGDDTHIIGIDRGERNLLYLVIIDQHGTIKEQFSLNEIVNEYKGNTYCTNYHTLLEEKEAGNKKARQDWQTIESIKELKEGYLSQVIHKISMLMQRYHAIVVLEDLNGSFMRSRQKVEKQVYQKFEHMLINKLNYLVNKQYDATEPGGLLHALQLTSRMDSFKKLGKQSGFLFYIPAWNTSKIDPVTGFVNLFDTRYCNEAKAKEFFEKFDDISYNDERDWFEFSFDYRHFTNKPTGTRTQWTLCTQGTRVRTFRNPEKSNHWDNEEFDLTQAFKDLFNKYGIDIASGLKARIVNGQLTKETSAVKDFYESLLKLLKLTLQMRNSVTGTDIDYLVSPVADKDGIFFDSRTCGSLLPANADANGAFNIARKGLMLLRQIQQSSIDAEKIQLAPIKNEDWLEFAQEKPYL

SEQ ID NO: 1915 - protein, 1422 aa, unidentified
  REGION 1..1422: note = Description of Unknown: Cas Enzyme sequence
MKKILGLDLGVTSIGFAHVLESEDREQSSIEQIGVRVIPLSTDEETNFEKGKPITINADRTLKRSMRRNLDRYQLRRNNLISLLKEHHIIDEQTILAEHEKNSTHSTYELRARAASEQIAKEDFARVLLAINKKRGYKSSRKTRNEEDGQAIDGMETARRLYEEDITPGQLALQLLLNGKKQLPDFYRSDLQAELDKIWFFQAQFHPDILTPEFKKQLEGKGQRGTSAAFWTTYGFNIAENKGRREEKRIQAYTWRVRALSEVLSAEEVAYVITEINNDLNKSSGYLGAISDRSKELYFKNQTVGQYLYARLKKNPHTSLRNIVFYRQDYLDEFERIWEAQAKFHPELSPDLKKEIRDVVIFYQRKLRSQKSLVSFCEFESREVIIEKDGQRNKKRIGLKVAPKSSPLFQEFKIWQVLQNLEFKNKKSREILKPDQEAKQLLFEELNMKGNLPATTALGMLGYKPEEWDANYSVLEGNRTNKAIYDILLRVMELEGYDEYLLKPGKNDEPDIALLSATAKELKAMFISVLPSLGIDVSILDFNAELEGKDFERQASYQLWHLLYSYEEDQSVSGNEQLYKLLSDKFGFRREHATLLAGIRLTDDYGNLSAKAIRKIYPYIRENGYSQACEQAGYRHSASSLTKDEIENRPLQDQLDLIKKNSLRNPVVEKILNQLVNVVNTLIETNSKKDKDGNITHYYKFDEIRIELARELKKNAKERQEMSIANNEAKRKHDAICKILINDFGVLNPGRNDIIRYKLYEELKNNGYKDMYTNTYIPREILFSNQIDIDHIIPQARLFDDSYSNKVLCFRHNNLKKGERTAIDYIESDFGSTAADEFIERIKHLRECNKKNNEEGIGNTKFLKLQKRISEIGDGFIERDLRNSQYIARAARNMLLTITRNVVATTGEVTARLREDWGLVNLMQELNMDKYRAVGLTSMVMKKDGSYRERILNWTKRNDHRHHAIDALTVAFTKHSYIQYLNHLSARKNEAHKMHVHIFAIEAKETEQVTDDNGNKKRQFRQPLPHFREEAKRHLEQVLISYKAKNKVVTKNKNKVKTAGGIKLKTELTPRGQLHKETIYGKYRYYESKEEKISAKFDADHIQMVADPQYRMLLLQRLSEYGNDPKKAFTGKNALTKNPIYLDASRSQILPEKVKLVWLEEDYAIRKDLTPENFKDQKSIDKVIDVAVRTLLSKRLAEYGGNAKEAFSNLDKNPVWFNEEKGICIKRVRISGVKNAGALHFKKDHLGQFILDDNGQRIPVDYVSTGNNHHVAIYRDADGKLQDNIVSLFEAVERSIQGLPVIDKTLNASEGWKFLFTMKQNEYFIFPNAQTGFDPNEIDLSDPDNYPRISPNLFRVQKLSKVSYGNSSSREYAFRHHLETGVEEQKELKDITYKYIKSLPHLENIVKVRINHIGRIVKTGEY

SEQ ID NO: 1916 - protein, 1239 aa, unidentified
  REGION 1..1239: note = Description of Unknown: Cas Enzyme sequence
MKKILGLDLGSASIGWAVISEIYENGEIKREILGLGSRIVPYEGTERKDFEKGTGESRNSIRTKMRTARKGYDRYQLRRKYLVKELINAEMYPSEAEKNLPKMQLWELRNKAVSSKVSLKELGRLLLWLNQKRGYKSGRSEANMDKKDTEYVAEVKSRHQTIKEKNLTIGQYFYEHLFNNEFFRVKENIFPREAYIEEFEAICKQQQTHYPDIITNKFIDKLRDEIIYYQRPLKSQKGLVSVCEFEGFWRKGKEGKEYFVGPKVTPRSSPIFQIAKIWENVNSISIDNKYGNKIELTLEEKKALFNHLDSNENLTLSDIVRILKLNKNECFFNKQIVKGIKGNITKMAILKCFEEPERYSHLFRFDFEIIEDDKHCYLYDKKTGEIQAEKKVMTITPKIENEPYYQLWHTIYSVSDIDECSRVLQQKFSIEPEIANKLAKLDLTKGGFGNKSVKAIRKILPYLIEGYVYSDAMCFAGYDHSNSQTKEENIQRKLLERLKSIPNNSLRQPIVEKILNQMVNVVNTIIEKYGKPDEIRVELARELKQSKEERSDTSKFLSKRERENEQIVKKLEEFGLRATRNNIVKWRLYEEMDNEDKKLNAICIYCGQPISVTEAIKGNDVDIEHIIPKGKLFDDSQSNKTLAHRRCNTDKGDRTAYDFMKGKSEQALAAYVERVNKLFSSKVIGKAKRDKLLMTEDKIPQNFIDRQLRESQYIARKAREILQTICHNVWSTSGTITAELRHLWGWDDVTMNLQFSKYKDLGLTEIREWESEHGKNKHTKEVISGWTKRDDHRHHAIDALTIACTKQGYIQRFNTLSSSKTREDMKREVDVRSVEYREKLNLLEKYIVSEQPFTVGVVEEKAASILISFKAGKKVAVTGKRKVGRKGSKKVVQTGIIVPRGALSEESVYGKIKKVEEKKTLKYLFENPHLIFKPRIKQLVKERLEKFEGDAKKALASTKKEPIYLDNEKSIPLEYGSCFNDEYVIKYNVDINFNKVEKVIDGNTKRILQQRLEKFNGKPMEAFKDVQRNDTVLKWYEDEGLDRPIRSVRCYTGLSAVVPVRKDESGRNIGFVKPGNNHHIAIYTDAEGKKIEHICTFWHAVERKKYGLPVVISNTNEVWDTIQQNPEDTYPESFLKLLPEPKLTLHLSMQQNDMFVLGMTNEEFENARISNDYRAISDKLYRVQKLGEKYWVFRHHLETQLVDDTNAQNSKRFISIRSIGALDNANPIKLKINCIGHLV

SEQ ID NO: 1917 - protein, 1547 aa, unidentified
  REGION 1..1547: note = Description of Unknown: Cas Enzyme sequence
MKKILGLDLGTNSIGWSLVDLDFNAKNGNIDSLGSRIIPMGQDTLGKFDAGVKISQTAERTGYRSTRKLYQRVLLRRERLHRVLNVLGFLPEHYAQAIDFERQLGQFKEGNEPKISFKKNEQGNHEFLFMQSFNEMIEEFREKGNIQKLPHDWTIYYLRKKALTAKISKEELAWVLLNFNQKRGYYQLRGEEEQDDSDQSKELFELKVKEVIDSGEKVRGNTLFNIVFESGWEYDRQITKPEDWIGKTKEFIVTTSLTKNGETKRTYKAVNSEEDWIAIKSKTEQQILNANKTVGQYIYETLLVNPDQKIRGKLVRTIERKFYKEELVKILETQCKLHPELTSESLYKTCVEELYPYNQAHQYKLKNKGFKYLFLEDIIFYQRPLKSKKSSIGNCQYETRSFKKWIKLNENGAIDEKEVLVEEPLKGISKSHPHYQEFRLWQFLRNLRLYKKTGIVDGKTEIDIDVTKELLKSTDNWVDLFEFLNEQKEIDQNQLINYLVKAKIIDRAEKLNYRWNYVEDKKYPCNETRYLLLSRLKKVDNIEAETFLSAETERNLWHIIYSVTDRIAYEKALNTFARKHGLDVQSFVDNFVKIPPFKSDYGAYSEKAIKKLLPLMRLGKLWRQEDVPDDVRRKATDIINRLKSIDFDKKRLTELKTDTNFSVALLKSFCDFEDKNPIEGLNTYQACYLTYNRHSEAGTIDRWRHPADIDGFLKEFKQHSLRNPIVEQVITETLRVVRDIWEYYGKGVENFFDEIHIELGREMKNPAKKRQEISKTITENENTNFRIKEILEELMNDSGIEGDVRPYSPSHQEILKLYEEGVFQNPNASFDVLNLDEIDKLRKTASPSKQEIRKYKLWLDQGYVSPYTGQVIPLSKLFTTDFQIEHIIPQSRYFDDSLSNKIICESEINQLKDNRTAYEFLKGENGRIVEMANGKSMRLFSVENYENHCNKYFGRNKSKLKKLLSEEIPEGFIARQLNDSRYISKLIKSYLSNLVREENEVDAISKHIVPVTGAITSMLKNDWGLNDKWNELVAYRFKRLNELTASLDYGTFDRNINAFRLTVPDDIARGFSKKRIDHRHHALDALVIACTTKDHVNYITSLNDQRKNYSLVKKLRQIKEVQTVNYETGEISIRKVASAYLLPWPGFPMEAKKSLEQVVVSFKHNNRVINKTTNKTWQWVNQGGQYRKELVKQTKGDSWAIRKPMHKDTVSGEVTIRTKKEASFANGIKQWENLVDKKLKKQIKQQFKNGLNEKGIRDFFKESPYKIDGEEVKKVLLYDETKNATASRVSLSEKLTRKQLEKITDSGIQSILERHLSHYTAEDGKERFDLAFSAEGIEAMNNNIEELNKGKSHKPIYKVRVYEEGSKFRLGQTGNKKDKFVEAAKNTNLFFAVYWNEEKQKREFETVPLNEVIEHQKWRATLPKEEMKTTPLLPVDSTKGTFLFSLSPNDLVYVPLDGEMLNQNGVEVNMDEIQTQQVYKMVSSSGSQCFFIQNPIASVIRKYDSKSKVGELGSVNKMETDLLGKQIKEVCIKIEADRLGNVKIAKR

SEQ ID NO: 1918 - protein, 1259 aa, unidentified
  REGION 1..1259: note = Description of Unknown: Cas Enzyme sequence
MKKILGLDLGVSSIGWALIKEENEQPTEIIGMGVRVIPLDKDENDGFTKGNAITKNQKRTEKRSYRRSNYRYVLRRTALTKELKKHGMFDENLFKLPKLELWRLRSKAVTEQVSLKELGRILYHLNQKRGYQPTKGEATDDSQDNKKDTQHVKEIKNRYQQLKEENKTIGQKFFEELSKNQFYRTKQQVFPREAYMEEFDKIMKKQQEFYPDVLKNEFINHVRNNIIYYQRPLKSQKGLVSICEFEGFHILNKEGKKIFTGPKVAHRSNPLFQVEKIWESINNIVIKNKKNEDFPITLEQKQKIFEYLDENPKLTLKELFKILEIKEKSGWYGNKMLYKGIQGNVTKNLIKQAIGNDESSKKWLQFNLKTRPNANNESKTYLVNKDNGEVIREEDRLIINESFIDEPLYQLWHVIYSISEINECKKVLINKMGFSEDVADRLSKIDFVKLSYGSKSIKAIRKILPYLIKGYQYNDAASLAGYNHSNSLTIDEVMRKRLLEKLPLLPKNALRQPVVEKILNQMIHIVNDIIDEKRGWITQEERDKGLFEIRIELARELKQNKEERNETFKNINKIENENKEIKKRLQELGVRATRQNIIKYRLFNEISENKINAICIYTGKMFSLSDALNGDNIDVEHIIPRSLLFDDSQSNKTLTFRYINQEKGNQTAYDYMASKGEVALNDYIERVNKLYENKVISKAKRDKLLMPADKIPNDFINRQLRETAYVSRKAREILSQISKNVWATSGSVTAYLRRLWGWDDILMNLQLKRIKELFADPLSEGITEKIEIETSDGQKHFKEIIKDWTKRDDHRHHAIDALVVACTKQGYIQRINTLSSQATRDELFKEVNNRNEEFREKLNLLDKYFIQNRPFTTAKVENKVSKVIVSYKPGKKVAAYGKRFIRQNGKRIKIQDHILVPRGPLSEESVYGKIKVLDKNKPLKYLFENPHLIFKPHIKELVEKRLEEFGGDIKKALASTKKNPIYLTNKPEPVILEHGTCFKEEYVIKYPIESINEKDIQYIVDNKIRDLIKERLSQANGNTKEAFKEPLYLDKEKQIPIRTVRIITGLSGVEPLKYNKSDTPTSFVIPGNNHHITIYVDKDGNKIPHLCTFWHAVERKKYQIPVIIENPKSVWDKILSSSNDYPQSFLKKLPKSDWKFQQSFQQNEYVLLHENQEFLNDILSQPDYIEISKYLYRVQKLFYNGKQLEIFFRHVYETRLIDNEWARKQKKYYPVKSLGALEKLNPIKIRVNRLGEIEPNGIK

SEQ ID NO: 1919 - protein, 1561 aa, unidentified
  REGION 1..1561: note = Description of Unknown: Cas Enzyme sequence
MKRILGLDLGTNSIGWSLVSTDENGNPCKIEGIGSRIIPMTQDVLDIFSGGKPLETQTAARTSYRGIRRLRERHLLRRERLHRVLNVLGFLPTHYVNQIDFEKRLGKFLTDTEPKLVWKENENAEFEFIFQKSYNEMLVDFSQSQPQLLADDKKIPYDWTIYYLRKKALIQKIEKEELAWILLNFNQKRGYYQLQGEEEDENPDKLVEYYALKVINVTADEPQKGKSDIWYNVILENSWIYRRSSKNPLFDWIGKEKELIVTTDLNDDGTVKTDKEGAEKRSFRAPSENDWNLLKKKTEADINKSHKTVGTYIYEALLSNPSQKIRGKLVRTIERKFYKEELRQILKKQVELQPELFLKDLYNDCIRELYRNNEAHQFILSERDFIHLFLEDIIFYQRPLRSQKSSIGNCSLEYKSYKKKDEAGNVIKNENGEDIKVKEYLKVIPKSNPLYQEFRVWQWLTNLKIYRKENDADVTGQFIKNNDDRADFFDFLMAQKEVNHKDILKHLLFPTLKEQYPNAKPAALNKELDKEIAKYRWNYVFDDSKDKEDDKSKKYPCNTTGYEIRRRLEKVENIPVDFLTSEIEQNLWHIIYSVTDKTEFEKALKTFAEKHGLDVDSFVENFKKYPPFKSEYGSFSEKAIKKLLSLMRLGKSWNWETIDTKTQTRIEKIITGEYDEDIKNRVREKAINLTENEHFQGLPLWLASYIVYDRHSEADLAGKWNSTADLEKYLEDFKQHSLRNPIVEQIVTETLRVVRDIWEQYGQGTNDFFDEIHIELGREMKNTAEDRRFLTEQVNSNENTNLRIKALLMELKENSDGKLFVEDVRPYSPMQQDALKIFEEYALQNDEKYDEGKGEFIHSPIDEEILKISRTAQPTKSELQRYKLWLEQRYRSPYTGQVIPLGKLFTEEYQIEHIIPKSRYFDDSFNNKVICEAAVNQLKDKYLGFEFIKQYYGQEVELGLGKKVRIFTEDQYKDFVKEHYTKNNSKRRNLLLDEIPEKMIARQMNDTRYVSKFISGLLSNIVRAEKDDDGINSKNVIPLNGKITTTLKRDWGLEDIWNELILPRFERMNELTNSTVFTAWNENHQKFLPTVPLELSKNFQKKRIDHRHHAMDALVIACATRDHVNLLNNQSAKSDNSRYDLQNKLRHKEKVSWVEKKTNQEVERNIFKEFKKPWDNFTVDAKNELEKIVVSFKQNLRVINKATNKYTKYVEKNGKKTKEQVVQEGTNWAIRKPLHKDTVAGIVNLRFKKQVNLSVAIDEWENIVDKNLKTKIKQLINEGFDKKKIQKFFVQNENKWQGIDVSKPEIYYFSNEKEVLVASRVILDSSFNSKKIESITDTGIQKILIRHLEKYNEEKDGKTIERPDLAFSPEGIEDMNKNIVELNNGKRHQAILKVRTYEPKGNKFNVGYSGNKKDKYVEAAKGTNLFFAIYVDGEEKRSYETIPLNIVVERLKQGLYEVPEINEKGDKLLFYLSPNDLVYVPTEEEIATNSSNNKFDRNQIYKMVSSSGNQCFFIKSEVATPIVNKLEYSALNKMEKTTDGIMIKQVCIKLKTDRIGNCRKD

SEQ ID NO: 1920 - protein, 1537 aa, unidentified
  REGION 1..1537: note = Description of Unknown: Cas Enzyme sequence
MKKILGLDLGTNSIGWSLISTDENGNPCKIDGMGSRIIPMSQDVLDTFSGGKPLETQTAARTGYRGIRRLRERHLLRRERLHRVLNTLGFLPEHYVKQIDFDKRLGQFFEEKEPKIAWKEGENGKFEFLFQKSFLETIEDFKKRQPELFENGNLIPYDWIIYYLRNKALQQKIEKEELAWIILNFNQKRGYYQLRGEEEEENPNKLVEYYALKIVDVTADEPQKGKTDIWYNVVLENGWVYRRSSKNPLFDWVGKEKEFIVTTDLNDDGTIKTDKEGNEKRSFRAPSEDDWNLLKKKTEADIIRSRKTVGTYIYETLLSNPSQKIRGKLVRTIERKFYKDELRQILEKQIELQPELFTNDLYNNCIRELYRNNEAHQLILSKRDFVHLFLNDIIFYQRPLRSQKSAIGNCSLEFRTHKDKEGNKVTKHLKAVPKSNPLYQEFRVWQWLSNLKIYRKVDDVDVTSEFIKEIDDVVNLFEFLMLQKEVNHKDILQYFLTKEGFKGKVLNADIAKYRWNYVFDNSKDKEEDKSKKYPCNTTGYEIRRRLEKVENIPANFLTPEIEQNLWHIIYSVTDKNEFDRALKTFARKHNLDTDSFVENFKKLPPFKSEYGSFSEKAIKKLLPLMRLGKYWEWDAIDDNTKERISKVITGECDEKIRSRVREKAINLTKESHFQGLPIWLASYIVYDRHSEADIAGKWNSIVDLEKYLNDFKQHSLRNPIVEQIITETLRVVRDIWKQYGEGAKDFFDEIHIELGREMKNTAEDRKWLTEQVRNNENTNLRIKALLMELKENSDGKLFTKDVRPHSPMQQDVLKIFEEYALQNNEKYAGKDNDGKDKFIYDPIDDEILKISKSAQPTKSELQRYKLWLEQRYRSPYTGQMIPLGRLFTEDYQIEHIIPKSRYFDDSFNNKVICESAVNQLKDKQLGLEFIQNHYGEEVELGMGKTARIFTEDAYKDFVKDHYSKNNSKRRNLLLDEIPEQMIARQMNDTRYISKFISELLSNIVRAEKEDDGINSKNLIPVTGKITTALKQDWGMNDVWNDLILSRFERMNELTNSQNFTTWNDNFQKYLPTVPMEFSKNFQKKRIDHRHHAMDALVIACATRNHVNLLNNQSAKSENSRYDLQNKLRHKEKVSWIDKKTNEKVERDIFKEFIKPWNNFTIDAKNELKKIIVSFKQNLRIINKTTNKYEKIVDGKKVKVSQQGTNWAIRKPLHTPMPYGKKVYQFDILKIHENVGKWELIIDIDVKDKVRQVYESFNKKTTETQKYLKQNPILDENGNPITITAFKISVEKYRKRMPITKLSDRGQSGIKTVDSAINFINKISDFKIREDLLRHLEENNRDIDKAFSAEGIEKFNSKRNIPIYKLPIAEKGAGRFAIGTRIGSKHKWGEAEKGTNLFFAIYIDDEGKRNYETIPLNIVVERLKQGLKEVPEKKIIIEKEQEKELNLLFFLSPNDLVYIPTEDELESEVISENIKFDRIYKMVSSSGNQCFFIKSEVANSIVNKQEHSPLNKMEKSTDGIMIKQYCKKISVDRIGNLR

SEQ ID NO: 1921 - protein, 1418 aa, unidentified
  REGION 1..1418: note = Description of Unknown: Cas Enzyme sequence
MKKILGLDLGTNSIGWALVETDFEKKQGKILGMGSRIIPMGADKINYEKGIGITKNAMRREKRSARKGNKRYKLRRNKLLFILNELGMLPDQFQFKNGLPKPEKLQELELLPIPKETKQLDALGLLELKVKALDNPIELKEFGKILYQFNQLRGYSGGNLDDDNKNKKKEDEDIAEKQRYEVIVQKVEIINVEQSIDTFTVASGKDKGEKLHYYNVTVYYNDEEIQGQTKLQNLIGKEGNEEELEIRITRKKDKSVSYIFSLPKKTDWRKAMELSEKALTQDNLFISQLLLRDLRRDLQQDKWGKIRNRVFLRNRYKAEFDKIWDTQEKSHELLKNCPKATLEKIANYIFPGTSESQQHLRKTALEKGLKYIIKEQVIYYQRPLKPQTEFISNCRFEKEEKVIANSHPLFQEFRCWKQINNLFITTKAESLTNKNKYHYQNRYLTIDEKFAIYDKLQNQKEVSYGAVIDILNQDKSKGKLDKEQKDYFLNGLNYKAKLKGCDTLLTIKKELGEYFDEFIKKDEKIVEKIWSVIFDVNNHDGSEYDVKSKRVSSIFHVLRSCASNDEIATELSLKLAQNVRFPRKYANLSAKAILNILPLMIPNNQRISPSISTKYERIKHLIDTGEIIDDTDLNLESYVIDFVKSNPNAIQEGGLMEYLAISLVYGKHTAEKIEAQIKNYHDIKYKERNLRNPIVEQVVNETMQIIKAVWKQYKLNTNELEIRVELARDLKNSSEERDKIWKAQIKARKNNDRIIARLAEHGIIVTEENILKYKLYEQQKGISPYTQNKIIPFSSLFDKRLYDIDHIIPKSRYYDDSISNKVICETRINEEKSNRTAWEYITGQHSKEVRSIEDFVNYVNQNYYGKKKKNLLAEKIPSNPIERQLKETQYITVAIKNELAKIVGSDNVKTSTGEVTDFLRSRWGLRRLFMELTESRFKRMELWDLDENGNPKTKWVKREVINDGEKVKNLYEIKNWSKRYDHRHHSVDALVVALTTQSNIQRLNNLNKYYQDELTRRKDEFNIKVKEGESTLEAFFNLEAKRRDEILRQIESSRHFEKPFEDLVEQARHHLEKMVVSHKPKEKLDIKVDETSNKKQLKIRGALHQDTYYGKLNGRDTKRVEISTLSPSDVSKIVVDEVLANEIIEHKNNFDTMKEAFTGEGLELFNNNRKAKGKHPVYKVKVWYNKVEKKESGLQRLYENNDKQSVITGDNYLFLVMEKDGKRIFDIASLYDSVSIANDALKNNIHDIKKIIAEDYRIKHKGKPEKVLFTLQQNELVYLPKGNDDEVLTKTKSEFAEWISQSDNKKMFCKRVYKVVKFTGKDCFFIPHNYANPISLPKDLSNEQKDELKKKYKDKTIPKQEKNYEEFGSYDNCVRTEVNSDFVKELVLKKDFKGNPPMKIQEYCIKIQIDWLGNITLS

SEQ ID NO: 1922 - protein, 1431 aa, unidentified
  REGION 1..1431: note = Description of Unknown: Cas Enzyme sequence
MGKRILGLDLGTNSIGWGVMDDLGEGQFKLLEKGVHVFPEGTNRDSAGSESSKASDRTQHRSARRLKYRRKLRKIETLKVLSDEGLCPKLEMSELNAWRYDRKYPSNTLFRNWCRTSDPTNGEGEFDNPYYFRWLASTEKLDWDSEPDSLKLGRALYHLAQRRGFKSNRLDASSDDVKGELRERLLDVLEMDFSELSELCDAIASLAEGIEDKAVLRFHKGSLKIAMKQSGLEAAQKLLREHLNKRENLGPVKGGIVDLTQEMAAKGCATLGQLFWKEYYCCGKRIRSRYTSREEHYEDEFSKICEMQGFDAELRKKLYDTIFFQRPLKSQKGMVAKCPFEQSKKRAPISHPLFEEFRMWQTLNNIKTQPWGDDELRPLTAEEKAAVIPKFQRAKVSFDFSDIAGFKNLTPAGQDYGYIGDKDSAAHVKFNYRPDQSISGCPLTAALMRLFGKDDYEQAMFEAYRGEKHKKVDGETKPKTPDDIVNEVWHVLFSFDKPEMLKAYGVNKLGLCGKGATAFSKIKPRQGYGALSLSAIRRILPYLRQGHIYSHAVFFANLPAVIGGAVSEFPEIEKEMTEIIDSHGRYQKRVKLTNYFHELRRKKPEDIEYWISKGWNPWCVEVGKASTKLFGIEQWDELGESGQERLCLETRDMLNGLPDDTGFIELLTVEKRIKDYLLEWADAQGKRAEVETRLEKLYHPSKEELYEPVRDKDGKPTELGNPEISSIRNPVFNRAMHRLKTVVNELIRTKKIDESTVVHLELAREMNDANRRAALRIWQKGNEESRANAVKVIETHYKDQGHENEKAFPGQILKYQLWLEQEENCPYCDTKIGFSEVLTEQTEVEHTIPRSKCCDNSKENKTVAHKACNQRKNNRIPFECEDYEKILQRIDHWRGRVNELDHLIERKKNAAKHAADKDAKDKIIQARLILQFERNYLWGKYRRFTMKDAPEGFKNSQLVDTRIITKYARSYLRSFFPTVHTVNGKITDDFRHYWGLQKDGEEKDRGNHVHHAIDAIVAACITRRQYQQLAEAYGKSEKGKEKFRVEKPWGHFVEDMNGLRNEILISHYAPNHLLKQTKKKVKVRGKVVVQQGQTARGSLHKDTFYGAIKRQEKNRKTGEIEEAIKYVVRKPVSDLTTKDIDNVVDDKIREILRRPIELQGEIKELRKKLRRTADEDKKPVQEKMASLQSELESLKPELPNKNGDPVPIKKVRICSSLTNPIELKKQRDKSMKNPKLYKERYYVNNDGNYLMAIYEEKNERGKDAWASQIVGNLSAVKLKAGNLVSLEKDGLPLKCIVRGGMMVFLMKDTEIPSDIWGMDGEERASRLYIIRGIDDDGIKLYYHGEARQTTEVLKHMNAVITESNRRNNVLDKKGNVKASKLTTPKGGTPDKLLGQHDDYPYVKIQPSNFNALLEPVDFRLNVLGEVEFMEE

SEQ ID NO: 1923 - protein, 1252 aa, unidentified
  REGION 1..1252: note = Description of Unknown: Cas Enzyme sequence
MKKILGLDMGAASIGWAVVEENEDAIKILELGTRIVPYEGTEGRDFAKGAGESRNSIRTKARTTRKGYDRYQLRRRYLLDTLLKNDMMPDEKLFKLPKMELWALRDKAVEKEITKEELGRLFLWLNQKRGYKSGRIDANLEKKDTEYVADVKERHEKIKEQVQTIGQYFYGKLCADEYYRVKENIFPREAYIEEFDAICERQKQNLNLSDEFIQKIRDEIIYYQRPLKSQKGLVSVCELEGFTRKGSNGKEYFVGPKVAHKSSPLFQIAKIWENINNIKISSKKGENLNLTIEQKQVLFDYLDNNEKLSSTELFKILGLKKNEYVVNKQLERGLQGNITKLAIVKCLENENYNKFLKLDFKIVEKEEFGYYCDKKTGEILGKKIRKYIDPLIEKAPFYQLWHTIYSISDTRECCNALQQKFNFDETTAIRLSNIDFRRLGFGNKSVKAMRKILPYLMEGDGYSVAKSYAGLDNSSSMTEEENLKRKLLDKLRPIEKNSLRQPIVERIINQMVNVVNSLIYKYSEKNEKGEVIVPFRFDEIRIELARELKQSREERNKADKSISKRQRENEDIEKRLKEYGLRATRRNRVKWRLFEEVDNKEKKMNAICIYCGQTISLTDAIKGVEVDVEHIIPKAKLFDDSQSNKTLAHRKCNSTKGDMTAYDFMKAKPDELFNAYVERVNSLYINKIIGKAKRDKLLMTESKIPSDFIDRQLRESQYIAKKAREILQTICYNVWSTSGTVTAELRHLWGWDDVTMNLQMSKYKELEQTEVVEWESEHGKRKHTKEIISGWQKRDDHRHHAVDALTIACTKQGYIHRFNTLNSSKTHEDMEREVEKCSRKFREKRSLLEKYIISKQPITVSEVEKAVSKILISFKAGKKVAVKGSRKIGKRGNKKIVQTNIIVPRGALSEDSIYGKIKTIEKQKSLKYIFENSDLIIKTYIKNLVEERLRQYNNDTKKSLNSLKKEPIYLDKDQTIRLEYASCYGEEYVVKYTIDVNFNKLDKVVDRNIKDILKRRLDKFNNKAKEAFKDVQKGDETIKWYEDEGLKYPIRSVRCFTGLSAVVPVKKNEDGEDIGFVKPGNNHHISIYKDSEGNYREHVCTFWHAVERKKYNLPVIIENTNDIWDKILLKQEGTYPDSFLEKLPPVNYVLELSMQQNEMLVLEMQKEDFEDALKQKNYSSISKHLYVVWSLSNGDYWLRHHLETKNSELKSIEKAKEAKRYYRCKSLGALFSLNPIKVRINHIGEIVSVGEY

SEQ ID NO: 1924 - protein, 1326 aa, unidentified
  REGION 1..1326: note = Description of Unknown: Cas Enzyme sequence
TTKPENWLNKKKEFIVTTSILKDGSVKRSYKAVDSTKDWLAVKKKTEQDLNKFDGTVGEYIYDTLLKNKDQKINGKLVRTIERKFYKEEINRIVTKQMEFHKELRDKELYKKCIYELYTNNDIYRKSIENRDFRYLLVDNILLYQRPLKSKKSLISDCPYESRKYVNKDIGEICNVPIKCTVKSNPYFQEFRLWQFISNLKIYQKEKRIEAVKSNGIAYSKLETDVDVTRQFIKSKEDLVSIFEWLNDKKEINQETFLKYKPFKIDKKDILKYRWNYVEDANKKYPCNKTRAAILAKFSKEEKVKLSKELEYKIWHLLYSITTKEEIDKALSITKGKGNKIYILLKEVLSDETIEKLKRINFEEKDYAAYSEKAIKKLLPLMRIGKYWSADNFGTNITERINKIITGEYDEKIKDRARKHAMTFTDISDFEGLPVWLACYIIYNRHSEVGEVIKWNAPKDIDTFLNDFKQHSLRNPIVEQVVTETLRVVRDIWKQIGHIDEIHIELARELRDPANVRKNISEKNYKNENTNLRVKAILQEFENPEYQVENVRSFSKSQQDLFKIYEETVLDSVGEEIPSDIEKIVKSFNNTDKKNQPTISEVKRYKLWLEQKYCSPYTGEVIPLGKLFTSDYEIEHVIPQSRFFDDSFTNKVICESAVNKLKSNQLAHEFITNNHGQKVDVGNGKVVTIFEIGSYEEFVSKNYSGSKKKKLLLDDIPEAFSQRQLNDSRYISKYIKNILSNIVREKTESGDLEPEAISKNVIVSVGSMTDTLKKDWGMNDVWNSIVLSRFERLNKITNSDNFTTLTKNNHTIPCMPLELQKGFNKKRIDHRHHAMDAIVIACVTRKHVQYINSHNGQIKDKAVLNGLARQLRTYIPVEYKGKVKNADGVWIESGKLIKRDIPKKYIKPWPTFTEDSRKALENIIVSFKQNLRVVNKASNVYMSYYDEKGNLRIDKNGNKIKGFTRQTDGHNVAIRKPLHKETNYGLVNLQRKKQVSLKDALLIPDMIVNREFRSKVKELLSSGNDYKDIKAFFEKDPDVWNDVNLKKIEAYFYTSNTDTKYVATRFTNDLVNVFSGIKAYDKAIKKIESITDKSIQKILIKHLENNNKNPEIAFSADSIEKMNENILELNNGKKHCPIHKVRLFEILGEKFALGKVGNKSDKYVEAAKGTNLYYGVYSKEKIDKKTGEIKYQRVFETIPLNKVIENLKNKLSPVPEENNSGDKLMFYLSPGDLVYVPNASEIQGIDIDNITSLNKIKIANIDNNRIYKAVSFTGNESYYVNESVAIPIFNKVEFGPLNKMGRALTEEMVKDLCIPIKVDRLGNLIK

SEQ ID NO: 1925 - protein, 1554 aa, unidentified
  REGION 1..1554: note = Description of Unknown: Cas Enzyme sequence
MKKILGLDLGTNSIGWALVEHDAEIRNGKILGMGSRIIPMTQDVLDTFSGGKPLETQTALRTNYRAIRRMRERHLLRRERLHRVLNVMGFLPEHYANQIDFENKLGQFLEETEPKLAYKDSSFIFKKSFEEMLSDFKHNQPQLFYKKENGKETKIPYDWTIYYLRKKALTQKIFKEELAWIILNFNQKRGYYQLRGEEDEDATRTAQTRIYFDTQVVVEIIDTGSVYKGLKVIQIKLENGDTGKYFSKEIPNWVGVQKNIIATVDLDKDGNDRFEDDGNLKRRFSIPSEEDWEKKWKLIKIKTEKEIKDSQKTVGSYIYDTLLQKPNQKIRGRLVRTIERKFYKDELKQILEKQIELQPELFTPDLYNDCVRKLYRHNEAQQFVLSKRNFVHLFVEDIIFYQRPLKSQKSSIGNCKMEFRVHKDKDGNEIKEFLKTTPKSNPLYQEFRVWQWLNNLKIYRKEDDVDVTSEFLKDVDDSVRLFDFLMSQKEVGHCDILKHLLTPILKGKYPNSKITAINKEVDKEISKYRWNYVFDDSKEKEEDKSKKYPCNTTGYEIRWRLKKVENLPANILTPEIEQHLWHIIYSVTDKKEYEMALKSFAKKYNLDEVSFVENFKKIPPFKSEYGAFSEKAIKKLLPLMRFGYYWNSNAIDAKTKERINKIITGEYDEDIKNRVREKTINLTEINHFQGLPLWLASYVVYGRHSEAEISDKWTFITDLEKYLEDFKQHSLRNPIVEQIVTETLRVVRDIWKHFGQGAAKFFDEIHVELGREMKNTADDRKYLSEQVRINEATNLRIKALLMELKENSDGKLSVKDVRPYSPVQQDVLRIYEEGVLNSNIEFPEDILKISRTAQPSKPELQRYKLWLEQKYRSPYTGQIIPLGKLFTEEYQIEHIIPKSRYFDDSFNNKVICEAAVNQMKDKLLGLEFIQKYYGQEVEIGLSKIVRIFTVNDYKDFVKQNYVNNNAKRRNLLLDDIPEQMIARQMNDTRYVSKFISALLSNIVRAEKDDDGINSKNLIPGNGKITNVLKKDWGLNDVWNDLILPRFERMNQLTNSEAFTYWNEQYQKFLPVDYSPFDSKKIEKKRIDHRHHAMDALVIACMTRDHVNLLNNQSAKSDTSRYDLQNKLRHKVKETWIHKETNKIIERDIFKEFKKPWENFTVDTQNELEKTIVSFKQNLRIINKATNYYEKWIEKNGKKIKETIKQEGINWAVRKPLHKETVSGKVDLRRIKVPRGKILTATRKNIDTTFDLKTIESITDTGLQKILKNYLAYKNNLPELAFTPEGLDELNENIKQFNDGKDHKPIKKVRIFELGNKFPLGESGNKKDKYVEAAKGTNLFFAIYESKEGKRNYDSIPLNIVIERLKQGLPPLELKGENDFYLTPNDLVYVPNEEERENNDNINPKNFNKEQKKKIYKVVSFTGNRLSCVPCNVSSSIVNKLEFTQSNKVEFTKEKEILIKVEVDRLGNISLPNPSNKSNTNSSDSDNTAKEPGTSYATTKKITIFQSPEDAENSQLDYWAKLTPEQRFERFLELMNRFYKFVKPDWSTKKIILDL

SEQ ID NO: 1926 - protein, 1504 aa, unidentified
  REGION 1..1504: note = Description of Unknown: Cas Enzyme sequence
MKKILGLDLGTNSIGWAVINSSVDIEGKEQLKNISASGSRIIPMDAATLGDFDKGNSKSQTAERTRLRGVRRLLERSLLRRERLLRVLSVMEFLPEHYASQLNRYGKFISGTEPKLAWYKTSDGRYTFLFQDSFSEMLSDFQSHHPQLLEGGKKIPYDWTLYYLRKKALFEKVTKEELAWILLSFNQKRGYYQLRGEEEQEDDKKQVKYYALKVVSVEDSGDRKGKDIWYNVYLENGWKYRRASSIPLDWVGKIKEFVVTTELDDTGNLKKDKDGEVKRSFRAPKEDDWGLLKAKTQEQIDQSGKTVGAYIYDSLLDTPEQKIRGKLVRTIERRYYKDELYRILKKQQEFHSELRDSSLLAACIEELYPHNEVHRNILYTQDFAYFLVEDILFYQRPLKSKKSLIDDCPYESRVYKKEGALCNVPLKCVAKSHPLYQEFRLWQFISNLRIYQREKTVDGSLKTDVDVTGDFLKDENGYVALFEWLYERKNVDQKALLGYKPFGINKKEQTAYRWNYVEDKSYPCNETRAIIKARLEKAGVKDSFLTKEREEALWHILYSISDKQELLKALATFADKHGLDNAFVEAFAKIPPFEKSYGAYSLKALKKLLSLMRMGKYWNQNAIDGKTCERIEKILTGEYDETIRNRVREKAMHFTDLSSFRGLPLWLASYVVYDRHSEAKDIAKWKTPEDINVFLRGFKQHSLRNPIVEQVITETLRTVRDIWKKEGQIDEIHVELGREMKNPVDKRKQITAQILENEYTNLRVKALLTEFMNPEFEIENVRPYSPSQQEILRIYEDGVFAGISDKEIPEDIASILKKFKDSDVKKYPSRSEVLRYKLWLQRYRSPYTGRMIPLGKLFTAEYEIEHIIPQSRYFDDSFANKVICESAVNKLKGNLLGYEFIKKHSGQIVELGRGDVVPVFTVEQYERFVKESYFNNAKKKEKLLLEEIPDSFIERQLNDSRYISKVVKSLLSNIVREEGEQDAVSKNVIVCTGKVTDRLKKDWGIQDVWNRIVLPRFLRLNELTDSSDYTIMSTNGNIIPAMPLHLQRGFNKKRIDHRHHAMDAIVIACASRNIVNYLNNASAKKGAKISRYDLQYLLCDKVKTDAAGNYKWMLRKPWETFTQDVYAALMDIVVSFKQNLRVINRTTNYYQHYNTEGKKIMVPQAKGDSWAIRKPMHKDTVYGEINLRKIKTVSLKEAVKNPLRIVDKSFKHKLQELLHTGYNLKAITNYFENNKDVWADINLKKISVYYFTKETNERYFATRKALDTSFMRSKIEEEIADTGIQKILLNHLQDNDNNAEIAFSPDGIERMNQNIVALNEGRWHQPIYKVRVYEKADKFPIGEKGSKSAKFVEAAKGTNLFFAVYESVSEDKKTGELVRKRTFASIPLNQVIERQKKGLPSAPADANGNLPIFVLSPNDLVYLPTEEERKNNTFSFPLDRERIYKMVSSSGNQCFFIKAFVANVILDKKEFSPLNKMERAITEEMIKEICWPIKVDRLGNITLK

SEQ ID NO: 1927 - protein, 1530 aa, unidentified
  REGION 1..1530: note = Description of Unknown: Cas Enzyme sequence
  MOD_RES 45..48: note = Any amino acid
MNINFLIMKKVLGLDLGPNSTGWAVVNKEEDENGGLGRLTGIEAXXXXIIPMDAATLGDFGKGKSISPTKETTRLRGIRRLRERFLLRRERLHRVLALLKFLPAHYANSLDRYGHFLKGTEPKLEWYKNEAGEWEFLFQEAFDEMLADFKRFSSAFVGGSKKIPYDWTIYYLRKKALTEKISKEELAWILLNFNQKRGYYQRDEEEDTDNETVERLKVVSVTKGEKEKKGGYWYNVLLENGITYRAAFANDISCWVGSEKEFLVKRFEKKDKAPQLSVLPSFEEIDKMSDAQKNRLYAKIKLKTEKTIADSGKTVGSYIYDALLQKPCQKIRGKLVRTIDREFYKEELLRILEKQCEFHAELQDPDRYKACIEELYPQNGAHRDSIVKRGFVYLFIEDILFYQRPLKRKKSLIADCPYESVCCEDKETGEKKHYPIKCIAKSNPLFQEFRLWQFIINLRIYKKEESQDRDVTNELIKTEEDYVALFDWLSEKESIKQGDLLKFSHFGLKKKEIGSYRWNYVEDKNYPCNETRSKIVSRLKKCDGIPENFPTQEDEMALWHILYSVSKSELEKALNSFASKHGLNSTFVDNFKKFPSFKNEYGPYSAKAIRKLLSLMRIGRYWNETDIDLATRLRIDKIVSGEYDETIRARVREKTIHLSGISDFKGLPVWLACYVVYDRHSEVKYITKWNSPDDIDAYLKAFKQHSLRNPIVEQAVLETLRTVRDIWKKVGRIDEIHVELGREMKAPADKRAQMTAQIAENEAANMRIKYLLTEFLNPDLEIENVRPYSPSQQEILRIYEDGALNSVAEKPTEIEDILKKLNERDVQKRPTKSEIEKYKLWLEQHYRSPYTGVLIPLAKLFTSAYQIEHVIPQSRYFDDSLSNKVICEAEVNTLKGNMLGHEFIEAHHGEKVSISDGKTVTILSVEAYETQVKETYERNRGKMKKLMMNDIPDDFIARQLNDSRYISKLVKSLLSNIVREEGEQEAISKNVIPCTGGITDRLKKDWGVNDIWNAIILPRFRRMNELTERTDFTAINQQGHEIPAMPLELQMGFNKKRIDHRHHAMDAIVIACADRNICNYLNNESARAGSAISRHDLQRLLCDKVKTDDNGKYKWLLKKPWDTFTQDTKSVLEQILVSFKQNSRIINKSGNRYWHYVDGKKRLVEQEKGERWVIRKSLHEATVYGEVDLRRVKTVSLNAAIKNPQAIVDKELKKEILSLLAVGYDVEKIEKYFDEHCDVWQDVNLSKIEVYYFTQDANERFFATRKSLDVGFDKKKIENITDTGIQKILLRHLAEKGDDPKIAFSPEGIEEMNRNIVRLNNGKSHQPILKVRIFKNADKFEVGQSGNKRSKFVEADQWTNLFFAVYESKSVDEKTGAVERNRSFVTIPLKEAIERIKAGLPVAKEDENGKSPIFVLSPNDLVYLPTKEELEKGEIGIPIDRSRIYKLVDSSDKTANFVPYIIANVIYSLKKDVAKDFCKGEDLIQNELGLGSSQSKNQRAWTSDCEMIKKICVPVKVDRLGQIVEIGKLS

SEQ ID NO: 1928 - protein, 1504 aa, unidentified
  REGION 1..1504: note = Description of Unknown: Cas Enzyme sequence
MKKVLGLDLGPNSIGWSVVNKEEDENEGRERLTGIEATGCRIIPMDAATLGDFGKGNSVSQTKETTRLRGIRRLGERFLLRRERLHRVLALLDFLPAHYANSLDRYGHFLKGTEPKLEWYKNEAGKWEFLFHETFDEMLADFKRFSSAFVENPKKIPYDWTIYYLRKKALTEKISKEELAWILLNFNQKRGYYQRDEEEDTDNDITVERLKVVSVTKDEKEKKGGYWYNVLLENGITYRAAFANDISCWEGSEKEFLVKRFEKKDKAPQLSVLPSFEDIDKMSDAQKNRMYAKIKLKTEKTIADSGKTVGSYIYDALLQNPCQKIRGKLVRTIDRKFYKEELLRILEKQCEFHAELQDPDLYKACIEELYPQNGAHRDSIVKRGFVYLFIEDILFYQRPLKSKKSLIADCPYESVCCEDKKTGEKKHYPIKCIAKSNPLFQEFRLWQFISNLRIYKKEESQDRDVTNELIKTEEDYVALFDWLNEKESIKQDDLLKFSHFGLKKKEIGSYRWNYVEDKNYPCNETRSKIVNRLKKCDGIPEDFPTQEDEMVLWHILYSVSDKLELEKALNSFASKHGLNSTFVDNFKKFPPFKKEYGAYSAKAIRKLLSLMRIGKYWNETDIDPATRLRIDKIVSGEYDETIRARVREKAIHLSDISDFKGLPVWLACYVIYDRHSEVKDITKWNSPDDIDVYLKAFKQHSLRNPIVEQVVLETLRTVRDIWKKVGRIDEIHVELGREMKAPADKRAQMTAQIAENEAANMRIKYLLTEFLNPDLEIENVRPYSPSQQEILRIYEDGALNSEAEKPTEIEVILKKLNERDVQKRPTESEIRKYKLWLEQHYRSPYTGVLIPLAKLFTSAYQIEHVIPQSRYFDDSLSNKVICEAEVNSLKGNMLGHEFIEAHHGEKVSVSDGKTVTILSVEAYETQVKETYGRNRGKMKKLMMNDIPDDFIARQLNDSRYISKLVKSLLSNIVREEGEQEAISKNVIPCTGGITDRLKKDWGVNDIWNAIILPRFRRMNELTERTDFTTINQQGHEIPAMPLELQMGFNKKRIDHRHHAMDAIVIACADRNICNYLNNESARSGSAISRHDLQRLLCDKVKTDDNGKYKWLLKKPWDTFTQDTKSVLEQILVSFKQNSRIINKSGNRYWRYVDGKKRLVEQEKGARWAIRKSLHKDTVFGEVNLRRVKPVSLNAAIKNPQAIVDKELKMEILSLLAVGYDVKKIKKYFDEHCDVWQDVNLSKIEVYYFTQDANERFFATRKSLDAGFDKKKIENITDTGIQKILLRHLAEKGDDPKIAFSPEGIEEMNRNIVRLNNGKSHQPILKVRVSEKADKFEVGQSGNKRSKFVEADKGTNLFFAVYESKSVDERTGAVERNRSFVTIPLKEAIERIKAGLPVAKEDENGNSPIFVLSPNDLVYLPTKEELEKGEIGMPLDRDRIYKMVSSNVRDCFFIRQTVASSIVDKQEFSSSNKMERALTGEMIKKICIPLKVDRLGQIVEIGKLS

SEQ ID NO: 1929 - protein, 1510 aa, unidentified
  REGION 1..1510: note = Description of Unknown: Cas Enzyme sequence
MKRILGLDLGTNSIGWAIINKSFDNEGNELLCGIEAAGSRIIPMDATILGDFNKGNKVSQTKNRTQARSVRRMYERQHLRRERLHRVLSVLGFLPPHYSQQLDRYGKFLPDKEPKLAWYINDAGKSHFLFQDSFQEMLDVFRKYNPSVIIGSHKVPYDWTIYYLRKKALCKKIKKEELAWILLNFNQKRGYFQLRDEEEEQVSTKTRQYFDRQQVVDIIDTQEVYKGLKIIQVVLANGTQGKIFKKEIPDWIGQIKDIIVTVDIDKDGKDKYDEDGSLSCRFKVPSETEWETEWKLIKEKTQHDLEASGKSVGEYIFDTLLHNPTQKIRGKLVRTIERKYYKEELYRILSKQKEFHDELNDKQLYERCLEELYPNNPAHKNLMATHDLPYFLINDVLFYQRPLKSKKSLIDNCSFEGHEYIDRETNERKFSPIKCIAKSHPLFQEFRLWQFVSNLRIYQKEKEIDGRLMTDVDVTQEFLRDEEDYVALFDWLNGKKEIKQEQFLKYPTFGLKKKANQYRWNYVEDKPYCCNETRSLMLVRLEQAGIPLTFLTREREKALWHILYSVSNKQELKQALASFAGKNGLNKNFVEIFVNTPAFEKSYGSYSAKAIKKLLPLMRMGHYWKEENIDVHTLERINKILSGEYDENIKNRVREKAIHLEDLSSFRGLPLWLASYIVYDRHSEVKEACQWKSPQDIDEYLKAFKQYSLRNPIVEQVVLETLRTVRDIWKQIGTIDEIHVELGREMKNPAEKRKKMAQKMLEKENTNLRIKSLLVEFMNPELGIENVRPYSPSQQDLLRIYEEGAWNASNADDKMHDEMLSILKKFNESDSKKRPTSSDIKRYRLWLEQKYRSPYTGAVIPLSKLFTPAYQIEHVIPKALYFDDSFSNKVICESEVNKLKDKQLGYEFIKKHHGEKVQLSLGGVVEIFSVDAYEQFIKENYSQNSAKMKKLLMDEIPEQFTERQMNDSRYISKLVVSLLSNIVRNEEEQEAQSKNVVVCTGGVTDRLKKDWGVNDVWNKIILPRFERMNQQTGTSDFTSVNSNGHTIPAMPLDLQKGFNKKRIDHRHHAMDAIVIACASRNIVNYLNNQSAGEHGKISRYDLQHLLCTKVQDGNGYQWVINKPWKTFTQDVYETLRNVIVSFKQNLRVINKTSNYYQRKENGRTILSKQDKGDNWAIRKSLHKETVFGEVNLRKTGSTSLKVVLTNPKVVVDKDLKKKLIELIQQGFNEKQIKNYFKEHKDSWQDVNLKKIPVYFFTKDTQEHYFASRKLLDDTFKQDSIKESITDTGIQTILLKHLKEEGNDPKVAFSPEGIERMNKNIVHLNNGHQHQPIYKVRKYEKGDKFAVGARGNKSSKFVEAAKGTNLFFAIYEQEQVEKSNGEVVKKRTFATIPLNVVISRQKQGKSSAPADENGNLPLFVLSPNDLVYVPTREELKNGQLPDNPHPDRIYKMVSSSGNQCFFIQYGVSSMLWDKNEFSALNKMERAITGEMIKEICIPLNINRLGHITYRL

SEQ ID NO: 1930 - protein, 1383 aa, unidentified
  REGION 1..1383: note = Description of Unknown: Cas Enzyme sequence
MKKILGLDLGTNSIGWALVNEAENSEEKSSIIKLGVRVNPLTVDEQQNFEKGKSITTNADRTLKRSMRRNLQRYKLRRENLISILTKNNFISENTILSENGNSTTFETYRLRAKAAIEEITLEQFARVLLTINKKRGYKSSRKAKGSDEGELIDGMEVAKKMYDDNLTPGQLCLNLLQAGKRNIPVFYRSDLQNEFDSIWNKQKEYYKDILTNELKETLKGKNEKQTWAICQTPFKIVGIKRTTKGEELKKENFAWRVKSLSEKIDLEELAVVLQKINGQIKSSSGYLGEISDRSKELYFTKQTVGQYQMSILAKNPNASLRNMVFYRQDYLDEFEKIWETQSQYHKELTSELKKEIRDVVIFFQRRLKSQKGLISFCELENQQKSVIVDGKPKIITIGRKVCPKSSPLFQEFKIWQILNNLEITNKINGEKRLLEQEEKDSLFLELTIKDKLSKDEVLKLLFNNFKELDLNYKSVEGNRTQATLFTAYQQIIEVSGHGENDFSKMKYADVIEIVEGVFTSLGFNTEILKFNADLAINELEKQPLFQLWHLLYSYEGDNSNTGTQKLIEKISTKYGFDKEYAAIISKISFQDDYGSLSTKAISKILPYLKDGDEYSKACLHAGYNHSKSSLTREEIENKTLKDKLEILQKNSLRNPVVEKILNQMINVVNAVVETFGKPDEIRIELARELKKSAKEREDMTKAINDSTAAHEKIKLLLQKEFGLSHVSKTDIIRYKLYSELEPRGFKTIYSNTYISPEKLFSKEFDIEHIIPQSRLFDDSFSNKTIESRSTNIEKGNETAIDYIAAKYDENYLQDYLSNIEVLFKNGNISKAKYNKLKMRGKDIPTDFINRDLRDTQYIARKAKSILEELVREVISTSGAITDRLREDWQLIDVMQELNWDKYDKLGLTEIIEGRDGQRIRRIKEWTKRNDHRHHAMDALTIAFTKRSYIQYLNNLNARSDKSSSIYGIEQKELYRDNLGKLRFKPPIAIDSFRAEAKKHLQNTLISIKAKNKVVTSNINITKKPGPDNKRKQLTPRGQLHNETVYGQIHQYVTKEEKIGAQFSVEYVQHVAKKTYRDALLMRLSENNNDPKSAFTGKNSLSKNPIFIDEAHSMAVPEKVKLVFKEPAYTIRKEISADLKIEKVIDVKIRNILEARLKEFNNDAKKAFSNLDENPIWLNKEKGISIKRVTITGVSNAIPLHDKKDHHGNIITDAQGRKQAVDFVSPSNNHHVAIYKDQNGNLQEKVVSFFEATTRANQGLPIIDKEYNNTEGWKFLFSMKQNEYFVFPNESTGFNPSETDLLDPDNYHLISPNLFRVQTMSKVMYGNSIIRDYKFRHNFETTVKDDKELQNITYKQCKSLDFANSIVKVRINHIGQIVSVGEY

SEQ ID NO: 1931 - protein, 1195 aa, unidentified
  REGION 1..1195: note = Description of Unknown: Cas Enzyme sequence
MSKKIFSFDLGTNSCGWAVIEEGQGPKIIDAGVRIVPSDPNFHGEFEKGNPASKNASRTEKRGIRRNNQRWKQRRDNLSRKLKGLRIYPSDSLMNLDGRSLYELRAKAVKEKLPLEKFSRVLLHILQKRGFLSNRKSQSEEESSSAYKQTISENTDALEGRTIGQYLFSLIDEEPYTAIRGKVFNRADYRREVDLIWDCQHDYYPEILTGNSTTPKGLYNEIVNKILFYQRPLKSQKHLVSKCTFEKNLRATPKSSPLFQSFNVLQKLNSVRIKEKGSRKERTLSDDEREKLRMALYDHKLLNKYGKLTKTKALKVIGLTPSIYQLNYDDLDGDRTYQKIVEAFEQANATDYESFLVYNASEEDMLYKIWHILHSEEKESTVIRLLTDKLKIDVDVAVELSKISFNSDYGSLSAKAIKKLLPHLNEGLQYSEACDSAGYDHSGYKTEMALKGKMELLKRGSLRNPVVEQILNQMINVTNALMEKYGRPDEVRIELARELRNSAKVRKKISAANRDAQTANKKRRTKLIEEFDYKIVNGRDVQRMRLWEETDHVCLYCGQHIQQSDFLSGTAEIEHILPKSRSANDSLSNKILSHYRCNKEKDNATGYDYVASKGEEQLDAYVQRVEELLSRKKINYTKYKNLLCPGEDIPTDFLNRQKQDTAYIVREASKMLKSITPKVATVPGSITNYLRREWKLDRILEELNFPKYKEAGMIEDKIIKTSGGGTKTIQVVKDWSKREDQRHHALDAIIVGLVSHKMIFGFNNLNKFFLDEQGDLSSQEKEQLKKEFEEETGLSYSDGLNAFTKRRDITQSPPIDNIEAEVKKYLARILVSFKKAKNKAVSLNKNKIKGCAKEQTTIVPRGPLHEETLVGQIRVRKTIPIDTKLTMDKVECIIDPQIRLLILDRLESVNGDPKKVFSKSKYDKVPIVHKHKKLDTLDIWEYRFTKRVNIDDKLTDKRIRNIIDDRIRHLIQDYVTEKGGPPAKAFKNYLEYPIKTYLGKGEKDNQQHVLKKVKIFADGNYTSTRTKTVNGEDMPNDFVTLGNNHHALIYQNDEGVYSSKLVSLWDAVAQADINFKEDGKLKSVIDKTDSDQGRFVFSLQINDLVLIDIPIDDRDRLDQLGRNFLSERLFRVQSIASAGKGLDIFYRHHLETRVDKKDLKELRNITWERIQSDKHFHRLLKVRINNIGEIVGIEK

SEQ ID NO: 1932 - protein, 1480 aa, unidentified
  REGION 1..1480: note = Description of Unknown: Cas Enzyme sequence
VICFKIVLQNYELFFSKQVISVEKYIFLEKMYFESNIMKKILGLDLGANSIGWALVNESENNDEKSSIVKLGVRVNPLTVDEQQNFEKGKSITTNADRTLKRSMRRSLQRYKLRREALIESLKEHGLISDDTILSENGNSTTFETYRLRAKAAVDEITLEQFARVLLQINKKRGYKSSRKAKGIEDGQLIDGMEVAKRLYEEHLTPGQLCLQLLNAGKKYFPDFYRSDLQAEFDHIWSKQASFYPEIFTETLKEALQGKNEKATWVICRDNFSWTETERVWNELEAKHENIVKEKRLVGIKREGNIQEQKLENFIWREKALSEKMHPEQIAVILSKINSQINNSSGYLGTISDRSKELYFNKQTVGQYQMVVLNNNPNAGLRNMVFYRQDYLDEFNTIWEEQAKYHPELTDELKTEIRDIVIFYQRRLKSQKGLISFCEFESKQIEVIVDGKTKTKTVGSRVAPRSSPLFQEFKIWQSLNNLEVSGKGKKTKKKKGALPNENVDQEDLLLVYGKRELYQEEKAILLHELSIKEKLTKTEILKLLFDNPQELALNLPSIQGNLTVATLFKAYQTIIEHSGHALDLKKSANEILADMKTIFTALGWNTAILQFNSDAENLDAEPMYKLWHLLYSFEGDNSNTGNENLIQKLMRDYGFDRDSAVILANITFQDDYGSLSTKAIRKILPYLKEGNKYDIACEYAGYRHSKSSLTKEEKENKVLVDKLKILPKNSLRNPVVEKIINQMVNVINTIIETYGKPDEIRVELARELKKNAKEREELTKSLADTTKVYDEYKKILTKPLSEGGQFGLTYVSRTDIIRYRLWKELEQNGYNTLYSNTYISPAAVFSGNFDIEHIIPQSRLFDDSFSNKTLELRSINSEKGNLTAYDFVKEKYGETSHENSLDKYLARVEELYKKGIISRGKYNKLKMQTKDIPDGFINRDLGNTQYIASFARTMLETLCKNVIATTGSVTDALREDWQLIDVMKELNWDKYDKLGLTYYEENREGKKLGRIKDWTKRNDHRHHAMDALTVAFTKNAFVQYFNNKNASLTPTSNEYAIRAKYFENGKAIPPMPLNEFRAEAKRHLENTLVSIKSKNKVVTQNNNVTKKRGGVNKKVQLTPRGQLHLETVYGARRQYVVKEQIVNAKFDLEKVNTVCNKKYRDALLQRLQNNGNDPAKAFAGKNALSKTPIYYNVGFEKFEKLPEKVKTVTTETLFTIRKDVSSLTDLKQVEKVLDKKVKQILLSRIEEFNGEIKKAFSNLDENPIWLNKEKGISIKRVTITGISNAEALHEKRDKEGKLILDSEGNKIPVDFVNTGNNHHVAVYRMPVLDKMGNPVINEDGVPKYELQEKVVSFYEAVARSNNGFPIIDKTYKVSEGWEFLFSMKQNEYFVFPNEQTGFNPQHIDLFNPDNYSEISRNLFRVQKITHKNYVFRHHLETTVADSPSHLKRITWTDFRSSKGLDKIVKVRVNHIGEIVGVGEY

SEQ ID NO: 1933 - protein, 1162 aa, unidentified
  REGION 1..1162: note = Description of Unknown: Cas Enzyme sequence
MKKILGLDIGSASIGWAYIHESEDTNQKTKIKKLGVRIIPMGSEKEEFESGNAITKNADRREKRGSRRNNQRYKLRKRLLIKKLKVMGMYPFSEFGNKLQEEVTKGQNNNFVIYELRDKALKEKLSLQEIGRIFYHLNQKRGYKSNRKTNIDDKEIKDTESYLGRIDSLNTKLETEEKTIGQYLFELFQKDIYAKVKENVFLREKFIEEFDKIWDFQNQFYTEILTERSYSEIRNEIIYYQRRLKSQKHLVSECQFEKHHKAVPKSSPIFQYFRTWQKINSLVVLDKFGKSIEFTIEQKKELFNKLNNVKGLSSSAILKMFNFRPRTDYALNFPKVEGNQTRAALLKVFGNMGIDNLSLLDFNPLAKKIDQQPLYKLWHLIYSIEQPKDLVKILITKYNFTEEEAKELSKINYKSDYGSLSAKAIRKLMSYLLQGLTYDKACDELHSEDENKNQQYINNANNSDNSKDFQFNKIELLKPNSLRNPVVEKVVNQVINLVNAIVEESDLGQPDEIRVELARWLKQNIKQRKKTFKNNSKRNRENEAIIKRLQTELKFRTVSRTDLQRYQLWEESNYQSIYTGEQITLSKLYDKALYDIEHIIPKSRYFDDSFMNKTICESKINREKGDMTANDYMKSKSKQEYHDYIERVNNNKNFYNKKKKYLRMPEEDIPKDFISRQLNETHYISKKVTEVLKKATPKVTTTTGSVTDFLRYNWGLNDILKQLNIDKYKDADLTEVKENKIGKSEDRIVNWSKRDDHRHHAIDALVVAFTKPSHINKLNRLSQFVRDQKELKEKARYIEPPIDQLTAKVKDKVDDILISFKKNNKVISRKINRIKHNGKEIKQVTYVPRGALHRDNYYGKIKQYKKLKINTRFEEVDKIVDPKLKQIILQRLSQFENNPKKAFKGLNKKPIWLDATKTKELNEVTIFEETYSIRKPLNTNFKQVKKIIDKKVKGLVKERLEQFGNKHEEAFKDLETNPIWLDKKKTIPIKSVKIFDHGTKLRSIHKNINGKPIDFVYERNNHHIAIYELENGTLEEEVVSLWDVVERKLNGSPIINKQPDNNKRFVTSMEINEMFVMNLDPTQIDFYNPTNFSLISKNLYRVQKLSSSFYTFRHHLETKIDKTIFPFEISIRSLSDGKSGWLTFKPIKVRIDNLNRIVKVGG

SEQ ID NO: 1934 - protein, 1235 aa, unidentified
  REGION 1..1235: note = Description of Unknown: Cas Enzyme sequence
MKKVLGLDLGVGSIGWSLINIDENNVPCEIVALGSRIVPLTADDTNQFTKGQAITKNQDRTQKRTARKGYDRYQQRRENLTIEFRKHEMLPDERLIKLPVMELWQLRADAATPGCRLTLPEIGRVLYHINQRRGYKHAKADENGDKSQRDYVANINKRYAMIIGRNQTIGQYFAEQLKASKVETDRGAFYTYRIKEQVFPRKAYEAEFDQIMAVQREFYADVFTDAFINRLRNEIIFYQRGLKSCKHLVSLCEFEKKEYTNAKGETVFDGPKVAPRTSPMFQLCKIWETVNNIKVTNRRNEEFPITHTQRVEMANFLDNHEKMLLKDLFAILGVSAKEGWHGGKQFKSGLQGNTTKMQLKKALGSISNADKWLQFDVVIEETVDKNTGEVLGIVSRKVTKQPLYDLWHTIYSISDKAELASVLKKKYEITDESVVSDLFKLDFVRPGYGNKSTKAMRRILPYLQQGQMYSVACECAGFRHSESLTKEENATRTLLEHLPQIKKNELRQPIVEKILNQMVNVVNALIDKYGKIDEIRVELARELKQSKEERESLDKKMREQERKNEEYKSKIGEFDVRVSRKRIQKYRLWHEAEGICFYCGDKVSCANFLQGVDAEIEHIIPRALLFDDSYSNKVCACRKCNSNKGKMTAYDFVQTLGDEKFKLYLTRVDDAFKKHEISKTKRDRLLTPAAKIPEDFIERDLRLTQYISRKSVEMLKQVCRDVYSSTGSVTDFVRRVWGYDNVLHNLNLERYRKGDLTEMVKYDHRGQVHEEERIKDWTKRIDHRHHAVDALVIAMTSQAIIQRLNKLNTERDQMFKEVEKQSEEWRNDYSLLEQWLREKPHFTVAEVEEAVSKIAVSFKAGKKVATLNKHVKYVQGKKKVLQRDVITPRGALSQESVYGKIRTLEEKKPIKYAFENPDLIFKGYIKRLVEERLAKYDGNAKQAIASLKKDPIMIGKNRDVELTYATCYKDEYVIKYQLSSFVKMADIDSIVDANIRQRVKMRVAQFGGKVKDALKDLENNPVYADDKCTIPIKSVRCFTGLKPSAVTPVKYGSNGIAMGYVKPGSNHHIAIYRDRGGNLQEHVTTFWTAVERKKYGVPVIIKSPADVWDSLADREDLPEAFLSTLPDVTWTFVESMQQNEMFIIGMSDDEYNDAKRNNDVAALCSHLYRVQKISSKEYCFRLHIETTVDDKYNGNKNQMLSKEMGKLVVIQSMSSFLKNNLKKIRIDVLGNIIEA

SEQ ID NO: 1935 - protein, 1514 aa, unidentified
  REGION 1..1514: note = Description of Unknown: Cas Enzyme sequence
MKKILGLDLGTNSIGWALVGGIEENKEIFGMGSRIIPMSQDILGKFDSGQTVSQTAARTEFRGIRRLRERHLLRRERLHRVLNILGYLPDHYSKYIDFEKKLGQFIDENEPKLAWKEVDNNKFDFLFKTSFYEMVEEFKTSNPELFALNTKGEERKIPYDWTIYYLRKKALNTKIEKEELAWLLLNFNQKRGYYQLRGEEEEETPNKLVEFHALKVTEVTADEPQKGKTDIWYNVILENGWIYRRSSKTPLFDWKDKIKEFIVTTDLNDDGSIKLDKDGNQKRSFRAPSEDDWTLLKKKTESDIDKSQMTVGCYIYNTLLQNPSQKINGKLVRTIERKFYKQELEAILNKQKEFHPELRDSGLYSTCLEELYEINESHRNSIGTKDFTHLFLNDIIFYQRPLKSKKSLISNCKYEIRYKDKEKSTEEKFPIKCIAKSHPLFQELRLWKFVNDLRILEREKNLDGKLRMDVDVTSEFLKSEDDIVALFDWLNDKKEIKQDTLLSSYFKIKKKKGDDKHSHRWNYVEDKEYPCNETRAQMLSRLSKISNVPTGFLDKEKELALWHILYSVEDKLEIEKALKSFAMKHGLGEDFVDAFKKLPPFKKEYGSYSAKAIKKMLSLMRMGKYWDENNIDPNTKERIDKIITGEFDENMRNRVREKAINLKDITDFKGLPEWLVCYVVYNRHSESGDILEWKTPQYIEDYLKNEFKQHSLRNPIVEQIITETLRTVKDIWKKYGDFSEIHIELGREMKNPKEVRENMTKLNSQNENTNLRIKALLAELSNHDDIENVRPYSPSQQEILKIYEEGILNSGIEIPDEIMKITKNSQPSKSDLTRYKLWLEQKYRSPYTGEMIPLGKLFTSAYQIEHVIPQSRYFDDSLSNKVICEAEVNTEKGNYLGYEFIKNNEGRIIELGFGKKVKLFTLQEYEEFVKFHYSKSRGKMKKLLMEDLTEDFIDRQMNDSRYISKVVKSLMSNIVREEDETEAISKNVIPCTGMITNTLKKDWGLNDVWNRIVTPRFERMNELTKSNDFGHWTVKDGKKVFQTEMPLILQKGFQKKRIDHRHHAMDALVIACATRNHVNYLNNEHAKQKNSDIRYDLRNKLRRIEEIEIDRIENGIKIRKKIKVAKEFHKPWNTFTQDAQNALENIVVSFKQNLRVINKTVNKYQRIEDGKKVLATQTKGDSWAIRKPLHKETVAGIVNLRFKKEVNLSTAIDKWEMLVDKDLKTKIKQLINEGLDKKKIQKYFAEQENKWMGKELTKIELYYFSSDKESDVLVASRAKLDESFNAKKIESITDTGVKKILTNHLLKYENEGKEHPELAFSSEGIEEMNNNIRALNDGKNHQPIYKVRTYEPKGNKFNVGIKGNKKDKFVEAAKGTNLFFAIYQDNDSNRSYESIPLNIVVERLKQGLGEVPEINEKGHQLLLHLSPNDLVYVPSEEEINSQAKNTSISKLNRIYKMVSSSGTQCFFSRNDIANTIVNKLEFSALNKMERAITGEMIKDVCIKLKIDRLGNISL

SEQ ID NO: 1936 - protein, 1443 aa, unidentified
  REGION 1..1443: note = Description of Unknown: Cas Enzyme sequence
MRTVLGLDIGTNSIGWAMVKLGDFGQEGVIIALGSRIIPMDGDAMQKFESGNTVSKTADRRMARMARRLKQRFKLRRTRLIQALKVLGWLPADFPSDFKSIASNNNGHSFSISQYLPFDAATIQEATAAFGSKEIPEDWIVYYLRKKALTEKISRNELVRILYMMNQRRGFQSSRKDLQLEEAAENIKYPLSEKWIQLLTIEDISEITEEKGIKLLEIKAGGITGQTKRKHIPDWKGRTIELEVTKKTMKSGEIAYSFSIPDPNDWTNKKTALEENIRKSGYHVGEYFFHQLVQDRNYRIRQRIVERTLYRKEFEAIWKKQSTFHPELLDTSRLHDIALLLYRNNKQKQQELRANDLFHLFANDIIYYQRPLKSQKRSIGRCNLEAKYDDKGASYGIRVAPKSSPQFQEFRIWQTIHNLRILQLQGEIDGKTQIDIDCTDHYLTHETKARLFQLFDSRGNVSTSAILKELGLKEREYRLNYPSDKEFPGNETKAAFRKVFRKHGIAEAGERLFKDNEKYNKLWHIMYSLDNSRSIVSALSNPKHGFNLPEEVIIHLSKLPDFPRQYAALSTKAINKMLPLMRCGQYFDPAGFNAAIKGRIEKLITGEFDTGINEETRGKLTGLTDITHFQGLPTWLASYVVYGRHSERTTVGKYAAPDEIDILKLVPNNSLRNPVVEQVIKECLSLVKDIWMQYGQPDEIHIELARELKKTADERKKLDSRNKTHEAERKRIRAILRELPNGNPESPADMDRLRLWEETGNETARLSAIKFSKEPTKTEIEKYKLWGEQNHISPYTGKVIPLSGLFTPEYEIEHIIPRSRFFDNSFINKTICEACVNDFKGYRTARQLIETDGGRTVTHRGRTFTLLSAQQYYDHCKKTFRGAKYRNLMREDIPKDFVQRQINDTRYITRKIAELLYPVAKEKEGIVFTIGQITSELKDRWGLNRVWKQILQPRFERLEKITGEPLIDFDNSTGNIRFRKDYKRVDHRHHCLDALVIACTTREHIRYLNSLSAAEEAGRYRYLVKSRYSDFILPWQTFTQESRIRLQQVIVSHKNRNRLVGKATNKYTKWVEKTDGRWVKDVVRQVKGQLLSVRKSMFKEPLGKIVLREYKDMGLKQALTLQGKALSAKSKQLIPQIADRHLRKRINEIIKNSGFNISEAEKFLRKNPLRDSEGNIIRKIRTIEYNEYAAKRVPLDQTFTADKIDKIPGSPHSWLARLLRQHLLEYNGDPNTAFRGEALDLLDKKAGRPVNKVTIYEDIGKKTNFNGKLVEGDKGTNLFFVIYEHLQTKERIIDGSSSIPMLEAIERLANKWPVADDKPGYRTIILSPNDLVYVPEEGEDVENIDWPGEIARIHSRVYKMVSFTGSNCFFVPHYVASLLLPYDSKTKLGEFGSLNKSERSLDGMMIKNVCVKIKVDRLGNITEANGKKIARPIAVRQTAPENV

SEQ ID NO: 1937 - protein, 1396 aa, unidentified
  REGION 1..1396: note = Description of Unknown: Cas Enzyme sequence
MKKILGLDLGTNSIGWAVVNEKEDDREKSSITKVGTRKVSLTSEEQNNFNKGKSAGTNAKRTLKHGARINLQRYKLRRDVLIRVLKENNFITDDTLLSENGNNTTFETYRFRAQAADSEVTLEQLARVLLMINKKRGYKSNRKAKSKDESGQLIDGMDIARQLYDENLTPGQYTLSLIKQGKKKVPDFYTSDLNNEFERIWSFQKQFYPDLLTDDLKTELNGKDEKGVGTICSDKFGIVGIKRNTKGWEQKKEDYVWRAESLEKKMDLERLTIVFQKICGQIKNAGGYLGSISDRSKELYFSGQTVGQYKMSELINNPNRSIKNQVFYRQDYLDEFERIWETQATFHKELTPELKHEIRDIIIFYQRPLKSQKKLVAYCELESKQVEVEVNGKKKKVTIGQRVCPKSSPLFQEFRIWQQINNIQVSGYIIPESQTDLFGNTPANKKGRRFLLQDEKEILFKELNLKEKMSKTEILKLLFDNYKELDLNYKEVKGNTTLAKLFQAYKTIIEQSGHELNNLSNKSAGDIIDIIHKIFDGLGFNTDILAFDSSIQGKAFEKQPLYRLWHLLYSFEGDKSKTGNEKLIKKISDLYGFDKEYASILAGIVFEPEYGNLSAKAIRKILPFMKDGLEYSDACLYAGYRHSKRSLTKEEINSKQLADHIELLPRNSLRNPVVEKILNQMINVVNAVIVEYGRPDEIRVEMARELKLNNVRREECIRTINKSTSENESYRKKLQTELEGMEYVSRKDIIKYRLYLELESNGFHTLYSNTFIPLEKLFTREFDVEHILPQAKLFDNSFANKTIEKRSVNQEKGDRTAYDYVYSKYHEKGLEDYKKRVEDLYKKGKISKTKRNRLLTQEQDIPKDFLNRDLSNTQYIARKACEILESVVKTVTTTTGSITSKLREDWQLVDVLKELNWDKYDKLGLTEIIKGRDGQRIRHIKDWTKRNDHRNHAMDALTIAFTKPSFIQYLNNRSARSDKNSIISKIEQKELYRTADGKTKFLPPMPIDEFRAEAKRHLENILVSTKAKNKVVTRNVNVTKTKRTETNKREQVQLTPRGELHNDTIYGRRKFYDTDNEKVNASFDVSKIMTVADKRYREALLKRLEQFDGDAEKAFTGKNSLEQNPLYVDELHTKKVPDMVKTVKFKTIYTQRKGISDELKIDKVLDKRIRTILEERLAEFNGDAKKAFSNLDENPIWLNKEKGISIKRVTINSGLKDLIALHDKHDNNGRLILDKAGRKQPSDFIYTDGNHHVAIFCDSEGNIQEHLVSFYEAVARAVQHLPVIDKNYNKDKGWQFMFTMKQNEYFVFPNKETGFDPKEIDLFNPDNYEVISRNLYRVQKLSSKDYVFRHHLETTVNYKKELRGITWKRIRSLEHIRNIVKVRINHLGQIVVVGEY

SEQ ID NO: 1938 - protein, 1378 aa, unidentified
  REGION 1..1378: note = Description of Unknown: Cas Enzyme sequence
MKRILGLDLGTNSIGWALVDEAENKNEKSSITKVGVRVNPLTVDELSNFEKGKSITTNADRTLKRSMRRNLQRYKLRKENLVEILKENGFINVDTLLSENGNKTTFETYRFRAKAALEEVSLEELSRILLMINAKRGYKSSRKAKSLDEGQLIDGMGIAKKLYDENITPGQLVLELLKDGKKFIPDFYRSDLKAEYDKIWDFQKQYYPDILTEEFKKQIAGKGKVNTTKIFLAKYGIYTADNKNADKRLQTYKWRVEGLSKKLSREELAFVISDLTGTISNSSGYLGAISDRSKELFFNKQTVGQNLMMQLDQNPHTRLKNQVFYRQDYLDEFNTIWETQAKYHKELTPDLKGEIRDVIIFFQRRLKSQKGLVSYCEFESRQIEVDIDGTKKIKTVGSKVCPKSSPIFQEFKIWQVLNNIQIMDKSGSKSFLFQEEKEALFAELNLKDKITKSEALKLINKNTKDYDLNFKDIEGNRTLTALFKVYQTIIELSGHDGFDFNKMNAMDKIETITSIFNGLGYNTEILKFNSDLEGKEFEKQPMYQLWHLLYSFEGDDSNSGNEKLINKLTELYGFEKEYAKLLANISFQSDYGSLSTKAIRKILPYLKDGNEFSLACGYAGYRHSKNSLTKEEIENKILKNKLDILPKNSLRNPVVEKILNQMINVVNTIIDVYGKPDEIRIELARELKKSAKEREEATKSINETTAAHEKHRVVLQRDFGLTNVSRNDIIRYKLYLELENNGFHTLYSNTYVTPGKLFSKEFDIEHIIPQSRLFDDSFSNKTLETRSENIEKGNDTAQDFILRKYGDEGLEKYVERIEGLYKSSKLSKTKYNKLKMKGEDIPSDFINRDLRDTQYIAKKAKTILEELVKEVVSTSGSITDRLRQDWQLVDVMKELNWDKYNKLGLTEIIENRDGHRIKRIKDWTKRNDHRHHAMDALTIAFTKRSHIQYLNNLNARSDKAGSIYGIETNELSRDDNGKLKFNPPIPINEFRAEAKRHLENTLISIKAKNKVATININTTDKKNGVNKKKQLTPRGQLHLETVYGSIQQYATKEEKVNASFTEEQILKVAKKSYREALLNRLKEFGNDPKKAFTEKNSLDKNPLFLNEDQTQKVPEKVKTVSTEIVFTIRKDITPDLKLDKVIDVKIRTILETRLKEYGGDSKKAFSNLDEYPIWLNEEKGIKIKRVTITGISNAESLHEKKDKEGKLILDKNGNPQPVDFVNTGNNHHVAIYKDANGDLQENVISFFEATARVNQGLSIIDKDYKKQEGWNFLFSMKQNEYFVFPNEITGFNPSETDLLDPENYYLISPNLFRVQKISSKNYVFNHHLETMAVTGDTLKNKKQLLNITHRFIQSLSPIKEIVKVRINHIGQIVSIGEY

SEQ ID NO: 1939 - protein, 1502 aa, unidentified
  REGION 1..1502: note = Description of Unknown: Cas Enzyme sequence
MRKKIIGLDLGTNSIGWAYIERNSELGDGNIVDAGSRIIPMPQDAISKYETGNLQSSASVRTGYRSMRRLYERSELRRSRLLRVLNILGFLPQHYRDAIDFKVHLGQFKNHGEPLLPYKKDTNGKNTFIFTESFHEMLEDMRTYHPELLSNGRKIPYDWTIYYLRKKALSQPISKEELAWVILNFNTKRGYYQLRGKEEEIATNEHQFYDVLEIDSVEETGLNLKKKGYKWFKVHFTNGKVQNRTWKEAPCRVGDKVECIITYLVKKDGTPKMDENGEQLYKITAPDPTDWTLRKKRTESIITKGHVTVGEYIYDHLLVEPDDKIRGKYVHTIERKFYKEELRTILEKQKEFIPELRDKKLLLACISELYHNNYAHCSVLEKQDFTRLFVDDIIFYQRPLKSKKSLIADCPLEYYPFKDKDGIWKHRPIKCTPRSNPLFQTFRLWQFIQNLRIYRREEEHEGRLLLDVDVTGQFLSTPEDYCDLFDWLRAKSDITQKQLLAYPPFCLGKKAKDYRWNYVDDDKHAYPLCSTHHDISKAIKEVDDTLSLSAKEEKSLWHILYSVDDRYDLEKALRHFASKNGIDEENFVNAFINFKPFDKSYASYSEKAIKKMLPLMSTGRYWNAEGIDAHTMQRISHIVNGEVDKSISNSVREKCAGLDRIEKYQFLPVWKVCYIIYNRHSEATDTIRWTTPDDIDTYLKKELRQGTLRNPVVESVLSEALRVVRDAWRQYGRPDEIHIEMGRDLKQNKAQRQKANTIMLNNQQTNLRIRCMLQEFADPDFHIANVRPQSPSQQELLKIYEQGVFDSIGEIPDDIQTIIDHIGNKNHGISKSDMLRYKLWLEQKYQSPYTGCPISLSRLFTSEYEIEHVIPQSRYFDDSLSNKVICETEVNRVKGTMLAHEFIKSKGGSIVKGTGGKQYKILDAAQYEDFVKSHYVTNKSKMRHLMLDDIPDSFINKQINDTRYMARKALDIFSHLVREETNDDAAISKNVIACSGAITDRLKKDWGLNDVWNDIVSSRFQRMNDITHSSDYGQWVNKGGKRYFQINIPLEISKGFSKKRIDHRHHAMDAIIIACTTHSIVNYLNNASAAELGARHDLRSAVCFKDNNVDGSGSYRWTVKKPWQSFTQDTHSCLEHIVVSFKQNKRLITKVSNRYWHYRDGKKILDRQVKGDLLAIRKSLHKATVSGALYMPEMKRVSLKVALQDINSICDAKARKEIHHIINDLYNGHADNATLLKYFKARKFLVNGIDFSKLNVRVLPTQPNYSASRVALDSTFTEKDIEKVTDTGIQAILRRHLAHYVNERGEYDSTAAFSAEGIAVMNEHISELNNGKPHKPILKVRKKETIGQKFNVGTVGSKNKKFVEADKGTNLFYAVYANADGIRSYESIPMNIAIERLKHKMDVSPSTNDNGDKLLFVLSPGDLVYLPQEGEHVALPLDNSRIYKMVSCSKTQCCFVPYYVANVICDKVEYGPHNKVERSLDGIMVKTRCVKLKVDRLGHISV

SEQ ID NO: 1940 - protein, 1439 aa, unidentified
  REGION 1..1439: note = Description of Unknown: Cas Enzyme sequence
MAKILGLDLGTNSIGFCLRDTDDGVNIIEQMNDFGSIVFQSGVGNSKTGEYSYAAERTKHRSSRRLYQARKYRIWETLAVLIEFGFCPLSTQDLDQWRKYDKKKGLNRKYPVHALKFEQWVRLDFNGDGNPDYINPYELREELVTVQLDFSQEINRFKLGRALYHIAQRRGFKSSKGETLKEADIPEEEFDIANVSLKKSEEKKSSDLVCYMQEHNLKTVACAFAKLLREEIRVRSSNFQAVRSQYKDEIRYIFEFQKGLDTDSIFFSRIYSDKKNGCIFFKRPLRSQKGAIGACTLEPNKSRCSTSHPEYEKFRAFAFINNIKYRKTVDDEWHSLSIEQKIKLYNEKFLLTKSSFKFEVIRKWLEKEIGISQEQYLSKEKKTINYSDKTNVSGCPISGRLKHLLGENWEEYRYQSSKISKSDETGTLFITYSMEDIWHICFSFDDEENIAEFGRNILNFNDKQIKEFINLWLAISEGYSMLSLKAIRNINRFLVPQQGNDLYRGFIYTEAALLGKIPEILGLELWNKYEREIIGTISECIELNRKEKCILNIVNALISQYKSMEHGNGLFAYQNTEYLLDDSDRKDIEKYTIEAFGEKTWAQMESAEKDDLLEKISNKYQLFFASSKRDYFRLPKLGDSLKKYLANNISVLRCDNDFIDPYTKLACQCAACKKINKIYHPSAIEFYKPAQEQQFEYNGTLLSKKLLESPVIGSFKNPMAMRTLHQLRKLINYFIKEGIIEEDARIVVETARELNDANMRRALKEYQNIRETENKKIAELIRDLKGEQRDGDDIDKARLLIEQNPDYLFDRGRYNEEANDNKKKNKVVAKIKDLKYKKDITKYRLWLDQGMQCVYTGRIINLSDLFDENSTDFEHTIPRSQSFDNSLANLTVCDTYYNRNIKKNRLPTQLPNYSQSCVINGKEYLPIEPRLKAWKEKVEQLKSNVEFWKKRSKLAQTKDLKDDAIYQKHLWQMELDYWQNKLSRFTMTEVVSSFKHSQLNDTRLITKYAYHYLKSVFSKVEVQKGCITADFRKILGVQSVDEKKNREKHSHHAIDAAILTLIPVAAKRDKLLELFYKIQEFKKINLNTECLEKELQIEMQFSRIKNISSLSDYIEKNILINHVSKDQALTPAKRRERKRGKINLVDGKERWIGGDCIRGRLHKDSFFGAIKQSKKDYITSYESVSFVIRRELQFKKTSNDKGFASLDDLHSFIVDENLFEIIKMQCEGKSFKDSCEEGFYMIDKKGNRVNRIRHVRCYVTVKNPLPIKKQIYLSDKDYKQFYYAEVGDLYAMCKYYNEDKTKARYDVVKLFEVCENRKYGYDVAEITEFKNVKYYLDTVLHVGTLVLLYNEDANELRDMSCSSLSERLYVILGFESDGRINLKRHICAKLDKDLKDEAIKSFEFLPDKIRQNVSKVKFLVAGKDFQITPSGIITFEKYD

SEQ ID NO: 1941 - protein, 1436 aa, unidentified
  REGION 1..1436: note = Description of Unknown: Cas Enzyme sequence
MKRILGLDLGTNSIGWALVNEAENKDERSSIVKLGVRVNPLTVDELTNFEKGKSITTNADRTLKRGMRRNLQRYKLRRETLTEVLKEHKLITEDTILSENGNRTTFETYRLRAKAVTEEISLEEFARVLLMINKKRGYKSSRKAKGVEEGTLIDGMDIARELYNNNLTPGELCLQLLGAGKKFLPDFYRSDLQNELDRIWEKQKEYYPEILTDVLKEELRGKKRDAVWAICAKYFVWKENYTEWNKEKGKTEQQEREHKLEGIYSKRKRDEAKRENLQWRVNGLKEKLSLEQLVIVFQEMNTQINNSSGYLGAISDRSKELYFNKQTVGQYQMEMLDKNPNASLRNMVFYRQDYLDEFNMLWEKQAVYHKELTEELKKEIRDIIIFYQRRLKSQKGLIGFCEFESRQIEVDIDGKKKIKTVGNRVISRSSPLFQEFKIWQILNNIEVTVVGKKRKRRKLKENYSSLFEELNDAEQLELNGSRRLCQEEKELLAQELFIRDKMTKSEVLKLLFDNPQELDLNFKTIDGNKTGYALFQAYSKMIEMSGHEPVDFKKPVEKVVEYIKAVFDLLNWNTDILGFNSNEELDNQSYYKLWHLLYSFEGDNTPTGNGRLIQKMTELYGFEKEYATILANVSFQDDYGSLSAKAIHKILPHLKEGNRYDVACVYAGYRHSESSLTREEIANKVLKDRLMLLPKNSLHNPVVEKILNQMVNVINVIIDIYGKPDEIRVELARELKKNAKEREELTKSIAQTTKAHEEYKTLLQTEFGLTNVSRTDILRYKLYKELESCGYKTLYSNTYISREKLFSKEFDIEHIIPQARLFDDSFSNKTLEARSVNIEKGNKTAYDFVKEKFGESGADNSLEHYLNNIEDLFKSGKISKTKYNKLKMAEQDIPDGFIERDLRNTQYIAKKALSMLNEISHRVVATSGSVTDKLREDWQLIDVMKELNWEKYKALGLVEYFEDRDGRQIGRIKDWTKRNDHRHHAMDALTVAFTKDVFIQYFNNKNASLDPNANEHAIKNKYFQNGRAIAPMPLREFRAEAKKHLENTLISIKAKNKVITGNINKTRKKGGVNKNMQQTPRGQLHLETIYGSGKQYLTKEEKVNASFDMRKIGTVSKSAYRDALLKRLYENDNDPKKAFAGKNSLDKQPIWLDKEQMRKVPEKVKIVTLEAIYTIRKEISPDLKVDKVIDVGVRKILIDRLNEYGNDAKKAFSNLDKNPIWLNKEKGISIKRVTISGISNAQSLHVKKDKDGKPILDENGRNIPVDFVNTGNNHHVAVYYRPVIDKRGQLVVDEAGNPKYELEEVVVSFFEAVTRANLGLPIIDKDYKTTEGWQFLFSMKQNEYFVFPNEKTGFNPKEIDLLDVENYGLISPNLFRVQKFSLKNYVFRHHLETTIKDTSSILRGITWIDFRSSKGLDTIVKVRVNHIGQIVSVGEY

SEQ ID NO: 1942 - protein, 1509 aa, unidentified
  REGION 1..1509: note = Description of Unknown: Cas Enzyme sequence
MKKILGLDLGTNSVGWAVINSVVNDEGKEQLVNISSCGSRIIPMDAATLGDFDKGNSKSPVAERTRLRGVRRLLERSLLRRERLHRVLSVMGFLPEHYAAQLDRYGKFLPETEPKLAWYKDETGKYRFLFQDSFNEMLEDFHEHHPELVAEGKKIPYDWTIYYLRKKALSQKITKEELAWILLNFNQKRGYYQLRGEEEQEDNKKSVEYYALKVVAVEDSGDRKGKDIWYNVKLENGWVYRRASSVPLDWVGKVKEFIVTTDLDEKGNPKKDKDGNVKRSFRAPKEDDWGLLKTRTQAQIDESGQTVGTYIYESLLRMPDQKIRGKLVRTIERKYYKDELRKILIKQSEFHTALQDHNLLLACIEELYPNNEAHRRLLSTSDFTYFLVEDILFYQRPLKSQKGQIDDCPYESHVYRDKKDGSLQHVPLKCVSKSHPLFQEFRLWHFLSFLRIYQRERMIDGSLKLDVDVTNEFLQNEDDYVKLFDWLNERKEIDQKTILAYKPFGLKKNEQSKYRWNYVEDKSYPCNSTRADMIFRLNKAGVPEEFLTREKEEALWHILYSISDKKELTKALGTFAEKNGLNETFVEIFSKMPPFESDYAAYSLKAIRKLLALMRMGKYWDEQTIDEHTRSRIEKILTGEYDETIRTRVREKAMHLTDISSFRGLPLWLACYVVYDRHSEAKELVKWETPDDIDHFLRKFKQHSLRNPIVEQIIMETLRTVRDIWKQEGKIDEIHVELGREMKNPAKERARITAQVLENENTNLRIKALLAEFMNPEFEIENVRPYSPAQQEILRIYEEGVLSGVAEKDLPDDIASILKKFRENDVKKHPTTSEVLRYKLWLEQRYRSPYTGRIIPLGKLFTPAYEIEHVIPQSRYFDDSFTNKVICESAVNKLKDNCLGYEFVKKHSGEKVELGNGETATIFSVEEYERFVKDSYFNNSKKIKKLLLEDIPDNFIERQLNDSRYISKVVKSLLSNIVCEEGEQEGMSKNVIVCTGGVTDRLKKDWGVQDVWNRIILPRFLRLNKMTDRTDFTAVSTNGHLLPAVPLHLQKGFNKKRIDHRHHAMDAIVIACAGRNIVNYLNNASARKSSEISRYDLQHLLCDKVKTDANGNYKWILRKPWETFTQDVYAALTNIVVSFKQNLRVINRTTNHYQHYNEDGEKKMIPQTKGDRWAIRKPMHKDTVYGEVNLRKEKTLPLKDVLNNPSIVVDKSLKNKLYELIKSQYDLKAITKYFETHQDVWADVNLKKIKVYYFTKETNERFFATRKSLDSSFSQKKIEEEVTDTGIQKILLHHLQQNGNNPDIAFSPDGVERMNQNMTILNDGKWHQPIYKVRTYEKADKFAVGEKGNKVKKFVEAAKGTNLFFAVYESIQEDEATGKQVRKRTFATIPLNEVIKRKKQGLPAAHEDSKGNLPIFVLSPNDLVYLPTEEERNSGKIIQPLDRERIYKMVSCTGNRLFLVPYMVASSIYDKNEYTSLNKVELSDDKISIKEWCIPIEVDRLGNISMKNY

SEQ ID NO: 1943 - protein, 1421 aa, unidentified
  REGION 1..1421: note = Description of Unknown: Cas Enzyme sequence
VNFVIHKELKRQIARTGKIKFHSGGCGCQSGNYKMQNFEKGKSITTNADRTLKRSMRRNLQRYKLRRDVLIKLLKKVGFITDKTILSEQGNRTTFETYRLRAKAAEEEISLEELARVLLMINKKRGYKSSRKAKGEEDGSLIDGMEIAKKLYDEDLTPGQLCLQLLESGKKTFPDFYRSDLQDEFDRIWNFQKQFNPQSFCDTAKEEVKGKNKSQTWAILAKYFTWTKEVSVWNENEAKTENQEKEYRLVGLKRTVKGEELKKENYCWRVQALTERLDLEEIAVVLQEINGQISASSGYLGAISDRSKVLYFNHQTVGQYQMAELNKNPNMSLRNMVFYRQDYLDEFNAIWEKQAEFHKELTPELKKGIRDVIIFYQRRLKSQKGLIGFCEFENREIIVEKNGKTQTKIIGCKVIPRSHPLFQEFKIWQTLNNIEVFVGERKRKRKQTNVSSDLFDDTEDVLVTKGRRFLYQEEKEILAKELSIKENLKKAEVLKLLFENPQELDMNFKQIDGNRTGFALFSAYGRMIEKYGYEPLDFKKPADEIINQLKAVFSDLGWNTDLLSIGLDKEGKELEMQPYFRLWHLLYSFEGDNTPAGNGKLIEKIMQLCRVEKEYAIELANISFQDDYGSLSAKAIKKILPYLKEGNQYDVACEYAGYRHSKSSLTKEEIENKALKDKLDILPKNSLRNPVVEKILNQMVNVVNAVIDAYGRPDEIRVELARELKKSAKEREELTKAIAKNTREHDEIRKLLQSEFGMIHVSRNDIIRYKLYEELKENGYKTLYSNQYIPKEKLFSKEIDIEHIIPQARLFDDSLSNKTLEYKAINIEKGNKTAYDFVKDKYGEEGLQEYLNRCETVCNDKKAKLRKLKMQQNDIPDGFIDRDLRNTQYIAKKALSMLKDICRRVVATTGSITDKLREDWQLVDVMKELNLPKYEALGLVERFEDKDGRIIKRIKDWTKRNDHRHHAMDALTVAFTKDVFIQYFNNKNAAWESDCKEHANIIGIKTRYFESGRAVPPMPLGQFRVEAKSHLENLLVSIKAKNKVVTTNVNCIRKKGGISEKHQQTPRGQLHLETIYGSHKQYVTKMEKVNASFDVAKIATVSRQNYRNALLRRLEAFGNDPKKAFTGKNTLEKNPVYLDRAQTMRMPDRVQTVEFEAVYTIRKPIDSNLNVEKVVDAKVRAILEQRLEEYGGDAKKAFVNLDENPIWLNQEKGISIKRVSIRGINNAQSLHVKKDKNGNPILDENGKQIPVDFVNTGNNHHVAIYRKPVLDKKGQVMFDEDGNLMYELDEVVVSFFEAVTRANLGLPIINKDYRRSEGWQFLFSMKQNEYFVFPNEKTGFNPKEIDLLDPDNYAVISPNLFRVQKFSTKNYCFRHHLETDVQERKALLGITYKWQLGLKAIKDIVKVRINHIGQIVSVGEY

SEQ ID NO: 1944 - protein, 1448 aa, unidentified
  REGION 1..1448: note = Description of Unknown: Cas Enzyme sequence
MKRVLGLDLGTNSIGWALIEQDFDAKQGNILGMGSRIIPMSQDKLGDFGKGNSVSQTAERTGYRSTRRLRERFLLRRERLHRVLNILGFLPIHYATQIDFEKKLGKFQEDTEPKIAYNNRDFIFKDSFAEMLKDFEKEQPQLLINEKGEKKLIPYDWTLYYLRKKALSRKISKEELSWIILNFNQKRGYYQLRGEDEEENQSKLVEFHSLKVVDVVADEPVKGKSETWYSIILENGWVYRRSSKTALFDWKEKIKEFIVTTELNENGTVKTDKDGNVKRSFRAPIETDWTLIKKKTEFEIEQSSKTIGEFIYDSILKDPKQKIRGKLIRTIERKYYKEELKQILLKQTEFHKELNNDIIYNDCIRELYKNNESQQFFLVKKNFVHLFIEDIIFYQRPLRSQKSLISNCTLESYKFKDPNGMERIQYLKASPKSNPYYQEFRLWQWVSNLFIYNKFDDSNVTPRFLKDKGDWESLFETLNGRKEIEQKQLLKFFLERQGFKGKTLTAEIDKYRWNYVEDKKYPCNETHTIIKTRLDKVENISETFLTRDIEQELWHLIYSVTDKTEYEKALVSFSKKHNINTLSFVETFKKCPPFKSEYGSFSEKAIKKLLPLMRIGKYWCWDDIDRLTQMRIEKIISGEYDNDIKDRVREKAINLTSETHFQGLQLWLAQYIVYDCHSEALSLDKWESIDDIENFLQSFRQHSLRNPIVEQVVTETIRVVKDIWSYFGNGSKDYLNEIHVELGRDMKLPAEDRKIIQDKNNQNENTNLRIKALLSEMQYDTNVENVRPYSPVQQEILKLYEEGVLNSNIDIDDDILKISKTAQPSASDLRRYKLWIEQKYRSPYTGEIIPLNKLFTPEYEIEHIIPQSRYFDDSYNNKVICESAVNKLKDNCLGYEFIKEYSGQIVECGFGKKVKIFGIAEYEDFVKNNYISNRSKYSRLLMDDIPEKMIERQLNDTRYISKYISGLLSSIVRVESNDDGVNSKNFIPVNGKITSLLKKDWGLNDIWNDLILPRFLRMNQITNSNSYTAWNEKFQKYIPTVPIEVSRNFSAKRTDHRHHAMDALVIACATRDHVNLLNNLYAKSTVRYDLNRKLRIFEKASYYDVKTGQKIEREIPKAFLKPWQNFTTDARDSIESIIVSYKQNLRVINKSTNHYQKWVEKEGIMKKERIKQEGTNWAIRKSMHKDTISGLVQLPWVKIPRDKVLTATRKNLDSSFDLKTIDSITDTGIQKILTKYLEIKGNNPEIAFSPEGIEDLNRNIQLFNDGKQHHPITKVRLYEIGSKFPLGERGNKKAKYAEAAKGTNLFFAIYENKEGKRSYDTIPLNVVIDRLKQRLSAVPEINENGDNLLFHLSPNDLVYVPSEDEMENLKLINLENINKDQLNRIYKMVSSTNSSCFFIKGDVASPIVNKLEFSTLNKMEKSIEGIMIKDVCFKLVVNRIGHLERYFS

SEQ ID NO: 1945 - protein, 1412 aa, unidentified
  REGION 1..1412: note = Description of Unknown: Cas Enzyme sequence
MKKIIGLDLGTTSIGWAVVNEAENDSEKSSIERLGVRVNPLTVDERTNFEKGKPITTNADRTLKRSMRRNLQRYKLRRDNLIEVLKREGFITDQTILAEHGNHSTFETYRLRAKAVSEEVTLEQFARILLMINKKRGYKSSRKAKNEEEGSLIDGMSIAKELYNNDMTPGQYSLSLLEAGKKSLPDYYRSDLQSEFDKIWAVQKIYYPEQLSDALKDLLIGKNSKQTWAIIADKTVWKEDVKQWNETLAKTEHFAREYKLKGIKREGKRDEQRLENYKWRVAGLRGRLHPEQLAIVFQEINSQIYSSSGYLGAISDRSKELFFNKQTVGQYLMKLLDEDPNTSLVNRVFYRQDYMDEFETIWEKQSEFHPELTHELKREIRDIIIFYQRRLKSQKGLISYCELESWEIDVVRNGKVEKKTIGQRVIPRSSPLFQEFKIWQMLNDVEVSVKDIRIKKRKEGNNLSLFEEQDPSEKLKIYGRRRLTEDEMALVASELSIRSEMKKEDVLKLLFDDWKSLDLNFKRLDGNKTGNALYEAYSNIIELSGHFPINWNHSADEITSYVKEVFDALGWNSNILSFDSSKDLQSQDYYMLWHLLYSYESDNSETGNKSLIDKLVSFCGFDREYAVVLSNVSFLEDYGNLSAKAIGRILPHLKDGNDYYLSCELAGYKHSKSSITKEENEARILKESLDLLPKNSLRNPVVEKILNQMVNVVNALMQEYGRPDEFRVELARELKKNQREREEMTKSINESTRVNEGIREVLMKEFDLTHVTRNDIIRYKLYEELKDNGYHTLYSNTYIPKEKLFSKDFDIEHIIPRSRLFDDSFSNKTLEVRSINIDKGNQTAYDYVLSKYGETELEEYINRCKALFPKDSAKLKKLLMTETDIPERFVERDLRNTQYIAKKALSMLNDVCRRVVATTGSITDELRSDWQLVDVMKELNWEKYKEQGLVDYHSDQDGRIIGKIQDWTKRNDHRHHAMDALTVAFTNPALIQYYNNVNASFNQTSNAYLIKNKYFRDGRAISPIPLNEFRAEAKRHLENILVSIKAKNKVVTRNVNVTKNGKGGTNKKIQLTPRGQLHNETIYGSHIRVFYVEEKVGSSFDKEKISGVSNARYRQALMERLEASSWNPKKAFTGANALSKKPIWINEEKGVQLPEKVKVKNEEVIYTIRKPIDESLNIGKVIDPKVRAILEERLKEYGTPKKAFSNLDENPIYLNKEKGITIKRVTISGINTARPLREKDGKNGEKAPKDFVSTSNNHHVAIFKREISDENGGAEYEFCEVVVPFIEAVARVNLGDPVVDMDYGKDEGWEFMFTMKQNEYFVFPNEKTGFDPREIDLLDPENYSLISPNLFRVQKFSTKDYYFRHHLETTVKDVAELRNITWKRIRSLDSELLGMVKVRIDHIGRIVSVGEY

SEQ ID NO: 1946 - protein, 1378 aa, unidentified
  REGION 1..1378: note = Description of Unknown: Cas Enzyme sequence
MKKVLGLDIGSTSIGWAYIKEAKTVDEKTTIEKLGVRVIPLTTDEENDFQKGKAISINADRTLKRGARRNLDRYQLRRKLLIKILRENNFISDKAKLNEDGKKTTFSTYKLRSEAAKKKISKDDFAKVLLMINKKRGYKSNRKANSDEEGSAIDGMEVAKYISDHNLTPGQYVYELLKKGKKLIPDFYRSDLQNELNKIWEFQKQFYLEILTEKLKEDIKGKNKSATWKTCEKPFDIKGITQKGNMQEKKLEKFKWRTNGTKKQLDLEQLAIVLQEINSQINNSSGYLGAISDRSKELYFNKLTVGEYLYKQLEQKPPARLKNQVFYRQDYLDEFEMIWEKQKKYYPDLTNELKKEIRDIIIFFQRPLKSQKGLLSFCEFESWEKEFTDDETGKKKRRRIGHKVIPKSSPLFQEFRIWHNLNNIVLTDKTTGEYGPLEQELKEIAFEKLNIEGKLTQSNFLKVIVDEPKNYELNFENIEGNRTNAEFYKAYQKILEYEGIEYNFTKMDAEEINSAIKEKFSELGISTDILDFDTEIEGNDFDKQPIMQLWHLLYSSEDEEKLIEKISKKFGFKKEYAKLIANIPLQDNYGSLSARAICKILPYLKEGNNYDVACNYAGYNHSSSSTKEEREKRGLKDKLELLPKNSLRNPVVEKILNQVVNVVNAIIEDENLGKPDEIRIELARELKKNADERKKMTDGIRKASTEHEKIRKILHSDFGILKVTRNDIIKHKLWKELENYGYKTLYTNTYISKEELFSNRFDIEHIIPQAKLFDDSFSNKTLSLRDINIEKGNETAYDYLKKKLSDSAFEQYLSRIEKLMKDKKISRGKYNKLKMKLADIPDDFIERDLRNSQYIAKKAKQMFEEIVRTVNTTTGSITNRLRNDWQLVNVMKELNLPKYEKLGLVEIIEGKNGQPEKRIKDWSKRNDHRHHAMDALTVAFTTYSHVQYLNNMNARNNKAHKKYQEVYGIEQKCLYRDEKKKLLFKPPMPIDELRSEAAKHLGSILVSFKAKNKVITRNKNKIKVKGKNNFKIKIELTPRGQLHKETIYGKINRYETNLEKVGTKFDLNKIKQVANQQFREALLIRFEEFNRDSKKAFGGKNAPSKNPIYIDREKTIKVPEKVKLVWKENTYTIRKEISPELKIEKVIDTGIKRVLKNRLDKFNGDAKKAFSNLDENPIWLNKEKNIFIKRVTIRGVSTAEAIHVKKDHYGKPILNRDGNEQPVDFISTGNNHHVAIYRDENGNLQEDVVSFFEAVHRVNAGVPIIGKNKNGWNFLFTMKQNEYFVFPSENFDPNEIDLLNPDNASLISPHLFRVQKISTKNYVFNHHHETKAVDGDLLKKKKELSMVSYHFIQTPINLDGIIKVRINHLGQIVKVGEY

SEQ ID NO: 1947 - protein, 1493 aa, unidentified
  REGION 1..1493: note = Description of Unknown: Cas Enzyme sequence
MEAKNILGLDLGTNSIGWAVVAESDSQKRIKAAGSRIIPMDAAVLGDFESGNSVSQTATRTNARGIRRLNERHALRRERLNRVLSILGFLPNHYASELNKYGQLHKGTEPKLPWAEMDGKSIFLFQSAFDEMVKDFTQAHPELLADGKKIPYDWTIYYLRKKALTQPISGQELAWLLHQFNQKRGYYQARGEEEEEKVNERKELCTLRVISVKDTGEVSKGRTWYEVTLENGWIYKRQSAYPLDWEGKTKDFIVTTKLNDDGTEAKDKEGNVKRSFSAPKEDDWGLRKIKTQHDIDVSKKSVGEFIYDALLQRPNQKIIGQFVRVVDRKYYKDELRRILETQKNFISELRDTYLYATAIEALYPQNEAYRKSIANRDFTYLLMDDVIFYQRPLKSKKSLINECPYEFHTYRTKDGEEKRQYLKCISKSHPVYEEFRLWQWVENLHIYSEESNGIGKRECTAELVSDKAEMVKWLLTQKEVSEKSVLTHLVGKQTKGLSWNYVTDKKYPAAPTTATLTNILTEAGGNASTEELEHLWHMLYSITDKQELHQALMRYARAHKLQPVFVEKLDKQKPFPADYGAYSEKATRKLLNLMRCGEAWDVKNIDAHTLNRIEKLIAGEVDEHISDQVRQKLAALQSLQDFQGLPLWMAEYVVYDTRKNDTKWEKPEDVDAYLQSFRLHSLNNPIVEQIVMESLRTVRDIWKQEGHIDEIHIELGRDLKQNAEQRKNTLQRQQDNEKANLRAKLLLQEFMNPECGIEGVHSYSPSQQEILRIYEEGVLSANKADDEIQRIINDLSALKQPSPQDVKKYRLWLDQKYLSPYTGQPIPLAKLFTPAYQIEHVIPQSRFFDDSMSNKVICEAEVNARKDRMLAHEFICACSGEKITLSGGRIVTVLTKEQYEQKVKELFASNKAKQEKLMLDDIPEKFVARQMNDSRYISRLMLRLLSNIVREKNANGEYEPEATSKNVIACNGSATTRLKQDWGINDVWNHIILPRFERLNRLESTNVFTAQTPNGHIIPNMPLELRKGFEKKRIDHRHHAMDAIVIAFTTRNHVNLLSNESALDKDEKARYDLQCLLRKRELWRDNNGKEHTKFTDFVVPYEGFPKDVQEVLEHIVVSFKQNLRVINKSCNRSIRFVDGKKKAVRQTQGTNWAIRKSLHKDTVYGEVNLRKDDKYVNLTYALQHIDDVVEKDLRHKLREMVASGKDEKQIKKYFASEPDVWSDVNLKKIQMYYFTKDTNERYFATRKALNETFTEKYIRESVTDKGIQNILRAHLEQCEGNPEVAFSPDGIEQMNANILSLNNGVPHKPIYKVRTYEKAEKFAVGRIGNKSKKFVEAAKGTKLFTFVYEKKNEDGQIIRKLVPLMLQDVIAAQTSSGRKWIVELDNKLHKDGIVSEDLTYKFILSPGDLVYVPTRDEMANRQLEWSTDRIYKVVSLDGENPNFIHANIASVILDGKEYTRHNKTSRDEYDQLIKEICIPIIVDRLGNIKSISL

SEQ ID NO: 1948 - protein, 1183 aa, unidentified
  REGION 1..1183: note = Description of Unknown: Cas Enzyme sequence
LFIYKKSSTFAHNIIINYSLLCSVTCVNIYMKKTILGLDLGTNSIGWALIEMEDDQPKHILGMGSRIVPLSKDDNDQFSKGQAITKNSDRTARRTTRKGYDRYQLRRAQLTQLLRDNGMLPEQMDEHLIDLWKLRSDAATEGHQLTLPQIGRVLYHINQKRGYKHAKSDDNGDSKQTKYVEAVNQRYADIQTKHQTIGQHFYQELLSSRVKGGKDYYYTYRIKDQVFPRAAYIAEFDQIMRIQKEFYPDVLTDELIDSLRNRIIFYQRPLKSCKHLVSLCEFEMRPYKTKEGKIVYSGPKCAPRTSPLAQYCAMWEVANNITLTNRNNERYEFTLEQRRQIVDFLCKNKELKVTHLQKILGISKKEGWYGGKAIGKGIKGNATLNQLREALDGKYDQWLEMPIQIDDKVNVETGEVVKMVSEEVEQTPLFRLWHAVYSLQNADELSKTLQDKFGITDKAVIDALCKIDFVKPGYANKSHKFIRRILPYLMDGYMYSEACEQVQIKHSNSMTREERDARQLSEHIELLPKNALRQPVIEKILNQMINLVNRLQQEYGQIDEARVELARELKQSREERDSAYKAINQNERRNKEITAKIEEIGIRPSRSRIHKYRMWEESRYQCFYCGKTIDLAQFLNGADVEIEHIIPRSILFDDSYSNKVCACRHCNQEKGNLTAMEYMESKPAVEFEAYKQRVAEAFEDKRISKTKRDHLLWRRADIPQDFIDRQLRQSQYIAVKAVEILQDGIRKVWTSGGSVTDFLRHQWGYDEILHTLNLPRYKQVEDLTEIVHYEHAGQEHNEERIKNWTKRIDHRHHAIDALTVALTRQSYIQRLNTLEASHDAMEKQVKEAGTQYNEKKSLLEKWVAEQPHFKVAEVTEKVDAILVSFRAGKRVTTPAKRAVYKGGKRTVVQTGLQVPRGALTEETVYGRLGDKFIVKYPLDHQSMKPENIVDPTIRAIVKQRIAEKGKDAFKEPLYSAEGMEIKSVRCYTSLSENSVVPVKYNTEEQPIGYAKKGNNHHIAIYQDKQGNYQEMVVSFWDAVERRHYGIPAVIMNPKDLWDKLLNTELPQTFLAKLPKDDWQFVLSMQENEMFVLGMEEDEFNYAIEAKDYNLLNKHLYRVQKLSSKFYCFRYHTETTVDDKYGEVKNEQWSFKIGKAFRASSFEALFRVFPHKVKIDIMGRITKA

SEQ ID NO: 1949 - protein, 1554 aa, unidentified
  REGION 1..1554: note = Description of Unknown: Cas Enzyme sequence
MKKILGLDLGTNSIGWAVVNADEITRENETTFLQPKSISSAGSRIIPMDEGVLGDFDKGNTKSQTKERTDFRGSRRLHERYLLRRERLLRVLKLMDFLPGHFASQINEFGKYVNHHEPKLAWKKGENGKYEFVFKDSFDEMLADFAKNQPQLVANGKKVLYDWTIYYLRKKALTQRITKEELAWMLLQFNQKRGYYQLRGEEEEEQQQDKLVEYLSQKVIKVEATGEKKGDDEWYNVYLENGMVYRRTSRIPLDWEGKTKEFIVTTDLEKDGSPKKDKEGKIKRSFRAPKEDDWTLLKKKTEYDIDNSHKTVGCFIYDSLLQKPDQKIIGKLVRTVERKYYKEELGKILAKQIELIPELKNDELYKACIEELYPSNEAHRNNIAKPDFVNLFINDILFYQRPLKSKKSLISDCPYESRYDKDGNEHPVKCIPKSNPLFQEFRLWQFVQNLRIYQRERTISEGQLDLFGNSTAGRLETDVDVTNEFLKSEYDYVELFDWLNDRASIKQETLLNTYFKIKKEKGKDQYPYRWNYVEDKEYSCNKTRAAILSKLNAEEKNQLDDSLTLKIWHLLYSVTTQAEIDQVFSEEKQHNTKGVYAEMRKVFSETSISKIKNIKFDEKDYGSYSEKAIKKLLPLMRMGKYWDADKIDSKTIDRIDKILTGEYDENIKDRVREKAINLKDINHFKGLPIWLACYIVYGRYSEAREIEKWEKPEDIDNYLRRFKQHSLRNPIVEQVITETLRTVRDIWKQEGQIDEIHLELGREMKNPADKRKKMTEHIQENENTNLRIKAMLMEFMNPEMGIENVRPYSPSQQDILRIYEENALDNLTKDDKDYDFISKVSKLAQPSKSDIIRYKCWLEQKYRSPYTGEMIPLAKLFTPAYEIEHIIPQSRYFDDSLSNKVICEAEVNKLKDRQLGFEFIKAHQGEKVQISQGETVEILSIEAYEKFVKDHYSSNRIKMKKLLMDDIPDGFIERQLNDSRYISRVVKSLLSNIVREKLDNGEYEQEAVSNNLISCNGSITDRLKKDWGMNDVWNSIVLPRFQRLNELTGKDCFTTINAEGHEIPAMPLELQKGFNKKRIDHRHHAMDAIVIACTTRDHVNLLNNEAAHSKHNANRYQLQRKLRRFEKRMIDGKEREKAKEFLKPWDSFATDTKQVLENIIVSFKQNLRVINKTTNSYQHFDQDGKKVYVKQTKGDSWAIRKSMHKDTVFGEVNLRMIKTVSLVEALRRPERIVNKDFKIKVIELLKEGRDAKYIKKYVEENKDIWSDINLSRIGVYYFTKETKDHYYATRFLSELTAYFAGVTKAEDALKKVEAITDTGIQKILKAHLQAKENNPELAFSPDGIDEMNRNIVALNGGRFHQPIYKIRRFEKGNKFAIGQTGNKTSKYVEADKGTNLFFAVFGSKKMNKETGEAEIIRSYMTIPLNVMIDCQKKYGAKWRISIEAYLKEMELVADDAKLLFILSPNDLVYLTKQNGNGRIGEIDKRRIFKVVSFTANRLYSIPYPIAKCIVDKLEYSQLNKVEFTDNKESIKEICIPLIVDRLGNIISFNNKSYD

SEQ ID NO: 1950 - protein, 1380 aa, unidentified
  REGION 1..1380: note = Description of Unknown: Cas Enzyme sequence
MKKILGLDLGTTSIGWAMVNEAENENEKSEIIKLGVRVIPITTDEVGDFLKGKATSINADRTLKRGARRNLNRFQLRRNALIKILKTQNIISNFTLLNEEGKQSTFDTYKLRAKAAQEQISKDELAKVFLMINKKRGYKSSRKAKTEDEGIAIDGMAIAKELYANNYTPGQIVFQLLTNGKKYIPDFYRSDLQNELQKIWDYHLQFYPDILTNKFFEQLKNKGKQATSKIFLGKYGIFTFENKGKRDEVKLHSYKLRSEGINKQLSKEELAYVIAEINNNIYSSSGYLGAISDRSKELFFNKQTVGEYLYSQLEKNKHSRLKNQVFYRQDYLDEFNTIWETQKQFHPELTEALKSEIRDVIIFYQRKLKSQKGLLSFCEFESKEEEYFDKVENKLKKRIIGPKVISRSSPLFQEFKIWQILNNIRLTDKTTGEYGSLSDEMKLQAFERLNIVHKLSANDFLKIIVDNPKDFEINYESVEGNKTNVELFNAYQKILELEGVDLDFSKLEVSEIIETIKSKFQKLNISTEILFFNSEIDGNDFDKQPIMQLWHLLYSIEDDKKLIEIIEQKFGFNKEYAKLIANISLQDDYGNLSSRAIRKILPDLREGNSYDAACTLAGYNHSNSLNREQLANRVLKDKLELLPKNSLRNPVVEKILNQMVNVINAIIEDETLGKPDEIRIELARELKKSADERKKMTDGIRTSTAENEVIKKLLQSDFCINKVTRNDIIRYKLWKELENNGYKTLYTNTYIPKEKVFSKEFDIEHIIPQAKLFDDSFSNKTLTKREINIEKGNDTAYDYLKNKLNESDFNQYLSRIERLYKNGNINKAKYNKLKMKSADIPEGFIDRDLRNSQYIAKKAKQMLEEVVRRVNTTTGSITSRLREDWQLINVMKEINLPKYEMLGLVNTIQGKNGQQEKIIVDWSKRNDHRHHAMDALTVAFTSYSHVQYLNNLKARGNKRHEKYHEVYGIEQKYLYRDDKNKLLFIPPMPLKEFREDAKKHIESILISFKAKNKVVTRNKNKIKIKGRDNYKEHIELTPRGQLHNETVYGQIKQYETKEEKVGVKFDLPKIKLVAKQQFREALLIRLAQFGGDPKVAFGGDNAPSKNPIYIDLNNKIVLPEKVKLVSQSSQFTIRKEVSPDLKLEKVIDVGVRRILQNRLDEFGGEPKKAFVNLDENPIWFNEDKGFSIKRVTITGVSNAQALHNKKDHSGNLILDKNGNTQPVDFVSTSNNHHVAIYRDEEGNLQDDVVSFYEAVQRANNGLPLVDKNKNGWDFLFTMKQNEYFVFPSFDFNPDEIDLFNSTNSDIISPHLFRVQTLSKVVYGNNAIRDFVFRHHLETNVDKKTILKGITYHPIKSLNNLEGIIKVRINHLGKIVKVGEE

SEQ ID NO: 1951 - protein, 1446 aa, unidentified
  REGION 1..1446: note = Description of Unknown: Cas Enzyme sequence
MKKILGLDLGTNSIGWAVVNEAEKEGEQSSIVKLGVRVNPLTVDEQQNFEKGKSITTNANRTLKRSMRRNLQRYKLRRENLISILKENGFISDDTILSENGNRTTFETYRLRAKAASEEISLQDFARVLLMINKKRGYKSSRKAKSTEEGQLIDGMEVAKRLYDECLTPGQLSYEIIKGGKKHLPDFYSSDLQDEFDKIWNVQKTFYHELLTDNLRENLKGKNKTQTWAICAKPFGIEGIKRTTKGVEQKLENYKWRVTALNEKLDLEELAVVLQEINGQISNSSGYLGGISDRSKELYFNKQTVGQYLMENLDADSNYSLKNQVFYRQDYLNEFEKIWETQAQYHKELLTPKLKKEIRDVVIFYQRSLKSQKGLISVCELEGKQVESEKNGKKYIKTIGPKVCPKSSPLFQEFKIWQMLNNVQISCKSVPDKQKNIWNDNQGKRFLSQEEKEKLFVELSYKESLSKADALKLLFNNSKDYDLNYKILEGNRTQSDLFKAYQTIIEMSGYDEYDLSIMNSEKAVHKLKEIFDGLGYNSDILMFDSSLEGHKLEQQSMFRLWHLIYSFEGDNSVIGNEKLIEKIQDTFGFEREYATVIANVVFKDAGEYSSLSAKAIRKILPHLKDGNDYSVACEYAGYNHSKSSLTKEEIENKVLKDKLDLLPRNSLRNPVVEKILNQMINVVNSIVDTYGKPDEIRIELARELKKSAKEREELTKSINSTTKLHEEYVTILKNEFGLSRVSRNDIIRYKLYKELECNGYKTLYTNTYIPKEKLFSKEFDIEHIIPQAKLFDDSFSNKTLESRQANLDKSNTTAYDFVAAKYGDDYANGEYKSRIEKLYKDGIITKTKRDKLLMKEADIPSGFINRDLRDSQYIAKKAREILEDLVHFVVPTTGSVTDRLREDWQLVNVMQELNWNKFNQLGMTYYEQDRDGRQIPKIKDWTKRNDHRHHAMDALTIAFTKRSFIQYLNNLNARVEKGVEDWIDLDMVDVSKLDKEKRTSVVYSIEKKELYRDKKGKLRFCPPMPLHEFRAEVKRQLESILVSNKAKNKVVTNNVNKAKNNVESFIQTKDGEVRKIKGQVVKTPRGQLHNETVYGCSKRYEAKEEKVNASFDAEKIKTVACKRYREALMEQLNKFGGDAKKAFTGKNAIDKAPIWLDALHTEKVPEKVKTVGFVYIYTIRKEVGPDLKVDKVVDTRIKKILESRLNEFGGDAKKAFSNLDENPIWLNKEKGISIKRVTITGVSNAEALHDKRDKDGNLIFGDDGQKQPVDFVSTSNNHHVAIYRKPKLDKNNQPMLDEKGNILYELDEKIVSFYEATSRAVQHLPIIDKTYKKDEDWQFLFTMKQNEYFVFPRYDENGNMIFNPLDYDESWYRNPDNYAEISPNLFRVQKIATKNYFFRHHLETTVETPKALAGITYKPQLGLNGIVGIVKVRVNHIGQIVAVGEY

SEQ ID NO: 1952 - protein, 1492 aa, unidentified
  REGION 1..1492: note = Description of Unknown: Cas Enzyme sequence
MKKILGLDLGTNSIGWALVEQDFDAKAGKILGMGSRIIPMSQEVLGNFDVGNSVSQTAERTGFRATRRLHERHLLRRERLHRVLNILGFLPEHYVNQIDFEKRLGQFLDDKEPKIAWKEVWNEQKNKNEFVFIFQNSFNEMLNDFKVNSLEIKIPYDWTIYYLRKKALSQKITKEELAWTILNFNQKRGYYQLRGEEEEENPNKLVEFHSLKIIDVVADEKPNSKGDIWYSLYLENGWVYRRSSKTPLFDWKDKVRDFIVTTDLNDDGTVKTDKEGSEKRFFRAPSEDDWTLLKKKTENDIEKYIQKYKTINGVDGTVGTYIYEALLQNPAQKIRGKLVRTIERKFYKEELIAILKKQIELQPELFTEDLYNDCIRELYRSNKEHQTVLSKRNCFVHLFVNDIIFYQRPLRSQKSSIGNCSLEYRKHKNKDRNEVTEYLKVVSKSNPLYQEFRLWQWLFNLKIFRRDDDTDVTEQFITNVFDKEKLFDFLNNRKEIDQKALLKYFKLTEKTHRWNYVEDKIYPCNETGTQIKTRLSKVENIPADFLTPEIEQKLWHIIYSVTDKNEFEKALKTFANRHHLDEVSFVENFKKFPPFKREYGSFSEKAIKKLLPFMRVGKYWNWEIIDAKTKDRISKILTGEYDETIKNRVREKAIYLGSENDFQGLQLWLAQYIVYDRHSEANITDKWNTVADLEKYLEEFKQHSLRNPIVEQVITETLRVVRDIWKKHGDFSEIHIELGREMKNTADERKRLTNIVTENENTNLRIKALIMELKEYPDVENVRPYSPIQQEILKIYEEYAVNNIEENDTEREFIQKISKTAQPSKSELQRYKLWLEQKYRSPYTGQMIPLGKLFTDEYQIEHIIPQSRYFDDSLNNKVICEAAVNQLKDKCLGLEFIKRFHGQIVDLGLGKSVKIFEEVAYQDFVKQHYAKNYKKRNNLLLEDVPEKMIERQLNDTRYISKFVSQLLSNIVRADKDDDGVNSKNILPGNGKITTTLKQDWGLNDIWNDLILQRFERMNMLTNSTAFTAWNEQYQKFLPTIPLEFSKGFQKKRIDHRHHAMDALVIACATRDHINLLNNQSAKSEVSRYDLQNKLRNKERNETIGKDVFTEFKKPWNNFTVDARNELEKTVVSFKQNLRVINKTANKYQAYKNGKKVFNPQTKGDSWAIRKPLHKDTVFAKILLRKIKTVRLSEALKNWEMIIDKELKKEIKRLINTYGGAFKIDVINKYFKDRKYLFNEVDISKVEIYYFETENAAVRKLLDTSFTEKIIKESVTDSGIQKILLNHLWAKENKPELAFSPEGIEEMNKNIVQLNDGKFHQSINKVRVYEPIGNKFQVGTTGNKKDKYVEAAKGTNLFFAIYEDENGNRSYETIPLNIVIERLKQGLNAVPERNEKEHHLLFQLSPNDLVYVPTEDEKENICAIDWESLDKEQLKRIYKIVSFTNSRLYAISANVATTIVNKVEFTQLNKIEFIDEKKHCVKLNIDRLGNISL

SEQ ID NO: 1953 - protein, 1338 aa, unidentified
  REGION 1..1338: note = Description of Unknown: Cas Enzyme sequence
VEKEYFLGLDMGTGSTGWAVTDTEYNIVRKHGKSLWGSRLFESANTAEERRIFRTARRRLDRKNWRIQVLQELFSEEIAKVDPGFYLRMKESKYYPEDKRDAEGKCPELPYALFVDQDFTDKDYHKQFPTIYHLRKILMETKNTPDIRLVYLAFHHMMKHRGHFLLSGDIKEVTSFKNIFTQFLKNISNEELDFHIVFNDDAYDVVGEILTDRELTKSSKKTKLWKVFFAKTTCEKAVLNLLAGGTVKLSDLFGKEELNECEKTKICFADNGYDDYIGMVEADLGEVYYIIESAKAVYDWAVLSDILGDSVSISDAKVKQYEKHKKDLAYLKKVVKENLSKEDYQKIFVVSKDKLNNYCAYIGMTKINGKKIDLQGKKCSREEFLDFIKKNVISKLKDEKTISYLSEQIENDLFLPKQVIKDNGVIPYQIHLYELNKILENLSEKLPFIKENKEKIVELFCFRIPYYVGPLGTLPGGKSNFTWAVRKTKEKIYPWNFEEVIDVQDSAQQFIRRMTNKCTYLYGEDVIPKDSLLYSKYMVLNELNNLKLDGENISVELKQRIYENVFKRYRKVTQKKLKDYLVREGIAEKNIEITGIDGEFKASLTAYHDFKEKLTGVNLKQREKEDIILNIVLFGGDKKLLKQRISKQFPQLTDNQKKIICGLSYKGWGRFSKKFLEEITIPAPETGEVWNIITALWETNENLMQLLGHEYSFMEAIELFNGGKKTKKLSYKTIEELYVSPSVKRQIWQTLQIVKEVQHVMGQKPKRVFVEMAREKQESSRTESRKQRLIELYKACKKEERDWIQELGTKEEHQFRNDKLYLYYTQKGRCMYSGDPIEVEELWDNTKYDIDHIYPQSKTMDDSLDNRVLVKKEYNAKKSDHYPIDPDIQKERSGFWKMLLEQKLISQEKYNRLIRKTELEPNELAGFIERQIVETRQSTKAVAEILKEILPETEIVYVKAKTVSKFRHDFKFIKVREMNDLHHAKDAYLNIVVGNTYFVKFTKNATWFVKENPGRSYNLEKMFTLKDISRNGEVAWKVGNNGTIRNVRKMMGKNNVLVTRKSYEAKGGLFDRQIMKKGKGQIPIKTSDGRLGNIAKYGGYNKAAGAYFMLVKSRDKKGKEQRTLEFVPIYLKKWIEESKENAVEYLEKERGLNKPEILITKIKIDTLFKVDGFYMWLSGRTGNQLLFKGANELILSLEDTKTLKKIVKFINRLKENKETKIIEKDKLTEQELLQLYDTFLYKLKNTIYNVRLALQGENLQKNREKFIKLSIENKCVLLTEVLHLFQCQSGSANLKLIDGPAKAGILVLNNNVIKCKQISIIYQSLTGIFEKEIDLLTL

SEQ ID NO: 1954 - protein, 382 aa, unidentified
  REGION 1..382: note = Description of Unknown: Cas Enzyme sequence
MANKAIKYRLYPTTEQRIMFAKTFGCCRKVYNLMLSDKIESYQSTGKFVSVTPAKYKKDYPYLKEVDSLALANKQMDLQKAFRNRFSKSRKKKNGFPKFKSAKHSRKSYTTNNQHGTVTFTGNSIKLPKIGHVKTVIHRKPDSDWAIKSATISQESDGKYYASVLFEFENPVNVYVADRTNAIGLDYASDGLYVDHNGNIGSNHKYYRESYDKLAKEQRRLSRMQGSKKHETKSNNYIKQLRKVNKIHRHITNQRLDNLHKISTEIANQYDVVCVESLNMKSMANKGFGNGKATLDNGYGMFLSMLEYKLSDRNKYLIKVDKWFPSSQICHCCGTLHSEMKNLTIRKMICACGLTISRDRNAAINIRNEGLRILNESFGAVS

SEQ ID NO: 1955 - protein, 1342 aa, unidentified
  REGION 1..1342: note = Description of Unknown: Cas Enzyme sequence
MNLGLHIDTTHVGWSMTDDDLSITKRKGQDLIGVVRFQEADTAEDRRLARSARNHRKRVLGMISFVNHSFEGLLNEADPLFLSRLKKSGLYEEDGGYNAGLFLSKDEAAKFYAKYPTIFHLKDAVISGKEKDIRFIYLTVLHCFKHRGHFNLGDIKPEQATDFDFTYNKFRQLLSTTCNLNLTLQDKQVIRDLLLASGNVRERVSQGMESLSLGNNSVLKVILTLLFGGKGQMANVFPDLKTLQENSDMAKPANASVLCFDTEDFDLMIEPFTPYLSQDEYLFILAAKAMYDWSLLYKVLNGESSIRQAMMRRYDKHKEDLSLLKDIYYYMDSHGFEGAYHTMFRKTDENVNNYACYVGSVVDESKLGRFGLHRSTESFLKELASQLSEMQGSLDKSNPYYEKISSCLIDIEADNFLPKQKDKRNASIPNVLVSDELAKILDVAISLYPALAEPGVSGIYSVKEELLMMCRFRIPYWMGPLNESKKFAWAVHKEEGVVYPWNLEDKIDFSKTRKNFIRSIVNECSLCLGETVLCENSYYINRMKVLDELNGIRIDGKKLPVEIKQAVFEDLSMHYSKVTLSSVKSLLYKHNIIQPGDEPDISGFVKKKLNRSMGCYITAEACCEGLDLEVYEMLAEYVAIFKGDVNAILDALQDEPYDPAMLKKLLNVIKDSGWSIYSKKALTEIYSSVNGTDMNLLEALYNTDKRLSELLGSEFGFMDAFSKDNDRSYGKKNSRNMIDDAHTTPMVKRSLGQMMNVLYELKSFTKSAPDKVFLNIYAPNSFKAIRENVPKLLNKVFSQKVADKEKKAENKRFLEMLSQIKGPLSVRQTLWFLQRGKCLYTGVDIPYSSLFSSTPDFTIDHIYPKSKVYNNILTANLCLVSSKVNKAKDAAYPLDENIRKNMTPFWDSLLQEGLMTQAKYDALTSAFSIPLDIKVASVDKLLVEKRKTALLAEKLIHKVFPDSKVVFVSDTILNDFINNYDLQEVSVINYFPEARKSYYTQVVGMVWNGIFTANPKKYILENPNYSLNVWNYNSEFWNVKTSIGTVKEVIAGAHIKETYMKISDEKGAFSDSTIMSAAYARKKDGKGILPLSKEKADVTKYGGKTSIKTAYYSVARLNGELRIVGIPIYQAYRIKTVDDLIDYLRTLAEDVAVIIPRMNRYSVLNMDGFRAVFRSISNGTGGRCCCARTFIEANEEYCQNVFLFNRLNRKSEHMLSRFGITKDRNEAQYQNFLSNYESHYDNRPNNQIKALRLAFESFCNLDIMDQCYTLEQLYGLVRIDSTSADLSMLSYEVTDKKGNTTVKKLSLQTGIVNVSIKLDGFESVILEDISQTGLYRNKTIIK

SEQ ID NO: 1956 - protein, 1392 aa, unidentified
  REGION 1..1392: note = Description of Unknown: Cas Enzyme sequence
MDNKKEYYIGLDMGTNSVGWAVTDTEYNLMRAKGKDLWGVRLFTEAQPAVNRRTKRVQRRRIEREKARKAMLKLFFSDAIDAVDPGFFQRLDESFLQYEDRSDSNKQMNALFNDGGYIDFDYYNEYPTIFHLRKALLHEDREFDVRLVYLAILNMFSHRGHFLNTNMSSDDDRDNNFDSAWRELIDAFETSQLSNNKEINNISALLDTTKYTEIKQIIGDRGKTRSSKFDALRDLLDVPKSEKHICAVLKLVCGLKVTVKEILSNIENPSVEPEGLKVSTSFTDSNLEENLDKIQEVLEDEYFDVILKAKSVYEICLLSSILGNNKYLSDSRVEMYERHKQDLQDLKSLLAEYDKYAYEKIFRTMDVGSYSAYVGSMNSHGNKIRRLGTTSANSGTAKEELYKLVKKVLNNSVPENNVLKVRILDKIEKDSFLEKQLTSNNGVIPNQVHTIELKRILSNAEIYLKFLQDIDEDGLSVKDKIIQLFEFQIPYYVGPLGREFNGVKGYNNWAVRTEEGLKPGVKIMPWNFDKYIDKTASAAEFIKRMLRKCSYMSDEYTLPKHSLAYEKFMVLNEINNIKIDNERISVKAKQGIYNDLFATGNKVSRDKIKEYLVKHNDARDDVEITGLSDETCTTKLASLGKFRAIFGDDVFKQSNKDIIEDIIYWSTIYNGDRKIIREKIEGKYPNTFNKKQLNKILGFKFEGWGNLSKKFLELQGTSKVNGEIDSVIGFMWNKQENLMELLSDNYTFTSQLNGMMNDTIKPLSSWKIEDLEDMYLSPSVKRMVWQTMKIVDELQSVIGYAPKRVFVEVTRGDGEKKRTTSRKQKLIDLYKSIKGEAKDWIKEIENRDESAFKSRKLFLYYMQQGMCMYSGEKIDLDNLMNDNLYDLDHIYPQHFTKDDSIHNNLVLVKKEFNARKSDMPITKEIQAKMHGKWKALLDGKFITSEKYARLTRHSYAFSDDEKAGFINRQLVETSQATKAITKIFSQAFDNNTKIVFSKARLVSDFRQKFELPKSRVLNCYHHANDAYLNIVVGNSYYVKFEGNPARFIKESKGKEEEKKYKYHLSKFFENTVQNKNEVAWSVEEGNNTITTVKRTMAKYSPLVTYKTEEGKGEYFKETIYPKSKAKPIVYTGLKSKNTPLNDVKKYGGKTAIGTSGYCFVKYTEKNKEVRKFETLPIYLGSSRTLTVERIQEYLKESYLEKGMIQAAETVEVLIKFVPQKTELVLDGHTYTIGGSTGDMMYINGIVQVKLSKDYVKYFQKLEKAKETNDYSEIDKLGNRVITQQKNAELIDIILDKMEKEIFQNRKCSTYETINEGRDKFKTLDINKQVTILIDVINNIYGSKQSVDLTLIGGKSNVGMCRAGRKISNCNEAKLHFFSCTGIYVKEIDLLKI

SEQ ID NO: 1957 - protein, 1392 aa, unidentified
  REGION 1..1392: note = Description of Unknown: Cas Enzyme sequence
MDNKKEYYIGLDMGTNSVGWAVTDTEYNLMRAKGKDLWGVRLFTEAQPAVSRRTKRVQRRRIEREKARKAMLRLFFSDAIDAVDPGFFQRLEESFLQYEDRSDSNKQMNALFNDGGYTDLDYYNEYPTIFHLRKALLHEDREFDVRLVYLAILNMFSHRGHFLNTNMSSDDDRDNNFDSAWRELIDAFETSQLSNNKEINNISALLDTAKYPEIKQIIGDRGETRSSKFDALRDLLDVPKSEKHICAVLKLVCGLKVTVKEILSNIENPSVEPEGLKVSISFTDSNLEENLDKIQEVLEDEYFDVILKAKSAYEICLLSSILGNNKYLSDSRVEMYERHRQDLQDLKSLLAEYDKDAYEKILRTMDVGSYSAYVGSVNSHGNKIRRLGTTSANSGTAKEDLYKLVKKVLNNSVPEDNEVKAKILDKIDKECLLEKQLTSNNGVIPNQVHTIELKRILSNAERYLKFLQDIDEDGLSIKEKIIQLFEFQIPYYVGPLGREFNGVKGYNNWAVRTEEGLKPGVKVMPWNFDKYIDRTASAEEFIKRMLRKCSYMADEYTLPKHSLSYEKFMVLNEINNIKIDNERISVEAKQGIYNDLFTSGNKVSKKKIKEYLVKHNYARGGVEITGLSDETCTTKLASLGKFGAIFGDDVLKQSNKDIIEDIIYWSTIYSGDRKIIREKIEDKYPNTFDKKQLNKILGFKFEGWGNLSKKFLELQGTSKVTGEIDSIIGFMWNGQDNLMELLSDNYTFTSQLNGMMDDTIKPLSSWKIEDLEDMYLSPSVKRMVWQTMKIVDELQSVIGYAPKRVFVEVTRGDGEKERTTSRKQKLIDLYKSIKGEAKEWIKEIENRDESAFKSRKLFLYYMQQGMCMYSGEKIDLQNLMNDNLYDLDHIYPQHFTKDDSIHNNLVLVKKEFNARKSDMPITKGIQAKMHGKWKALLEGKFITSEKYARLTRHSYAFSDDEKAGFINRQLVETSQATKAITRIFSQAFDNNTKIVFSKARLVSDFRQKFELPKSRVLNCYHHANDAYLNIVVGNSYYVKFEGNPARFIKESKGKENDKKYKYHLSKFFENTVQNKNEIAWSVEEGNNTINTVKRTMAKYSPLVTYKTEEGKGEYFKETIYPKSKAKPLVYTGLKTKSTPLNDVTKYGGKTAIGTSGYCFVKYTEKNKEVRKFETLPIYLGSSRTLTVERIQEYLKESYMEKGMIQAAETIEVLIKFVPQKTEIVLDGYTYTIGGSTGDMMYINGIVQVKLSKDYVKYFQKLEKAKETNDYSEIDKLGNRVITQQKNAELIDIILDKMEKEIFQNRKCSTYETINEGRDKFKTLDINKQVTILIDVINNIYGSKQSVDLTLIGGKSNVGMCRAGRKMSNCNEAKLRFFSCTGIYVKEIDLLKI

SEQ ID NO: 1958 - protein, 1266 aa, unidentified
  REGION 1..1266: note = Description of Unknown: Cas Enzyme sequence
NFIGSPACLHWGYVNRSNLFWTVVNFFNDSEPLNIQWEAIANSPETTKALNKELSGQKEADFKKYIKTSFPEYSTKEILANYVEGRRAILDASKYIANLQERAVRWYFNDAKFEQGQEQLDADKLKSILVRALKYLRSDDKEWSASQKQIIQSLEQSDDVLAVLARLDPDRTIPPYEDQNNRRPPEDQSLYLNPKALSSEYGDKWKSWANKFAGAYPLLTEDLTEILKNTDRKSRIKIRSDVLPDSDYRLAYILQRALDRSIALDECSIRRTAEDFENGVVIKNEKLEEVLSGHQLEEFLEFANRYYQETAKAKNGLWFPENALLERADLHPPMKNKILNVIGGQALGVSPAEGTDFIEEIWNSKVKGRSTVRSICNAIENERKTYGPYFSEDYKFVKTALKEGKTEKELSKKFAAVIKVLKMVSEVVPFIGKELRLSDEAQSKFDNPYSLAQLYNLIETERNGFSKVSLAAHLENAWRMTMTDGSAQCCRLPADCVRPFDGFIRKAIDRNSWEVAKRIAEEVKKSVDFTNGTVKIPVAVEANSFNFTASLTDLKYIQLKEQKLKKKLEDIQRNEENQEKRWLSKEERIRADSHGICAYTGRLLDDVGEIDHIIPRSLTLKKSESIYNSEVNLIFVSAQGNQEKKNNIYLLSNLAKNYLAAVFGTSDLSQITNEIESTVLQLKAAGRLGYFDLLSEKERACARHALFLNSDSEARRAVIDVLGSRRKASVNGTQAWFVRSIFSKVRQALAAWTQETGNELIFDAISVPAADSSEMRKRFAEYRPEFRKPKVQPVASHSIDAMCIYLAACSDPFKTKRMGSQLAIYEPINFDNLFTGSCQVIQNTPRSFSDKTNIANSPIFKETIYAERFLDIIVSRGEIFIGYPSNMPFEEKPNRISIGGKDPFSILSVLGAYLDKAPSSEKEKLTIYRVVKNKAFELFSKVAGSKFTAEEDKAAKILEALHFVTVKQDVAATVSDLVKSKKELSKDSIEDLAKQKGCLKKVEYSSKEFKFKGSLIIPTAVEWCKVLWNVFKENTAEELKDENALRKALEAAWPSSFGTRNLHSKAKRVFSLPVVATQSGAVRIRRKTAFGDFVYQSQDTNNLYSSFPVKNGKLDWSSPIIHPALQNRNLTAYGYRFVDHDRSISMSEFREVYNKDDLRIELAQGTSSRRYLRIEMPGEKFLAWFGENSISLGSSFKFSVSEVFDNKIYTENAEFTKFLPKPREDNKHNGTIFFELVGPRVIFNYIVGGAASSLKEIFSEAGKERS

SEQ ID NO: 1959 - protein, 1432 aa, unidentified
  REGION 1..1432: note = Description of Unknown: Cas Enzyme sequence
LRRENGKTHIIGVGLDLGGTYTGTFITSHPSDEAEHRDHSSAFTVVNSEKLSFSSKSRTAVRHRVRSYKGFDLRRRLLLLVAEYQLLQKKQTLAPEERENLRIALSGYLKRRGYARTEAETDTSVLETLDPSVFSSAPSFTNFFNDSEPLNIQWEAIANSPETTKALNKELSGQKEADFKKYIKTSFPEYSAKEILANYVEGRRAILDASKYIANLQSLGHKHRSKYLSDILQDMKRDSRITRLSEAFGSTDNLWRIIGNISNLQERAVRWYFNDAKFEQGQEQLDAVKLKNVLVRALKYLRSDDKEWSASQKQIIQSLEQSGDVLDVLAGLDPDRTIPPYEDQNNRRPPEDQTLYLNPKALSSEYGEKWKSWANKFAGAYPLLTEDLTEILKNTDRKSRIKIRSDVLPDSDYRLAYILQRAFDRSIALDECSIRRTAEDFENGVVIKNEKLEDVLSGHQLEEFLEFANRYYQETAKAKNGLWFPENALLERADLHPPMKNKILNVIVGQALGVSPAEGTDFIEEIWNSKVKGRSTVRSICNAIENERKTYGPYFSEDYKFVKTALKEGKTEKELSKKFAAVIKVLKMVSEVVPFIGKELRLSDEAQSKFDNPYSLAQLYNLIETERNGFSKVSLAAHLENAWRMTMTDGSAQCCRLPADCVRPFDGFIRKAIDRNSWEVAKRIAEEVKKSVDFTNGTVKIPVAIEANSFNFTASLTDLKYIQLKEQKLKKKLEDIQRNEENQEKRWLSKEERIRADSHGICAYTGRPLDDVGEIDHIIPRSLTLKKSESIYNSEVNLIFVSAQGNQEKKNNIYLLSNLAKNYLAAVFGTSDLSQITNEIESTVLQLKAAGRLGYFDLLSEKERACARHALFLNSDSEARRAVIDVLGSRRKASVNGTQAWFVRSIFSKVRQALAAWTQETGNELIFDAISVPAADSSEMRKRFAEYRPEFRKPKVQPVASHSIDAMCIYLAACSDPFKTKRMGSQLAIYEPINFDNLFTGSCQVIQNTPRSFSDKTNIANSPIFKETIYAERFLDIIVSRGEIFIGYPSNMPFEEKPNRISIGGKDPFSILSVLGAYLDKAPSSEKEKLTIYRVVKNKAFELFSKVAGSKFTAEEDKAAKILEALHFVTVKQDVAATVSDLIKSKKELSKDSIENLAKQKGCLKKVEYSSKEFKFKGSLIIPAAVEWGKVLWNVFKENTAEELKDENALRKALEAAWPSSFGTRNLHSKAKRVFSLPVVATQSGAVRIRRKTAFGDFVYQSQDTNNLYSSFPVKNGKLDWSSPIIHPALQNRNLTAYGYRFVDHDRSISMSEFREVYNKDDLMRIELAQGTSSRRYLRVEMPGEKFLAWFGENSISLGSSFKFSVSEVFDNKIYTENAEFTKFLPKPREDNKHNGTIFFELVGPRVIFNYIVGGAASSLKEIFSEAGKERS

SEQ ID NO: 1960 - protein, 1677 aa, unidentified
  REGION 1..1677: note = Description of Unknown: Cas Enzyme sequence
MKKEIISPVAIDLGAKNTGVYSAHYKSGSSLDEIDKEGRVYHLERDSYTLLMAKRTASRHQRRGYDRRRMAKRLFKLIWEKHFGLSWNKEVQQTISFLLNRRGFSFLTEEHDAEILSSFPQEVYDELPQELRKDVERNEEGYNFAGALVDWVQDQGVGFVERKYRAMTERSKAIKRDLLVIGRSKTLKEYCEKRINGDTIEEEKVILGRLSRWILDEWKSAGVEGLETVDVRQNQVDMVAFLNKQSPEQARIILDNVEDYSERERELKSSLWNFDAEKFDLEKAEFGQDEPNVKTHLNHLAFAIHKTLGELQSGGRHRSKYFQEIGNVFEEVGNVLKTNKKHKTSRPHGYLRHFYEELASGGYKGLDVKTLANLIGNISNLELKPLRKYFNDKKHRRGDYWDEERLSERFENWILREWRVNPQKDKLKAPGKDYDYGELRNLWKNRSGTVVDFWLNTDPNWTVPPYQDNNNRRPPRCQSLILSPAFLDENYKEWETWLCILKGLDSTQDYLEDYEDQFSEENLTSSKGRSYFGQPDKGELKKDSGKRSGKHLNARVFQFILDRVKAEDPLNLNEIYSHAKKCRQNQSTPEEKKKAKKLLEQAIGDSCLPGELRTKISDKDEALFASGTFLHLVCGYYKTRQKARDGRIFIHPEYRYVKERGYENTGRFDAKSHLLTYCNHKPRQKRYQVLGDLAALLQVSPQDLEQLDIVRRQKGDTINERLLNWLESFDTLKTNCTRAAKEQKERRGHLKLDVQKVFGLVHYRSQNESPSSGEIRKILKDSNVEDAFKFYSFCTRAADLCLSLTQNFYTEEKQKQWKQDMYRNPAAAVYLLAQVNNIVFKERRGNSDTCSVCTMDNAQRMQTVKSRDGKRLTTKAQRLPAISTRLIDGAVKRMARIVGGAIADEKWEKIKDELNRGNKVCVPIITESNRFEFEPSLKTLKGRPLGKKDKKYRETDTLADKDRRIEQDSKGICPYTGESISGGDKDHIIPRSLGRGTLNDEANLIWASDKGNKDVKKNQIFSLRRLHPKYKEKQFGSYVNPVSDEKITEWIVEQIDADLPDEFKFGKYRSFINLSPDERKAFRHALFLPEGHSLRKKVVSAIDNRTRTLVNGTQRYFAQILADNLYKEAKRIGKERQISFDFFGVEAQANTGGDGIKDLRSAYEKTDGEISEYVKKKGDQQKAYSHLIDAQLAFVMTADAHRNDGSLGLVIGDSTSMWPFNKDTGEVFNNIFDAIKVKPEKMKQYHLARRKPDEKFSSHRAFTRDTFYADRYLPVLLQKSEDGSIGIRVGFDLQNSVVMRTDTKAKSRKLLTNLVELLPFCKETQQLAGREYDDLNDLFTTMERTEYFARQLRNNHYCYLTVNKLKLHEYWAKSCNTKNGKPFDDKAFAYQVLRYTTEKMTLEKPEDLNETSKNDKKFTWRIQGQNVTLPVKRQWESCLEAWRKSESNGESFEKFLRSHFSSSAKHSHQKARKVFSLPVLTGQGKFMIRRKSWQGDHTFQIVNDSDSRGPDNKPNIPVRLKDGSMGIKLAKWARSENIVKFPSREKYQDGETVNPTDWYAVDKDRNSFPDGIDQIWYRIDDSTAPSIAVKLARDGGDLKPEFMDEDICKHGFRKQKERKATSNSEAVPAKSPEDVRNEFFEEKIVSAKLGDIVCYKAQTYNKAIKEAFKTAKKSKLE

SEQ ID NO: 1961 - protein, 1737 aa, unidentified
  REGION 1..1737: note = Description of Unknown: Cas Enzyme sequence
MSEKNDFISPIAVDLGAKNTGVYFTHYKVGSSLDEIQKNKKGIVYKLDNYTLLMQERTIHRHQKRGLDRRQMLKRLFKLIWIKHFKLEWNHQIQQALSFLLNRRGFTFLTEEYDPEVLEEFPLEILEHEDFPKELKDKLLSSNSRQSEFINLHQEIENLSKKSDDLKKVIKLLKYEERKIKRPLFVITRIRKLKDYCNEILKTKKKIKEKGKVKLSELPMWVLEDWKKRGIKSLPETNKEKNSVDLTRYLNELSQEKVEEIFDSIPKTLEEEKQLQNSIWNRKNKKFEIEKFRSDLDKFSSEEEKNKLSWIQTHLHHLEFALEKTENEITSGGRHRSKYFQEVEEVLNQEYNEKSPKYLKNFCYNLKSGKYSPLDREKLKNLIGNLSNFELNLLRSYFNHQSHIKADQWKEKELNEKFKHWIKNIWRVNPKKDRDKGDDGKYSYKKLKEKLKNKNIIDFFLNTDPNLTIPPYQNKDNRHPPKCQSLILNINYLDQNYENWEEWLEKLKIESKDYIEDYEIQLKDLKSDKEKSYFGQEYKNDLKKDSGKRTEKHLKARVLQFIFDRSKKQDKLKLNQIYSYVKRLKERDNKNIEKLKEKLQKTIDNLPEELKSSPNFDKKDIFQEDSFLHLTCEYYKMRHRARAGRLFIHPKYNYVKNRGYENTGRFEESNHLLIYCNHKPRRKHYQTFEDLSSVLQISSQKLRQKVRDSDELIEKLKEIKGLKSNCSKIAEEQKERRSYLKLDINSIYKARKEIDFSNKKNKEEKLIKEALKATEVKDADSLYKLCEKAKELYIEILNKLDRIERNEERKSSIEENLKDNPAIAFYLLSQVNNIAFKERNGNASTCLVCSMDNSERMQLVENSTKASRLSAISTRMINGAIMRMNRIITKAIAEEKWETIKDLLKDNKKVSIPIITESNEFEFEPSKEELIKNQRINPRKGKLLDEDKGFEQLEKEYKDKRNRIKEISLLCPYTGKTLSNNEGEIDHIIPRSSQYGTLNDEANLIYASREGNTNKGNEIYSLFNLNEKYKKEVFGKKDDKEIEEWIKDKIWDEDKKGFLFGKYKNFSYLDSKQQKAFKHALFLVGNHPLRKEVIQAIDNRNRSFVNGTQRYFAEVLANQLYKKAKKEKLEHLLNFDYFSLPSKDISEIRKDMENLKKKEEDKLLYQELEEYKKKKGEKQTDYSHLIDAQVTFISSFSKYYKELKQIPIDVFRDYEKIKISKEDFEVKNLERRSIKPKDTKISHQAIFNSKAGAWHFLKLIEIKIDESSYYLNGFLDFNKLNLCLEQRDWSKIKEKIEKIEDSYHHEKIPIAQLLKEKKELEIVKLYEVGEGKHQFGYQKNEQYPKMIMEKNWNSHSEIPGTSVKNIKVFLHNIDKTKVAKFLLNNFNTKSDPKKWKDEDCQILDQLKTIWYHTKKIEIQYNAKKKEIEAKKKIQDILKFNKDFKFNKCFNSSLFYSWKNLDNKWNQFVKNEKPEEFLKKYFINQYSRKNPKILNQPHQKVRKRFSLPLKSSGQGWFLVKRRIWEKDKNTYIYQCLSEENIPKFGSHKDTLKDILHLHFRQNNLFLFSTSSKNLKEKLDFVDDIIDSDAYFERDIPEDLLNLLEKIENKTSNDNKRAYFRFTFNKHLDENDLDKNFMKIINRFPIRRFVENEGLKNLLEEYSKESIKSILREFEELKRIEEKSKTKEEDDEKKKKNDFYSEVKKLYDKVDENILEYQTNTPFSKKKNNSKLKEKNKKN

SEQ ID NO: 1962 - protein, 958 aa, unidentified
  REGION 1..958: note = Description of Unknown: Cas Enzyme sequence
MPSDDETVSYILGRIETDEFLPKQLTRANGVIPNQLHAAELKAILKNAENYLPFLLEKDESKKTASERILMLFSFCMPYYVGTLKNGWAVRREEGCVYPWNIEQKIDMKQTAAEFILRMVRHCTYLNGEEALPDSSLLYERYKVLNELNSISIHGARIDNELKQRVYNDLFKKGKKVRRRQLFNYLVGLGVLEKNEESEITGLDGDFKNSLSSYGRFKAVLGDDIEKDSVKKMVEDIIFWGTIYSDDKKMFIHKVEEVYGDCLDAEQLKRIKGFKFGSWGRLSRTFLMMEGCDISEESTGEIMSLIGAMWNTKYNMMELLGSGFTYKDTLQDMVVASDKLLSEYRYSDLDGMYLSNPVKRMVWQTLLVLKEIEKVMGCSPKRIFVEMARFNGVKGDRKDSRKKKLSDLYNALGKEGAKWKEEIEKLDEGRFNQKKLYLYYMQKGRCMYTNTIIPIEDLFKDNLYDIDHVYPRHFVKDDSIENNLVLVRKQDNAHKSDSYPIESGIQGKCVGFWKELMNGGFISREKYFRLTRTEEFSEQELAGFISRQIVETGQGTKAVASILREALPDTKIVYVKASNVSAFRQDRDLLKVRSVNDFHHANDAYLNIVVGNVYFTKFTDNPLNFVRDFRKDPEKYKYHQYKMFDYDVKRRGEVAWVAQKKDGNCGTIATVKKVMARNTPLVTMMSYEGRGKLMDQTIYRAEKARTGSGYIPLKKEGPLSDVAKYGGYTDAPTAYFSLVEYTHKKKRVRAIVAVPVLWAESIQSKTELVRYFEEQCGLVKPTVKIAKINIKSTVRIDGFEYYLTGRTESRLVIVNAVQLCLSQAYMAYIKKIEKFCASGATDPADEYITKDANLELYNVLTEKHRRLIFSKRVNSVGDKLHDDKLKFVELSIREQCIVLLNILQLSQRINKGADLTLIKESKQTGVTKVNSVISQKEFLLINKSVTGLFENSVDLTKI

SEQ ID NO: 1963 - protein, 360 aa, unidentified
  REGION 1..360: note = Description of Unknown: Cas Enzyme sequence
MREYYVGLDMGTNSVGWAVTDTEYNLMRAKGKDMWGVRLFDEAQVAAGRRTQRISRRRTQRSQARIGYVREIFDDAIKAVDPGFFMRLDESFLHLEDKSVRNPNAVFSDELFKDSDYFHRYPTIFHLRKELIYSNQPHDVRLVYLAIVNIFKHRGHFLNEGLDVENVGGSFADLYHEMCTVLSENVDINLSKNIDAAALQEILTQKHVKRKKIFDNAVTFLDIKKDKRACEVLKLVCGLSGKLSTVFNAEELSETIESKSISFESDNEELFNEMSEEQLQTMAAVQAVHDSILLMNTMEGFSFLSEARIAMYEEHKKDLKALKNVYLKYAPERYDDMFRRMQDNNYSAYVGSVNSKEEKE

SEQ ID NO: 1964 - protein, 1397 aa, unidentified
  REGION 1..1397: note = Description of Unknown: Cas Enzyme sequence
MARKLKNINGPWYAGIDLDGTSVGFVATDEYGEVLYHKGQPVMGARCFKEALHASEARMPRTARRRLQRARGREREMERMFAPAIAPTDPDFFVRRRMSYKLMRDDIAADPAAAAWQGLLDGYPTLAHLDVDLMESDTPRDPRLIFWAVANHVVRRGHFLMEGHDVTSANSDPSAQVENLVRELDALGEACGEDIEFDDGALADMGGSWTAREFQKAVSGAVSVTGDDIDAKIARSQAKALGDLVAGYKANMDAFALEGEQIGKVSVSDADALDEFLANCPDRLAPTIEAARGLYSAWRLQGLLSFAPGKTLSHNQVAQYEVYGRQLRTLKDLALKYIVRADSADGPDEDGLALYRAFFGGPKRSGRRGYDKILVKKHDGAKRNMGYTAYDLNLIPYEEFKKRVERLFKGTDAVKDPAYADMVAALGEHRFLRRIHTTDNSAIPYQLHAEVVGRIIDKQGSFYPWLKDAGPHILKVLTSRIPYYVGPLDSSAAPVDAHGKARFAWSRRLPGHERAFVAPWNYEEHIDTDAAAEAFIRRMTGKCTYLVDEDVLPANSLIYERFRFLNELAGIRYTEDGQDWLPLDAAMRAAVVEAASDGSVMTLNRIENILSRDFTMAHPHVKGVSDAKRMTSRLSVSAWMANLLGVKTLTAAQKSMAEDLILWNTVFEERSILKRKIAKEYGDVLDEDAIDAFCAKRLKGWGQLSERLLTGVWADTARGDMCIMDVLEQGAPYGRFRGASMNLMQALSDTELGFRAKIDEINAAALEKAGELGIDALPGSPALRRGVSQAMKVIEDMTSVAGCAPAKVYVEVTRTASNKLKGRRSQSRAQEIEAALKALDEDARRDLDAARLLRELGMFDEKEINERLYLYFKQAGKSLYSGRPIDIARIASADYCVDRILPRSVRKDESLDNKVLVLYAESLDKKESILVPQPVQRKMAPFWMHLRRVGLMTERKLNALMRTQISERMLKSIVGRQLTETSQECKLIAAVLEATYAGVKVVPVKAGVASSVRRRAGIPRSRKANRYYHAHDALIALTTGRFIETRAPMWSNNRAFYERTMRDIEAQERRGGADSELDFFSGGFFRDLVDYDTAEVLWDSDFERERLVRACSWKNLRVTFAPYEEGVAFWKQTVYSPRDSKTKLIPVKGDRDAALFGGYSAQTFAYFMIYESEGKKGNLFRFAPVPTSIASKATDSLTELYARSLCRESGERFIRVVRDRILKETVYEAYGERFRIKGQKTAGPVRQLALDTSDTRLLRIVERMVDGEQPSPRRDLESDAQVLCRLWARLLELAPANFPRVSKVLKLGALKTPEEVFSDAEADDIAKTVRAVAESEVQVVELLSGIRGTADVRSLGGSAFAGTLSMTFDKIINDPKAGFAIVDISAAGLHERVSTLG

SEQ ID NO: 1965 - protein, 1295 aa, unidentified
  REGION 1..1295: note = Description of Unknown: Cas Enzyme sequence
WAVTDHDYNVLRFKGKSMWGARLFEAANDASERRAARTSRRRLNRRKQRIRILEELFAEEIVKKDPNFFQRLHESNLWQEDRTDQSYNYVLFNDKDYTDKDYLRKYPTVYHLRADLIHNTQPHDARLVFLALHHIFKSRGHFLYEGSENSEEGKTLEESFRDLQDYLSDYSIVFNPADMQEFEKALSEDTGVTVKKKALLKAYGTVDSFDIDIDVTSLIELFSGASVKLHKLFGDDSLKNTDITSVSLKDDLDAKYDQLADALDDDRLELILKAKEVFDIARLKQFLGDNRYLSEAKVQLYERNRKDLKTLKQFIRKNNPSEYKNVFNAKDGVNNYAAYSRYKTKNRCTQKEFCSFLKGKTEGMKDSDNPEERRIYEEIVAKTFLPRLKGSDNGVIPYQLHLKELKAILNNAEKYLPFLKETDKDGISVREKLISTYTFRVPYFVGPLNPKAKNSWVERTDEKIYPWNFSKVVDEEKSAQAFMDKLIGRCTYTKEPVLPMNSLLYSEYKVLNELNPMMINGKPIPADVKNKVFEDLFVNSGRKVTKNSLRKYLLANGYITDADELSGIDDTVKSNLKSWHDFKDILNRTHDYDQVERIIRSMVVFNADKKMLRKWLDKNTHGLTEDDKRKIVRLNYKDWGNLSKEFLADIYSPDENGEVMNIIEKLRSSNLNLMKLLSGEFEYREQVNKYLEEHGYARDNIHTFLDELYIAPAVKRSIWQTLRIVDEIVDIQKCAPEKIFIEMARPDAKTVKKERTESRKDSLLKLYKSCGEQVRDLQEKLEQATDQSLRRDKLYLYYTQMGRCMYSGEPIDLEEMLKDNTTYDIDHIYPRSRIKDDSLTNRVLVKSSLNREKTNTYPIKDDIRASMQSFWNLLKDKKLISEEKYRRLTRAYELTPDELASFVARQITVTQQSTKALAQVLEHQYGNTRIVYSKAGNVSDFRHKYGFVKMREVNDLHHAKDAYLNVVVGNVYDTKFTTKFFNNITKEIYSLNKVFDFNTPGAWNKDGSTLKNVKKYMAKNNPIVTFMPVIVKGAISDLQIMPKGKGQLPVKQGMDVDKYGGYNKISGSYFAVIEHQKGKKTLRTIVPVFIHDEAKYRKDPADYFKSYQYENARVIADKIPFNTLLELNGKRLYITGRTNNQILYKHSYELAIDDDHIQYLKNIKKYLERCKMQKKEFEISEKDGISAENNILMYDWFVNKLQQDVYKNIFPTMLDDMVKNKDKYTKMPLPAQCRLLMEILKVFKCDRQTSNFKELNGKGTVGVILTANNIQGNTSAYIINQSVTGLYEYKVDLLK

SEQ ID NO: 1966 - protein, 1342 aa, unidentified
  REGION 1..1342: note = Description of Unknown: Cas Enzyme sequence
MNQEYYMGLDMGTGSLGWAITDTDYHILRRHGKALWGVRLFESALTAEERRSFRIARRRLDRRNWRIQILQELFSEEISKVDLGFFQRMKESKYYPEDKKDINGKCPELPYALFVDKNYTDKEYHREYPTIYHLRKMLMETEEMPDIRLVYLGLHHMMKHRGHFLLSGDISKIKEFKGTFLQLEENLKKEELNWTLELSDDEIQFIENTLKDRMHTKSVKKSRLIKQLNAKTTCEKAILNLISGGSVKLSDIFENSELDGCENPKISFSDTGYDDYIGTVEADLVEQYYIIESAKAVYDWSVLVEILGDSSSISEAKVKLYEKHKADLRYLKKIVRKYLPLEYKHIFIDTEEKLNNYVAYIGMTKKNGKKNDLQSKKCSKEEFYDFLKKNVIKKISDQEVVSYLEKELEQGTFLPKQVNKENSVIPYQVHMYELRKILDNLSGKSSFMQENKEKILQLFEFRIPYYVGPLGRNEEGTEGKFTWAVRKNNEKIYPWNFKDVIDIEESAEKFIRRMTNKCTYMLGEDVLPKDSLLYSKYMVLNELNNLRLNGEKISVELKQRLYKEVFCCYRKVTIKKLKNYLIREGIVDKNVEITGIDGDFKAQLTAFHDFKEKLTGVTLSQKEKEEIILNIVLFGDDKKLLKQRVMRMHPELTEKQIKSISMLSYKGWGRLSKAFLENITTPAPGTEEVWNVITAMWETNDNLMQILSKNYQFMDRIEEYNSIRKEKNLSYKTVDELYVSPAVKRQIWQTLKVVKELQKVMECAPKRVFVEMARGEQGNQKDKRRDSRKKQLIDLYKKCKEEERDWIEELNKNEDQQLRSDKLYLYYTQKGRCMYSGEIIQLEDLWDNTKYDIDHIYPQSKTMDDSLNNRVLVKKEYNAAKSDEYPIKGSIRKARKLFWKSLLDEGFITKEKYERLIRNTALTPDELAGFINRQLVETRQSTKAVAEILKQVFPDSEIVYVKAKNVSEFRQDFTPDLLKVRDMNDLHHAKDAYLNIVVGNSYYTKFTKNAAWFIKENPGRSYNLKMMFKGDKDIIRNGEVAWKAGNNGTIVTVKNVMKKNNILVTRRTYEVKGGLFKQQPIKKGKGQLPLKESDNRLNNLKKYGGYTEIAGSYYLLVKSIDKKGKIKKTIEYIPIYLRETLENNKEKIIYYLKERGLINPQILLKIKTDTLFKINGSYIWISGRKTNYLIFKNANQLVLENTNAIILKNIIKFLQRKAENKNLQITHNDKLGEKELCQVYDVLSKKLEIPVYSAILMSEMEAVKKGREKFIELSREEQCNTIKKIFHIMQCRSARENLREIGGGTEAGRILINKNIDKYKQISIINQSPTGIYEEEIDLLKL

SEQ ID NO: 1967 - protein, 1024 aa, unidentified
  REGION 1..1024: note = Description of Unknown: Cas Enzyme sequence
EKLKGVWKKADQESYRSFFQKAGNDNYCAYIGSTIQNGKKKRVKRCSYEDLKKSIKKMLNTYYKDSQDETVLYILKELETETFLPLQVTKDNGVIPYQVNEIELKKILENAQDYLPFLKQEDENGISVKEKILSIFKFRVPYYVGPLNTNQNKNAWAVRKEAGVVRPWNIQEKIDFDQSGERFIRRMTNKCTYLIGKDVLPKNSLLYSEYMVWNEINNIKLGTEKLEVALKQSLFDALFKGKKHVKRKDILAFLRSEGIDATDEQISGIDSTIKSSLTSYHDFRKIFGEDVEHYRTKQMIEKIILWITVYGDEPQMIKQIIRKNYTTEEISDEQMKKIVRLRYQGWGRLSGEFLNELEGADTETGEVYTILLALRNTNANLMQLLSQRYTFREAIDRENHQNKTSETSMTYENLMEDRIASPSVKRAVWQTVLIAKEIKKIMGKAPKKVFIEMTRGEGEKKRTTSRKNQLLELYRQIGKEESRNWIEEIGQKEEKDFRSIKLYLYYTQMGRCMYTGDPIDLSQLMDATVYDRDHIYPQSKTKDDSFDNLVLVKRTVNAKKSDGLLSANIQKKMQPLWKILKEKHFISDKKYERLMRKMPLTDEELAGFINRQIVETSQSTKIAAEVLQELFSESEIVYVKAKAVSEFRQEQLDMVKVRSLNDLHHAKDAYLNIVVGNVYHEKFTNNPLRWLKETPERTYSLNRMYDFDLIKNGKVIWERGKDGSIKTVSDQMKKNQIQYTRYAVMNKTGQNGGYFDQNPVGRDQNPGVPLKKGMDVRKYGGYKTVTPACFALVESENKKGELIRSIEAVPLYLKKQFEAGTASYEEYCETVYGLKKPRIILSQIKKDTCLVINRFPMHLRGTTGKQLLLQGAVQLCLDGELERYLKKIEKYIQRNQERTDKKRLLEIGVNDGITREENLRLYLELCRKQKDTIYKYRPNNQYEALIKAQERFEGLCCEEQCIVLNEILWLLKCKPNMADLSPIGGASMAGKISLNKIISKYDSVVIKNQSVTGLYEQTIDLLKI

SEQ ID NO: 1968 - protein, 963 aa, unidentified
  REGION 1..963: note = Description of Unknown: Cas Enzyme sequence
LSKYEIDGEYQGIIEKLSLSMLLPKQIVKDNGVIPYQVHKTELAKILENAQKNYPVLGAKEKDGLSIADKVLKIFEFRIPYYVGPLNDAHLGTGNCWIVKNKKEKIYPWNFEDVVDIELSAEKFITRMTNKCTYIIGADVIPKNSLLYSEFMVLNELNNVRIGQDKISQDVKIKIYKDLFLKQRKVTRKQFTNYLVREGIMDKTEEVSGFDGDFKASMSSYIDFSTKVGLDLSKYSTVEMVEEIIKWILLYGEDKKILINKIKKVYGNQLSQDQITQIKKLKYSSWGNFSRELLVDVVGADKETGECQSIIQALRDTTYNFMQLLSSNFTYSDEIAELNRSEKTTGKITYDMVKDLYVSPAVKHQLWQTVLIMDELYKVMGAEPEKIFIEMARGAEEKPTRKESRKNQLIELYKACKNEERDWANELSNCTEQDFRRDRLYLYYNQKGRCMYCGKRIELSDLFDANKYDVDHIYPQSKVKDDSLDNRVLVCRTCNAIKTDEYPLNSSIQSNQYPYWTMLFKQNFISERKYKRLIRNTPFTVGELSDFIARQLVETRQSTKAAAELFKQQFDKTAVVYVKAGNVSEFRRQFDLVKVRDVNDYHHAKDAFLNIVVGNVYHTKFTSSPLNFFQQKVPQTYNIRRMYDFKVERYGKVAWIAENGQSISHVKKVMYKNDILYTRASFEAKGGLFNQTLKSKEACRNGYGYIPLKGGDPRMKDVTKYGGYEKVAGTYFFLVEHEVKKNRVRTIENVPLYLKSVIESSGDGLVIYCINQLGLKKPVIIEKKIKMQSLIKINGFPTHLTGRSGNSLLVRGAVQLCIDEKFYNYTKKIYNYLDRNKEAKKVFKITCYDGITREDNIQLYEELVHKLNNSIYQYQPNCQGKKLIGYKDDFVERVIEDQCYILGQVIQLTKCANLGADLKIIGGSTISGKMLISKDISKIDSIHMIHQSATGLFERKVDLLREV

SEQ ID NO: 1969 - protein, 406 aa, unidentified
  REGION 1..406: note = Description of Unknown: Cas Enzyme sequence
MVVEINIIISKRTIFVNHFFIMRISMVREGKGMDNASKYYVGLDIGTDSVGWAVTDENYNIIRKKGKSLWGIRLFEAASPAAERRVFRSSRRRLQRKVQRIKWLQELFAEVISIKDPGFYQRMQDSKYYVEDKSEQQKNTLFFDDNYTDKEFHKKFPTIFHLRKALIEGKREYDIRLFYLAIHHIIKHRGHFLFEGSNIESVASFENVYFDLKQYLLDEFEIEIETQDIQAVENLLKSKKIARSVKKKELVKLFAVEKENKSLIAILGLIAGCTEKISTIFANDDYAELEKNSICFSDAGYEQMVDDLEANLGENMFLIEKLKAIYDWAVLSEILGSERYLSFAKVAKYTEHEKDLIVLKEMIKKYCPAKYDEVFKVSDKSICNYPSYIGMTIKNRKKQYIEKKCS

SEQ ID NO: 1970 - protein, 1343 aa, unidentified
  REGION 1..1343: note = Description of Unknown: Cas Enzyme sequence
MSTMGKNNNEYYLGLDIGTDSVGWAVTDLDYNIQKFNGKAMWGIRLFEAGETAAERRVFRTTRRRIQRRKQRIELLQELFDKEIAKVDPQFFLRLKESKYWVEDRTLGQVNILFNDGEYTDKDYYKDYPTIYHLRKELMESDEAHDVRLVYLVIHHIIKNRGHFLFEGEGRKDVSSFPTIFKELCQSMHDEMELELEAEDLNQVEAVLKNRENGINDKKTQLNKLLTIDDDHKKDLKAIIALLAGGKAKVDAFFGEKTSENSDVKDLTFVGGKFEENFDALSTMLGDKMFCLEKMKAIYDWSVLEEILQGKEYLSYAKVATYEKHKSDLVMLKRVIRKYRPEEYDACFKDPKGKSNFCAYVGMAKKGKKKLVIEKKCSQEDLCKYLSKVLGGIAAEDQELQYILSEIQRNVLLPKQVNKDNGVIPNQLHREELSMILNHAEKYLPFFKIVDESGFSVREKIEKILTFRIPYYVGPLNAYHKSLGHCWIVKNKEEKIYPWNFDEVVNLEESATAFIRKMTSKCTYVIGADVVPKNSLLYSEFMVLNELNNVKVNGEELPIEIKGKAFEEVFKKIKRVTGKRLRDFLIAEGAFKKGDELSGFDQNFKGSLTSYLDFKRILGDRKVPREAIEGMIQAIVLFGDDRKLLRRRIQNGYGELLSKEEVAAICKLKYMGWGRLSKEFLEEIYHVDHKTGEMINIIAMMHRTNDNLMQLLSSQYRFTGALEEKNREVLSDNTDIAYSIVKDLYVSPAVRRSIWQSLKIVKEIAKIKKTAPKKVFVEVARENGEKKRTVSRKNALIALYKNCKEEERDWQVELEAKTDHELRRDRLYLYYTQMGRCMYTGNPIDLNRLFDVNIYDVDHIFPQSKIKDDSLANRVLVERTVNANKSDVYPLPEEIRNKNRSFWTMLYKKELISKRKYDRLTRVTPFTDSELADFIARQLVETRQSTKAVAQVLKQVFPETDVVYVKAGNVSDFRHKYKLIKVREVNNYHHAKDAYLNIVVGNVYDTKFTKSPLNFIQGKGGKNYSLNRMYDFDVERAGIVAWKKGNEGSLKTVRRFMKKNNILFTRHAFEVKGGLFDQTIMKKGKGQVPIKGGDERLSDISKYGGYNKVSGAYFFLVEHTVKKKRIRTLEFAPVYLAKKMEDQTALLEFCTKEIGLVEPRVLVSRVKINTMFEIDGFKMHISGRTGNSILYKCGEQLVTNYEDEQYLKGIGKYLGRVKVARKELPINEHDKINAERNFEIYNLYLSKLKSSIYNVHLDSQIKHFENGKEKFEKLSLLDQCQVLNNTLNLFKCTSDGANLSLIGAGAKCGRLLIGKNITLKSRVYIVNQSITGLFEQKVDLLAI

SEQ ID NO: 1971 - protein, 1365 aa, unidentified
  REGION 1..1365: note = Description of Unknown: Cas Enzyme sequence
MKSKEKCANIAGNYYIGLDIGTDSVGYAVTDKSYELLKYKGEPMWGSHLFDAANQCADRRGYRTARRRLDRVQFRVHLIDTIFAKEISKIDPDFYIRKQESRLYLEDKSTQDKHVYFNDENFNERDYYQKYPTIHHLILDLMTSDEKKDLRLINIAIDWLVAHRGHFLSEVSVDHVDELREFNSIYEDFISCFDLLELDRPWADADAEEFGTILKRKRVSEKENALTKLLFGDGKPPKASEDSDIDVKTLIKFISGRKIKLNELFLKLELEEDKSVQISDEVEEYIALADDYSELIIKIVAMYEWSVLSDILGSSTYISEAKVKIYDKHKKDLVELKRFVKRNRPQQYNKIFRNSDDKLTNYTAYSYNVSSVKQGQKLPNRKCSIDDFYTFLKKELCLSDIENNYQDESDQNYLKGILAEMETRDFMPKQVITDNRVIPYQLYYVELREILDKAQKYYPFLNDKDSDGISQVDKVFSVFKFRIPYYVGPLRKDNSKYAWIERKAGNIYPWNFDSMVDEDKSEQNFIERMTNTCSYIPGKTVLPKYSLLYTKFMVLNEINNLKVNEVPISVEAKQFIFDELFCRYAKVSKKKIEEALVTNSFMQKGDILSGVDITIKSSLKSRNDFRRLLSKGILTEADVEKIIERCTYTEDKGRFKNWLKASYPDLSEDDLKYVSKLKYKDFGRLSHYFLSGLEGCDKETGETGTIMHFLWTTNDNLMQLLSEKYTFIEEISNLRKDYYSKHKLNLEDQLEEMGISNAVKRPVIRTMAVLKDVTSTIGSVPKKVFVEMARGPEEKGKRTLSRKEQILELYKNVETDTVELRKELEAMGEEANNKLQKDSLFLYYTQLGKCMYTGESINLVKLQKNSEMYDIDHIYPQSKVKDDSILNNKVLVLKEENGRKSDTYPLSGEIRASQRNFWERLKKAGLITEEKFSRLIRNTPFSDDEKMGFINRQLVETRQSTKAVTQIINLYYPETEVVFVKARLASDFRNEFLWPKSRIINDLHHAKDAYLNVVVGNVYHEKFTKKWFNINDSYNLKTDKLFTRDVKHGDEYIWKADEGLAKVKNTFKKNNIHLTRYTYCKKGGLFDQMPVKKAVGLIPLKSGLDTEKYGGYNKAAASFYVLARYNKGKKKEITFIPVELMYSDLFMNDDAFAVEYTEKFLMSIQTKKVDSIEFLLDKRPIKIKSELSFDGYRVWVNGKTSYGKQIIFSNATSLILASEHELYVHKIERVLGKLQKNANYKIDKAFDEVSEAENLMLYDILSDKYQNSIFCKMPANIGKILLDGREKFESLSFIKQLELLETITESLKTGRSAGIDLVELGGKKSCGAMITSTNFTTFKCKEMFVIDQSPAGLHVKKSVNLMDLL

SEQ ID NO: 1972 - protein, 1467 aa, unidentified
  REGION 1..1467: note = Description of Unknown: Cas Enzyme sequence
MAGKKFYLGLDIGTDSVGFCVTDENYDIIKKHKTVYDGEKTKYYGNHVWGSRLFDEAQDASSRRRARERRRRLQRRRQRIVLLQQLFAPEMEKVDPYFFDRLNNSAIHLEDRNELLRQKHLLFNGNDYTDKDFFKKYPTIYHLRKARMEHPEKKFDIREIYLALAHRIKYRGNFLHEGERTSIGSDPETIVSSFNAIDSTLEDIREEEENFTVSSYGCSLDRAKELLEKFKTINKIGELYDVLVSVFKLNGLKSTDPKRQRLALIAGSSKSLSQLFPEIEFEEERGKQKVDFSSEDFADKVIPGCSSAIGDSRVRLLLKLKELYDLRILARLLNGKATVSEARVDIYEKHKEQLKVLKDLVKRYCPDKYNAFFRQFSESEKGDKKGFFSYASYIGFNDKNGKKEMVAHSVITDDLYTTIKARLPLEEADKDTFAEKQPGDKEKLLSIKKAIENRDYLLRQNSKENGVLPYQLNLNERRIILENQSKFYPFLGEKDKDFNNPEKFSYRIESILKYKIPYFVGPLSRKATNSWIVRKEGHNEKITPWNFHDVVDEEATADGFRANLKNYCTYLINEPTLPKQSLVYQRFILLNERNKWLINGSPITVEDKLYLIKEAYLTRKSVSKKYVTDILKRKYKTSVDLTTKGSGSGQGVTDEDFHASLSSWIALRDSRAFGPALLHDKKKQALAEQIIYDIATFENQNLRVKRLKKYPLTPNQIKYISGLSFEGWAKLSNKLLTGLTTERTNPETGEVLEYSIMDLRWRTNRNFREILTTKEGKDYKFDFRPKIEELNGSKNENREDFLNSLYASPMRKRALKQTIDIVQELKKILKIDQFDSYFVESTRFEGEKKRTKSRKDKILALYKESVKQFRAEFDLEKLKNVLEKRTDGELNSKKLYLYFRQAGKSLYTGEPIDLNELSTAYDIDHIIPQAKVKDDSFRNTVLVEKSVNNKKQDRYPIPADIRTPKGISVIKALHSLNNDLRPKDKRNRLLRPVSKPLTDDELSGFVQRQLVSTNQSVKAVCEVLKWRDKDAKVVYSKAKNVSEFRQVFDLVKSREANDFHHAHDAYLNIVVGNVYDKVFSTGDSKTVKHKREYLEARNRDTEYRFKHDERRRYTDTLVWKAKRYEPNWHGEEVKDSEGTIDKVRKYLSYQDPLVTQRRFTNVEKHGFFKISLHTAKEGNATLPIKQKGPFAKEGWQKKYGGYSNRSNPYASLVRSEGKKGKHIYSIEFVPTVIRLQRKGNPQARKKYLTENNKLKNPEVLIEKLLRRTILQIPYKAENGKEGYVRLGISGKTGSSIVCINRSELHIPAVYRKTIKKISKRLGLNNQAGEKTDTSIYEKFGSNDIDLGKGRQITRDELKKLYDYRVKDVYCRPEYEGLPTLSATITKIKGATAFESLSTLNQRNVLAILVKLVSCKSVQGNDLTILNLEKATNCGKIVASRLLISKTKIIQTSTTGLVERVLFTVPED

SEQ ID NO: 1973 - protein, 1343 aa, unidentified
  REGION 1..1343: note = Description of Unknown: Cas Enzyme sequence
MEKEYFLGLDMGTGSVGWAVTDNRYEVLRSHGKALWGVRLFESANTAEERRMFRTARRRLDRRNWRIQILQELFAEEIAAVDPGFYLRMKESKYYPEDKRDTKGNCPDLPYALFVDRNYTDEEYHAQFPTIYHLRKYLMNTSETPDIRLIYLAIHHMMKHRGHFLLSGDISQIKEFKGTFLQMILNLKNEELEWEIETEDKELEFIEKILKNKELTKNAKKSTLIKHLKAKTACEKAILTLLSGGTVKLCDIFANEELNECERPKISFSDSEYDDYIGSVESALGEQYCIIESIKAVYDWSVLVEILGDSSSISEAKVKVYEKHRQDLKYLKKVVREELSSDEYKKIFVETSDKLNNYCAYIGMTKKNGKKVDLLSKQCSKEDFYDFLKKSVIKNIADPDTKEYLEKEIEQGSFLPKQVNKENGVIPYQVHLHELKEILRNMEEKLPFIKENKEKLIQLFEFRIPYYVGPLNSTEGKDEKFTWAVRKSKEKIYPWNFTEIVDVEESAEKFIRRMTNKCTYLVGEDVLPKDSLLYSKFMVLNELNNLRLDGEKLSVELKKKIYEEVFCKYRKVTVKKLKKYLRCQGIADEKVEISGINGEFKAQLNSYHDFKEKLTNLELSQKAKEEIILNIVLFGEDKKLLKQRLHKRFPELTDGQLKGICTLSYKGWGRLSGTFLEKITAPAPETGEVWNIITALWETNDNLMQILSRNYMFADEIKAFNSGRKNTELSYKTVEELYVSPAVKRQIWQTLKIVKEIKKVMGADPQRVFVEMAREKQESKRTESRKKQLQDLYKACRKEEPEWIDELCGQLDELQEHQLRSDKLYLYYTQKGRCMYSGERIDLGDLWDNQKYDIDHIYPQSKTMDDSLGNRVLVKKSLNHDKTDIYPIKKEIRDKMSPFWKSLLEHGFISKKKYERLTRATELEPDELAGFIERQLVETRQSTKAVAEILQMALPHTEIVYVKAGNVSRFRQDFELIKVRDMNDLHHAKDAYLNIVVGNSYYVKFTKNAAWYVKENPGRSYNLKTMFTSEKKDIVRNDELAWKAGNNGTITTVKKFMKKNNILVTRKAYEVKGGLFKQQPLKKRKGQFSLKSSDKRLCDIQKYGGYTEITGSYFVLVKSKDKKGKIKRTIEFVPVYLREIIENDEKESYRYLTSNCGLLEPEIILKIKKDSLFEINRSKLWISGRKSRYLIFKNANQVILEDSLVRTLKLLRNFEERRKENKEIRITPYDKITEDKLLKLYDAFEDKMESAVYKFILDKEVKTLKEGKNMFLQMSIEEKCNLLIKISHLLQCRSIRENLKEIGGSSEAGRLILKKDISQYESCVLITQSVTGIFDKEINLLTL

SEQ ID NO: 1974 - protein, 1338 aa, unidentified
  REGION 1..1338: note = Description of Unknown: Cas Enzyme sequence
MRDYYIGLDLGTGSLGWAVTDREYEIMRAHGKALWGVRLFDSANTAEERRGFRTARRRLDRRNWRIELLQELLGEDIGKVDSGFFLRMKESKYVPEDKRDVNGNCPKLPYALFVEDGYTDKDYHRQFPTIYHLRKWLMETEETPDIRLVYLALHHMMKHRGHFLFSGNIEKIKEFQETFRQYIGKIREEELDFHLCIEGEELRETENILKDKNLTRSAKKTRLIKLLGAHTACEKAALNLVAGGTVKLSDIFGNSELDACEKPKLSFADAGYDDYAGMIEDELGEQYVIIETAKAVYDWSVLADILGDYRCISEAKAAVYEKHQKDLRHLKELVKENLGRDIYKEVFVKTNEKLPNYSAYIGMTKKNGVKSEMEGKRCDRKAFYDYLKKTVVNAISDESTTEYLRKEMETETFLPRQVTKDNGVIPHQVHLQELDAILENLSGRIPVLKENGGKIRDIFTFRIPYYVGPLNGIVKGGERTNWVRRKKAGRICPWNFDEMVDTGASAEEFIRRMTSKCTYLIHEDVLPKNSMLYSKFMVLNELNNVRLNGEPISVELKQKIYEDLFQRHRKVTRRRLTDYIRREGIAGGDADITGIDGDFKGSLTAYHDFKEKLTGCELSQADKENIILNITLFGEDKALLKKRLGALYPALTEPQKKAICALSYKGWGRLSQRLLEGITAPAPETGEIWTVIRAMWETNDNLMQVLSEKYCFAAAIDEENAGEEPKEITYKTVEQMNVSPAVRRQIWQSLQVIKEICKVMGGPPKRVFVEMAREKTESRRTESRKKRLIDLYKKCREEERDWIEELGNTEEARLRSDKLYLYYTQKGRCMYSGEVIELEELWDNRKYDIDHIYPQSKVMDDSLDNRVLVKKEYNADKTDEYPIRADIRGKMRAFWRILQDGGFISKEKYNRLTRGTGFEPSELAGFIARQLVETRQGTKAVASVLKQVFPETDIVYAKARVASQFRQEFDLIKVREMNDLHHAKDAYVNIVVGNVYYTKFTSNAAWYVKEHPGRSYNLKKMFTSERDVARNGETAWRAGNSGTIATVKRVMGKNNILVTRRSYEVKGGLFDQQLMKKGKGQVPIKGRDERLADIDKYGGYNKAAGTYFMLAESEDKKGAKIRSVEYVPLYLCKCIEKDEEAAKEYLQKERGLKNPSILIAKIKIDTLFKVDGFYMWLSGRTGNQLIFKGANQLILSEPDMRILKKVLKYVNRKKENKNAVLGEHDQLPETDLIRLYDVFLDKIENTVYHVRLSAQQGTLTKNKDTFCELSNEDKCIVLSEILHLFQCQSSTSNLKLIHGPNEAGKLVLNNIISKCNQISIIHQSLTGIYEQEIDLKKI

SEQ ID NO: 1975 - protein, 1357 aa, unidentified
  REGION 1..1357: note = Description of Unknown: Cas Enzyme sequence
MKSKSYYLGLDIGTDSVGYAVTDEQYQLIKFHGEPAWGATVFDEASLNGERRSFRTARRRLDRRQQRVKLIQELFSPEVEKVDPRFFIRQQESYLYRDEVNDKHILFNDVDYTDVDYFNQYPTIHHLICDLMNSKDEHDVRLVYLACAWLVAHRGHFLSNIDVDNIDKIKDFTGLYKEFLGFFEDAGYEYPWEINDPAQFGDILKAKIRITDKSKQLTIFLYGGKKPSKEATESFPYNRDAIVKLLAGGTCKLKDLFCNIDYDEFGSVSLTMDDEKLAAISDNIGEDFDLIANLKMLTDWAILVDALDDEDSISEAKTKVYDQHKADLALLKKIVRKYIPEKYDEVFRKNIKSNNNYVSYSYHTNNGNTADIKKVKLEDFSKYLKSLLKDIVPEPEDEEAFQDMIERIELLQFMPKQKNTDNRVIPYQLYAYELKKILKNASEYLEFLNTVDEEGISVSEKIYQVFTFKIPYFVGPLNTKSEYAWLERKAGKIYPWNFESMVDLDASEQNFIKRMTNQCTYLPGEPVLPKDSLIYRKFMTLNEINNIKINGEKIPVELKQDIYNNLFGNLKKVTRKRLINYFIANGIIQKGEEELVSGIDVDIKSNLASQIAFKRLMENGLLSEQDVEAIIERASYAEDKTRLSKWLERHYPQINDSDRRYICRIKISDFGRLSGRFLCELEGVCKETGEIVTILGEMWNTSNNLMEILSDKYTFFEEIEKYQKDYYSVHSRNLSDRLDEMYISNSVKRSIYRTLAIVKDVEKAFGKPKKIFVEMARGGTEEQKGKRTKSRKEQIYELYSQCKNEDVRELQEQLESMGEYADNKLQSDRLFLYYMQLGKCMYSGTSIELEQLSSKRYDVDHIYPQAYVKDDSIINNKVLVLSKENGKKGDVYPISSDIRDKMSGFWHMLKDKNLISQEKYNRLVRSTAFTDDEKQGFINRQLTETSQATKAIAVILKERFPDAEIVYCKARLVSDFRKDFDLLKSRNYNDLHHAVDAYLNIVTGNVYSMKFTKRWFNIHSKYSIKPKTLFTHPLICEGKTVWDGEAMLGMVKKTASKNNAHFTKYAYLKHGGFFDQQPVAAAKGLVPLKNGLDTERYGGYNSAKIMFFIPVKYTIKKKKEIFIMPVEELHGQHFLDDEQFAEKYTFQRLESILGKKIDDISFPVSRRPWKINTALLLNGYKVCLAGTSSGGKCLIAQPMTQFTSDSYWNYYLKKLEKYNEKNNKYASYKYSKEYDQISCEENLALYDLYISKYKNTIMKNRICNPISTLEKGRNAFIKLDIDDQVKILLNIHQTFTRNSTGGVDLSLIGGAKNAAAIKSFSASISNWKKHYTDVRIIDSSVTGLWSKVSDFNLLEFL

SEQ ID NO: 1976 - protein, 1351 aa, unidentified
  REGION 1..1351: note = Description of Unknown: Cas Enzyme sequence
MKNENYYVGIDVGTNSVGYAVTNEDYKLLKYKGEPMWGSHLFEEGENAQERRAFRTARRRGDRKKQRVTLVSEIFAPEILKLDERFFIRRKESALFREDVLESDKYIVFNDDDFNDRTYYEKYPTIHHLIYELMTSKEPHDVRLIYMACAYIVAHRGHFLNEVSKDNIDGLLDFNSVYDKFMSTVSDYDDAPWECDKKIFKNVLLKKELISTKEKHFLEILNNGKKFKTEDEDNISKEGLVKLISGGAYELGKLFPKCAMDEKVSVSFKKSEEDFMAALINLADDEANILISLRNVYDWATLSDALKGTKSISESKVAVYEQHKADLKFLKYFIRKYKSEKYYEVFRDGTIEGNYVSYSYNIKNVQKFEIKKKSNKEEFGKYILGIIKDINVSAEDMPYYEDMKLRLNLQTFMPKQVEGDNRVIPYQLYYYELSQILKNAKEYLPFLKQKDDEGYTNEEKILSIMEFRVPYYVGPLRSDNGEHAWLVRKAEGKIYPWNFNEKVDLDKSEQEFIARMTNSCTYLPGENAVPSQSLLYSSFMVLNEINNIKINGCNIPTIHKQGIYNLFIQNKKVTVKRIREYLEANNLIHKQDILSGLDESVKASLKPYHDFKRLLENKIFSEKQVDEIIERLTYSEDKSRIVKWLKETYPMLSEEDVKYVSKLKYNDFGRLSKKFLAGIQGCRKDTGEVFTIMGALWNTSDNLMQLLSDKYTFMDEIEDIRKDFYSNNPQTLESIMEEMYISNAVKRPIYRTLDILSDVRKACGSTPRKIFIEMARGDGEKGKRTKTRRDQIAELYKTIDKEEVRELSRQLEGRSDNELQSEVLFLYFMQLGKSAYSGVSLNINKLKTNLYNVDHIYPQSYVKDDSINNKVLVLSEENGAKGDIYPIKKEIRDKMQPYWCMLMKNNLISEEKYKRLVRNTPFTDEEKTGFINRQLVETRQSTKALATVLKMKYPEAEIVYSKAGLVSDFRHEFGMLKNRSVNDLHHAKDAYLNIVVGNVYHCRFTKKFYIDQKYSLKTKTIFTHDVMDDDKIVWDGKKSIENVRRTMMKNNIHCTKYAFMRKGGLFDQNPLRAGEDLTPRKAGLDTEKYGGYAKSTATAFLLVAYKDKGKKEVMIMPVEYMVSSKVFADEDHALIYTKDTLEKVWGRSDGQITEICFPIGLRPIKINTVLSFDGFRACITGKANKGKIIGLSSMMPLIIGEAWEMYAKKLESYASKKEFNKNLILDEKYDEISQEKNEQLYKVLLGKIDNNLYSIPFLTQVPILKDGFDIFKNLETEKQVKVLNQIILLLKSGRAGNCDLTLIGGKGAAGVYNASSKISNWKRQFSDVHIINVSASGIYETCSGNLLELLN

SEQ ID NO: 1977 - protein, 1351 aa, unidentified
  REGION 1..1351: note = Description of Unknown: Cas Enzyme sequence
MKNENYYVGIDVGTNSVGYAVTNEDYKLLKHKGEPMWGSHLFEEGKNAQERRSFRTARRRSDRKKQRVTLVSEIFAPEIIKADERFFIRRKESALFREDVLESDKYIVFNDDDFNDKTYYEKYPTIHHLIYELMTSKEQHDVRLVYMACAYIVAHRGHFLNEVSKDNIDGLLDFNGVYDNFMGTVSDYDDVPWECDKETFKKVLLKKELISTKEKHFLEILNNGKKFKTEDEDIISKEGLVKLISGGAYELGKLFPKCAMEEKISVSFKKSEEDFMAVLLNLADDEANILISLRNVYDWATLSDALKGTKSISESKIAVYEQHKADLKSLKYFIRKYRPEKYYEVFRDGTIEGNYVSYSYNVKNVQKFEIKKKSNKEEFCKYISGIIKDLSVSEEDMPDYEDMKLRLNLLTFMPKQVEGDNRIIPYQLYYYELSQILKNAKGYLPFLNQKDNEGYTNEEKILSIMEFRVPYYVGPLRSDNGDHAWLVRKAEGKIYPWNFNEKVDLDKSEQAFIDRMTNSCTYIPGENVVPSQSLLYSSFMVLNEINNIKINGCDIPTIHKQGIYSLFIQNKKVTVKRIREYLEANNLLHKQDILSGLDESVKASLKPYHDFKRLLENKTFNEKQVDEIIERLTYSEDKPRIVKWLKETYPTLPEEDVKYISKLKYNDFGRLSKKFLVGIQGCRKDTGEAFTIIGALWNTSDNLMQLLSDKYTFIDEIEEMRKDFYSNNPQTLESIMDEMYISNAVKRPIYRTLDILSDVRKACGSIPKKIFIEMARGDGEKGKRTRTRRDQIKDLYETIDKEEVRELSRQLEDRSDNELQSEVLFLYFMQLGKSAYSGISLDIDKLKTNLYNVDHIYPQSYVKDDSIDNKVLVLSEENGAKGDIYPIKKEIRDKMQPYWNMLMKNHLISEEKYKRLVRNTPFTDEEKKGFINRQLVETRQSTKALATILKMKYPEAEIVYSKAGLVSDFRHEFGMLKNRSVNDLHHAKDAYLNIVVGNVYHCRFTKKFYIDQKYSLKTKTIFTHNVMDGDKIVWDGKNSIENVRRTMMKNNIHCTKYAFMRKGGLFDQNPLRAGEDLTPRKAGLDTEKYGGYAKSTATAFLLVGYKDKGKKEAMIMPVEYMVSGKVFAEEDYALIYTKETLEKVWGRSDDQITEICFPLGLRPIKINTVLSFDGFRACITGKANKGKIIGLSSMMPLVIGESWEMYVKKLDSFSNKKEYNKNLILDEKYDEISREKNEQLYEVLVGKIDNNLYSIPFSTQVPVLQDGFDKFKNLETEKQVKVLNQIILLLKSGRAGNCDLTLVGGKGAAGVYNASSKISNWQRQFSDVRIINVSASGIYETCSSNLLEPLN

SEQ ID NO: 1978 - protein, 1184 aa, unidentified
  REGION 1..1184: note = Description of Unknown: Cas Enzyme sequence
MQLDKSKKVLGLDIGSNSIGYSLLQISEKNDEIVFKEIVSNSVIFSEPNSAEDRRNARTSRRRNERKRARNKKARDIFTNYNITKSDFIDNTTSYLNSLEIEDKDVYRLREKALLGSKLTKDEFTFCTYSILTDRGYNNMFSISSEDGVINEAVTKNSQEYKSKNYPIPSMVLTQHRKENEDKFQNIPIRNKKDDYRNSLDRDMHIEEFINVVSSQAGNKNIFNSKDEAQNFIEEITNESEVNTPFYQRTLKSFEGMVEYCSFYDEFNPRGSQKRTPLANSKNIERTLRQTIDNYEVKADSKTGEIRVLSKDEKDSIVDFWINRPSSNEINATNIFKSLGFKNLKLNIPETSSQVIINIQSHRNILEILHQYNIDFQEADNDFYNDVLLELHYYKNESSRVEQIRNLIEKYELTLNDDFVYDMAGLENMDGFASFSLKFTNEVLNLMQTNSITHHEALVKLEYYSKYLNMPTYDYLPPLNPTKKDIEWLQKNIKYFETKHLFYQPMMSPKVKRVISILRKLINEIILKYGRIDEIRIETAKEMNSKVEQEKVDKNQAKDRAKNRKAENFLKANEIKVSHKNREIAKLLIEQEDKCLYSGEPITKDEAFDANETEIEHFIPRSVIWINSFKNKILVKKKYNQDKGSSHPVEYLKSIGEWENFKERVAKTGISLKKKDWLTKEDIIESVMKKENWLDSYLNDTRSATRTLQKYLSHYLYPKENIFGTGEKRSIFSVSGRAISELKYMWGIDSVMPKDEDDKKDRTTNYHHTLDAFSIALCSSGAINTLHKHFKKKENKYKTQALKEKLKNSLPHSTDGINVVEYLKALVQKYETNKFYVCPYNKRKTNAKGFKDGNLKLYATQNPKNPTKKILAEMQKVAIDSSILVKTVGGFPKPRSNAEVKKEIASIQSRLNSQKQKKIIEAIEIYVDALLEIRAKIEFKEREIDKLNKTKKSSKEKKEFNSEVDELIKPFKDDKNLLELQLKDLKCSFAVKNGKRQIVKSLNLYNPKISETKADAILFPKRKSEKIERLSLETFNKAIESKEAFVIKANESTLNVELFNTKEGQKVGLNYFSSLANPNIGTKVNPKNDELVRFSSEVLTLYKNDIIKVNNTKTGVIEYFVFNGGGNITATNNKVSIKNINSNVFTKKDKKGVRKELADDNRTPNKTTIISKVKIDFFGNITEV

SEQ ID NO: 1979 - protein, 1179 aa, unidentified
  REGION 1..1179: note = Description of Unknown: Cas Enzyme sequence
MKKVLGLDVGSNSIGFSLLELNEQNNEIIFNELVSNSIIFSEPGSAEDRRNARSSRRRNERKSARNRKARTLYMDYKIATNDFINDASKYLNSLKILDKDVYKIRESAVNGTLLTKDEFIFCTYSILTDRGYNNMFSISNEDGVINEAVSKNAKEYEQKKLALPSMVLTAHRKELENQYQNIPIRNKKDDYKNSLDRAMHIEEFKKVVQSQANNTNIFDSSNKCQKFIDDITDENEVNTPFYQRALKSFEGMVEYCSFYDEFNPQGSYKKTPLSNIKNIELTLRQKIDNHDAIISKTGEVKKFTKDEIDKIIEFWIQTPSSNEINAGNIFKSVGFKDVKLNIPENSSQVVLNILAHRHILEVLNKYEIDFEGEDNDFYNDILLELYYFKNNSSRVEHIKKHVEKYALNIDDSFVEELALLDNMDGFSSFSLKFTNEVLNAMKKNNKSHYEALASLGYYSKYLSMPIYDYLPPLEPTKKDIEWLYENIKGFESKHLFYQPMISPKVKRVISILRKLINELIAKYGHIDEIRIETAKEMNSKTEKEKIDKNQAKDKKKNDEASRFLKANDIKETGKNLQRAKLYIEQGKDACLCLYCGEPITLEDAFDEEETEVEHFIPRSVIWINSYKNKILIKKKANQNKSSDNPVSYLKSIAQWDNFRGRVEDTFMAFNKKDWLTKEDVIESVMQKEHWQDSYLNDTRSATRVIQKYLNHYLYPKENLHGKGENRYIFSVSGRAISELKYMWGVHTVMPKNEDDKKDRATNYHHTLDAFTIALCSSSALNTLHNFFIKKENKYKTEALKKKLSSNLPHSVDGENIVEYLKILVEKYETNKLYVCPYNKRKTNMKGFKDGNLKLYVTEDKNNNNMLAEMEKVSIDTSILIKIVGGFPKDRSDAEVKKEIASIQERLDPQKQKKIIEAIEVYAQELLALRERADLVEKDIGALKKTLKTGKQHKESNDIINENVKPFIEKKEALNKELKELKCSFLTKGGKRQIVKSLKLYSTKVTQTKADAILFPSREENKIERLSLENFTKALKDKEPFVIKANESTLNVKLFHTLEGQKVGLNYFSGKTNKNINTKINPKYEELVKYASEVLTLYKNDIIKVNSTKSGMIEYFVFNGGGNITATNNKVSIKNINSNIFVKKDKKGGFKEIAEDNVTPNKTNIISKVKIDFFGNIKEV

SEQ ID NO: 1980 - protein, 1173 aa, unidentified
  REGION 1..1173: note = Description of Unknown: Cas Enzyme sequence
MLKKTLGLDIGSNSIGFSLLELSEKNNQIIFNELVSNSIVFSEPSDASERREARSSRRRNERKSARNRSARKIFTKYNISKKEFIEEATNYLNSLSKDSDVYKVREKAVLGAKLTKDEFLFCTYSILTDRGYNNMFSISKEDGVINEAVTKNTQEYESKNYQLPSMVLTKYRKKLEDCYQNIPIRNKKDDYRNSLDRDMHIEEFKKVTLSQANNRDIFHSIQQCKNFIQEITDKSKVNTPFFQRPLKSFENMVEYCSFYDEFNPKGSQKKVPLANIKNIERTLRLAIDNYGLKADTKTGEVKVLSKDEKDSIVNFWIKTPSSNEINAKNIFTSSGFKNIKLNIPEESSQIVLDIKAHRNILEILNQYKVDFQDRDNEFYNEILLELHYYKNKSSRTEHINKHIDKYGLTFENEFVEKLALLANMDGFASFSLKFTNEVLEVMKYDSKTHSEALESLGYNSKYLNMPTYDYLPPLEPTKADIEWLQKNIEYFETKHLFYQPMISPKVKRVISILRKLINGIIKKHGRIDEIRIETAKEMNSKNEKEKIDKNQAKDRGKNNEAIKFLKVKNIKESKKNIEIAKLFKEQGKDGCKCLYSGELITEDEAFDENETEIEHFIPRSVIWINSYKNKILVKKKYNQNKGSEHPVVYLKSIGQWENFKGRVEDSFMTFNKKDWLFKEEVINSVMQKEHWQDSYLNDTRSATRTIQKYLNHYLYPSKNLHRKDEKRHIFSVSGRAISELKYMWGIHTVMPKNEDEKKDRNTNYHHTLDAFAIALCSSSAINTLHNYFKKKENKFKTKALKEKLTDAIPKSTDDINVVEHLKCLVQKYETNKLFVCPYSKRKTNMKGFKDGNLKLYSTPDPKNKNREILAEIEKVAIDKSILERQVGLATKDRSNTEVVEYIKSLQDRLDPQKQKKIINAIEVYANELIKFREEIGLVENDIKDLKKTLKTAKQHKKFNDSINENIKLFTEKKKLLTKEMQELKCSFAVKNGKRQIVKSLKLYKTKIEQSKADVIIFPHRQKDKIERLSVLNFEQARNDKEPFVIKMNESTLNVELFNTKKRGQAVGNNYFSSLANEIDTKVNSRYLDEITKESISDMILYKNDIIKVDDKKNNKIIYYIFNGGGKIAGSNNELTIKEINKNEEGKVSIGINPRNNKIVSRVRIDFFGNITEV

SEQ ID NO: 1981 - protein, 1181 aa, unidentified
  REGION 1..1181: note = Description of Unknown: Cas Enzyme sequence
MKNVLGLDIGSNSIGFSLLELEENNGMIFNELASNSIVFSEPTSAEDRRNARSSRRRNERKSARKKKTRKIYEKYALASSSFISNSTQYFNSLKFKTSDVYTLREDAINGYMLNKEEFVFSTYSILTDRGYSNMFSISNEDGIINEAVSKNAKEYESKGYALPSNVLTIKRAKQSKLYQNFPVRNKKDDYSNSLDREMHKEEFIKVVSSQKNNQELFNSPTECQNFIDEITDESEVNTPFYQRSLKSFEGMVEFCAFYDKYNPNGSYKRVPLANIKNIERTLRQQIDNYGVIVEKTGEVKELTPTEIDKIINFWIETPSSNEIKANNIFKSAGFKELKLNIPENSSQVVLDIKAHREILKLLQEYEIDFRGDDNALYNELLLELHYFKNNSSRVEHIKKILEKYDRSLDDEFIQELALLEHMDGFASFSLEFTNEVLEVMKSENKTHHEALEKLGYFSKYLEMPKYDYLPPLEPTKKDIEWLEKNIKGFQKQHLFYQPKMSSQVKRVIAVLRKLINEIIKEYGHIDEIRIETAKEMNTKSEKEKIEKNQKKDKKKNDEAKKFLKANDIKDSKKNIERAKLYIEQGKDSCLCLYSGELITQEEAFDEEATEVEHFIPRSTIWINSYKNKILVKKKVNQNKGAQNPIAYLKSQSQWENFKGRVQDTFMAPNKKEWLTNEEIIESVMAKEHWQDSYLNDTRSATRIIQKYLNHYLFPYENQYGKDEKRSIYSVSGRAISELKYIWGIDSVMPKNEDDKKDRNTNYHHTLDAFAIALCSSSAIQTLHNFFIKKENKYKTKIQKEKLSANLPHSKEGANVVEYLKELVEKYETNKLYVCPYNKRKTNAKGFKDGNLKLYVTQDIKGNEILAEMEKVAVDSSLLTKIVGGFPKPRNDAEVRKEILSVQERLDPKKQKKIIEALDVYVEDLLTLRVSIEEKEKEIKKIDAKLKQNTKKKENLVVNESLNKTLKALKDEKEQLTQQLNHLKCSFITKKGKRQIVKSLKLYSKKVSKTGADAIIFPHRREKKIERLSIATFNKALQKKEPFVIKANESTMSVKLFSTAEGQKVGLDYFSGKVNPHIGTKVNPKYTELVKYSTDILTLYKNDIIKVNNTKTGIIKYFMFNGGGDITATNNKVRIKNINSNIFIKKDKKGGFKELKEDNVTPNKTTLVSKVKIDFFGNITEV

SEQ ID NO: 1982 - protein, 1369 aa, unidentified
  REGION 1..1369: note = Description of Unknown: Cas Enzyme sequence
MEKQDYFLGLDMGTSSVGWAVTNTKYELLRKKGKDMWGIREFDEASSAAERRTNRVNRRRRQRQVVRLGLLKSYFSEEIAKIDPDFFTRLENSKYFLEDKDERVRTKNGVFNDDNYKDVDYYRDYPTIFHLRQALLDIDNKGVKFDVRLVYLALANMFKHRGHFLLNAEGDALNTEQVEVVYKEILDSLENDYEIIIEQKPVQQVIDIIGNTDNGRKKKHEELQKLFEMTKKDKRANELLKCLCGLSANAKLIFDENTEEKVPLCFNDFSYTDKIPELMEQLTEDEYALIEQLKSIYDYAVLAGTMKGHDYLSSVRVELYKKHADDLKLLKALYRKYKTEEEYNKMFRSNADGTYSAYVNSLNSTDAIFKSDEVVEGSKYRRNMKGRKSEDIYATIKKAFKDITEDKDVSFALEQIEKEQFLPKQLTGANGVIPNQVHKKEMERILQNAENYLPFLKDKDESGLTVSERIMKLFTFQIPYYVGPLGENSKTGWIVRKEKGAVLPWNINDKVDMSATSEAFISNLIRTCTYIQGEKVMPKASLAYEKYCVLNEINNLCIDGERIDTKLKQQIYKDCFMKGKRVTKKQLCSYLAAQNAIHSEEQVTGIDKSINNSLSSYGKMYAIFGERLKEDTILAAAEDIIYWGTIFGDSKKMFKQKLKKYVEEGIIDENQLKRILGYKFKDWGRFSKALLNLSGCDKSTGEIITLGQAMWEYSLNFMELINSDEFTFREELEKHTKVAMKQLSEFTYEDLEDSYFSVPVKRMIWQTLLVVREIEQVMGCAPKRIFVEMTRTEGEKGEKGRKGSRGNQLIELYKSIKNTESHNWKEEIAAADKDGKLRSKKLFLYYMQMGRDMYTGEEIDLGRLYDDNLYDIDHIYPRHYVKDDSIMNNLVLVNKRANQDIKKDLYPIPEQIKANPKVRELWDTLHKQKLITDVKYARLISNTPFTEKQLGDFIARQLVETGQGTKGVANLLEQLFKDTVIVYAKATNVSDFRRDNGFLKSRIVNDFHHAQDAYLNIVVGNVYYTKFTNNPWNFIRKDYEKDKEKNRYNLAKMFEWNVVRGGETAWIAKRKDEEGTIATVRKMMQKNTPLLTRMNFEKHGKIADATLYSAKKANTKNYIPLKISDERIKDVTKYGGFSSVSIAYFFIVYHREGKKERVTIEGLPLYCKFKVEREANGLERYCEEVLGYGEVKILRRKLKIQSLIELNGYQFHLSGKSQNDLLLRNAMSLYLHEYWTKYIKKIEKVVNAQVIEEVITSEENIKLYDILTDKHINTVYAKRPNSYGKELLKGREKFVALELEDQCVALLQILQLTRIGTTDTNLELIGESKFSGKMRINKNLKTSDKLAIISQSATGLYEKKEWIFDDIVK

SEQ ID NO: 1983 - protein, 1369 aa, unidentified
  REGION 1..1369: note = Description of Unknown: Cas Enzyme sequence
MEKQDYFLGLDMGTSSVGWAVTNTKYELLRKKGKDMWGIREFDEASPAAERRTKRVNRRRRQRQVARLGLLKSYFSEEIAKTDPNFFIRLENSKYFLEDKDERVRTKNGIFNDDNYKDVDYYRDYPTIFHLRQALLDIDNKGEKFDVRLVYLALANMFKHRGHFLLNAEGDALNTEQVEVVYKEILDSLENDYEIIIEQKPIQQVIDIIGNTDNGRKKKHEELQKLFEVTKKDKRANELLKCLCGLSVNVKPIFDENTEEEVKICFNDFSYTDKIPELMEQLTEEEYALIEQLKSIYDYAVLAGTMKGHDYLSCVRVELYEKHKKDLKLLKALYRKYKTEEEYNKMFRSNADGTYSAYVNSLNSSDAIFKSDEVVEGSKYRRNMKGRKSEDIYSTIKKAFKDITDDKDVTFVLEQIEKEQFLPKQLTGANGVIPNQVHKKEMERILKNAENYLTFLKDKDESGLTVSERIIRLFTFQIPYYVGPLGENSKTGWIVRKEKGAVLPWNINDKVDMSATSEAFISNLIRTCTYIQGEKVMPKASLAYERYCVLNEINNLCIDGERIDTKLKQQIYKDCFMKGKRVTKKQLCSYLAAQNAIHSEEQVTGIDKTINNSLSSYGKMYAIFGERLKEDAILAVAEDIIYWGTIFGDSKKMFKQRLKKYVEEGIIDENQLKRILGYKFKDWGRFSKALLTLNGCDKSTGEIITLGQAMWEYSLNFMELINSEEFTFKEELEKHAKVAMKQLSEFTYEDLEDSYFSVPVKRMIWQTLLVVREIEQVMGYAPKRIFVEMTRTEEEKGDKGRKESRGNQLLELYKSIKNTESHNWKDEITAADKDGKLRSKKLFLYYMQMGRDMYTGEEIDLGRLYDDNLYDIDHIYPRHYVKDDSMMNNLVLVNRRANQDIKKDLYPIPEQIKANPKVRELWDTLHKQKLITDEKYTRLISNTPFTEKQLGDFIARQLVETGQGTKGVADLLEQLFKDTVIVYAKATNVSDFRRDNGFLKSRLVNDFHHAQDAYLNIVVGNVYYTKFTKNPWNFIRKDYEKDKEKNRYNLARMFDWNVVRGSETAWIAERKDEEGTISTVRKMMQKNTPLLTRMNFEQHGGIANATLYSAKKANPEKYLPLKTSDERMRDVKKYGGYTSITIAYYFIVHHKEGKKENVTIEALPLHCEDKVEREERGLEKYCEEVLGYGEVNIIRRKLKIQSLLEFNGYKVHLSGKTGDRLILRNAMSLYLPTKWVTYIKKLEKAVNVQIFEEVVTAGENIKLYDILADKHANTVYAKRPNAFGQKLLADRDKFAILQLEQQCEALLQMLQLTKIGITETNLTLIGESGRSGIMSINKNLKASDRPAIISQSATGLYEKKEWIFDDIVK

SEQ ID NO: 1984 - protein, 1367 aa, unidentified
  REGION 1..1367: note = Description of Unknown: Cas Enzyme sequence
MEKQEYYLGLDMGTSSVGWAVTNTKYELLRKKGKDMWGIREFDEAKSAAERRTHRINRRRRQRQLVRLGLLKSYFCEEIAKIDPNFFIRLENSKYFLEDKDERVRTKNGVFNDDNYKDVDYYREYPTIFHLRQALLDIDNTGEKFDVRLVYLALANMFKHRGHFLLNAEGDALNTEQVDLVYQEILDRLENDYEIIIEHKPIQQVTDILGSTDIGRKKKHEELQKLFEVAKKDKGANELLKCLCGLSVNAKLIFDENAEEKVTLRINDFSYTDKISELMEQLTEEEYALIEQLKSIYDYAILAGTLKGYDYLSCVRVELYEKHKKDLKLLKVLYRKYKTEEEYNRMFRSNTDETYSAYVNSFNSTDAILNSKGVVEGSKYRRNMNKRKTENIYATIKKAFKDITEDADVSYILEQIEKEQFLPKQLTGANGVIPNQVHKKEMERILQNAESYLPFLKDKDESGLTVSERIIRLFTFQIPYYVGPLGENSKTGWIVRKEKGAVLPWNINEKVDMSATSEAFIGNLIRTCTYIQGEKVMPKASLAYERYCVLNEINNLCIDGERIDTKLKQQIYKDCFMKGKQVTKKQLCSYLAAQNAIHSEEQLTGIDKNINNSLSSYGKMYAIFGERLKEDAILETAEDIIYWGTIFGDSKKMLKQRLKKYVKEGIIDENQLKRILGYKFKDWGRFSKALLTLSGCDKSTGEIITLGQAMWEYSLNFMELINSEEFTFKEELEKHTKVAMKQLSEFTYEDLADSHFSVPVKRMIWQTLLVVREIEQVMGCAPKRIFVEMTRTEEEKGEKGRKESRGNQLLELYKSIKNTDSHNWKEEIAAADKDGKLRIIPLFLYYMQMGRDMYTGEEIDLDRLYDKNLYDKDHIYPKCYVKDDSIMNNLVLVNKRANQDIKKDLYPIPEQIKANPKVRELWDTLHKQKLITDEKYARLTSNTAFTEKQLGDFIARQLVETGQGTKGVADLLEQLFKDTVIVYAKATNVSDFRRDNGFLKSRLVNDFHHAQDAYLNIVVGNVYYTKFTKNPWNFIRKDYEKDKEKNRYNLAKMFDWNVVRGSETAWIAERKDEKGTIATVRKMMQKNTPLLTRMNFEQHGSIANATLYSAKKAKAENYIPLKASDERMKDVTKYGGFTSATIAYYFIVQHKESKKENITIEGLPLHCKTKVEQDANGLEKYCEEVLGYREVKILRRKLKIQTLLEFNGYQVHLSGKTGNQLILRNAMNLCLPEKWITYIKKLEKAVNIQIFEDVVNTEENIKLYDILTDKHINTVYAKRPNSYGKELLKGREKFVALGLEDQCVALLQILQLTRIGTTDTNLELIGESKFSGKMRINKNLKASDKPAIISQSATGLYEKKEWIFTER

SEQ ID NO: 1985 - protein, 1362 aa, unidentified
  REGION 1..1362: note = Description of Unknown: Cas Enzyme sequence
MDNRDYYIGLDIGTSSVGWAVTDENYKLLRAKGKDLWGVRLFPEAQTAAERRGKRTSRRRLQREKARKAVLKELFAEEIEKIDPCFYIKLKESNLWEEDRSSDNVQPYSLFNDKEYTDREFYRDYPTIFRLRKALIEQYEKFDIRLIFLAILNMFGHRGHFLNHNLDTEKETWDFSTSYSELIDILKVVGIEGMPETVDLKDLQEKLVKKDSSRSAILEDVSQLFNISKKEKQLYSILKLFVGLTVKTFELTGNENLKKEEKNIAICFRDSNYDEKIEDFHNIVGDEYLEVVTKAKEIHDAGLLSSIMGDFNYLSEARVQIYKEHKQDLRNLKELLKEYNRKAYIQLFRKIGKGSYSAYVGSVNSYGKIIRRKKVSDPDVKKSLYDEIKNALNSVPDTNEIKGVILSKIEAGNFLEKQLTAFNGVIPNQVHCKELKAILKNAGKHYEFLNKKDKNGISVSDKIVQLFEFQVPYYVGPIAQQHKNKKNSNVWSVRKEGGKVYPWNFEEKIDLKASAEEFISRMVRRCTYFSEESTLPNQSLLYEKFKVLNEINNLKVDGKPISVKAKQQLFEKEFLKGKKVSGKRISEFLQSLGEMGKDSVLSGIDGNCNQALTSIGKFYGVFGDDVYNDSYQTMIEEIIFWATIYGDDKKFLREKIVEKYSDRIDDKKLKRILGFKIKGWGNLSKEFLELEGTSKEDGTVESIIQALWNTNSNLNALLSSKYTYVDELNKRISKVEKTLSNWQIEDLDDMYLSAPVKRMVWQTMKIVEELVSVMGCSPKRIFVEMTRGDGIKGKKEISRKEKLSALYKAIDKEQKIWTEEIANKPEQEFKSKKLYLYCLQKGKCMYSGDPIPFSDLMDNNLYDIDHIYPQSLVKDDSIENNLVLVKKEINSGIKRDAPISSDIQKKCWRFWKTLREQGFMNQEKYSRLTRKLQTFTDEEKAGFINRQLVETGQATRCITQIFLQGLPESKIIFNKAALVSDFRHKFDIPKARCINDFHHANDAYLNIVVGNAYYVKFTNNPRNFIENASVNKDAYSKYHISKFFEYNIASREETAWVVSDENKTSTISTVKTTLAKNSPLITYKCKEGHGSLFDDTIYGKHKASQESYIGIKTKNSPLANVYKYGGKTSISTRGYCLIEYTVGQKKARKLESIPMYLGSITTLTEDTLQQYYIEKLQYDDVAIIKKFIPMDSIVEVNGFKYRLGGRTGNRIMVYPLYGLILDEKWNKYYQKIEKAISKKYYDEIDKKTDKNILSKAENIELYKILMDKFENSIFSKRVNTLDDTLKKGEIKFTQLSIEEQCNILESIALNFSKSQPSNLSNIEGSGKAGVCLISMEITKYQTCILINQSCTGLFVYKEDLLR

SEQ ID NO: 1986 - protein, 1108 aa, unidentified
  REGION 1..1108: note = Description of Unknown: Cas Enzyme sequence
MKYIIGLDLGINNVGWSIVNQETNEIVDCGVVRYQESSDAQERRKLRASRRLRNRRLHRVERLALLFKENGIPTQRTIEPELITKRAKGLKEELSVQEIVNIIYYFAMHRGYIPFDDEKQEREVVQLDDNQFPCEFIINEFKKYGKYRNSNKLIKCSDNIREIKQILETQRTFHPELTPELTDKIIKIITSKREFYEGPGGARINQLTPYGRFRTAADLEEYKVNPQKYKYLYEKLIAKCKIALGETCAPRINYFAEEFNFLNDFINMKVKDVTLLPQEFAYKVDEKGKLSGETILEIRDYVLSNETVRLDKMFKQILGTGIENIEGYRIDKNKKPEVSLYDFYKYVIKQFSQNNLNPTWLYDKDKKIYNKTMYVLTVVPSSVQIEEMLIERIPEYSFSQEEINVLKGIKTKKITNNRGMYHSLSEKVLLRTLADMKKTQYQFNYMQLMKELDYEKEAKEYFEKNYTNRTVEPYLVEKKYIDVLIANPQVKKTLRKAISVINAIIKRYKEYPTVIAIESTREMNSKAKKDAIIKEQAKLEKLRKDAITFLEENDLRVNETNILKAMCYKETNGHCMYCNTPIPASQLSTLEIEHILPISQSYDDSFDNITCACLKCNMEKLKKTPYEFLMSINSYEPFKERVIDLPISDKKKNNLLFEGDISKYELKFINRNLRDTAYGSMALAEELRKFNVFLERKANRYINIVTIPGQMTSKMRRKYELEEKDRTQLYHHAVDATIVASIANTPVGRLIIKGQNDAKFWFENKEKRLELSKLFPYAELENIKEIKELIPKKGEELICEKDDRIKRSFEVKKSINQQIANQNIVKYKIIDGEYYLVQQINNIYEEKSNDIFYKLFDESKKDKILLCELEDPKLYNRLREIFYAHEKSKINPFLEYCLFEHGIETTPNNFNYLIHGIKKSPNKPNSPIVKKLRYLERKTNPYIFKKADLNRKRNNFGEFVIPKLKDKTINGLDSLSQYCVEVYYDSDAQRFIFLPIYMVSVDINSKKINREERYYKETVARLIGKKTPLYITTLYTGNWCKVVKRDSSFSQGRFICYHKTHNKLVFGKDGSYSSSDAFYMTTNDKQIIIYGLDILGKKYKILDSNDII

SEQ ID NO: 1987 - protein, 1201 aa, unidentified
  REGION 1..1201: note = Description of Unknown: Cas Enzyme sequence
MSKHVLGLDLGVGSIGWCLIALDAQGDPAEILGMGSRVAPLTNLGDDKAFSKGEAFTANQKRTARRTMRRGFARYQLRRYRLRRELEKVGMLPDAALIQLPLLELWELRERAATAGEHLTLPELGRVLCHINQKRGYRHVKSDAAAIVGDEGEKKKDSNSAYLAGIRANDEKLQGEHKTVGQYFAEQLRQSQSESPTGGISYRIKDQIFSRQRYINEYDQIMAAQRVHYPDILTDAFIRMLRDEVIFMQRPLKSCKHLVSLCEFEKQERVMRVQQDDGKGGRQLVERKVKFGPKVAPKSSPLFQLCRIYEAVNNIRLTRPDGSPRGITPEERAKIVAHLQSSASLSFAALKKLLKEKAIIADQLTTKSGLKGNSTRVALAAALQPYPQYHHLLDMELETRMMSVQLTDEETGEVTEREVAVVTDSYVRQPLYRLWHILYSIEERDAMRRALITQLGMKEEDLDGGLLDQLYRLDFVKPGYGNKSAKFICKLLPQLQQGLGYSEACAAVGYRHSNSPTSEEITERTLLEKIPLLQRNELRQPLVEKILNQMINLVNALKAEYGVDEVRVELARELKMSREERARMTIQNDKRKKANGKVAARIRQCGLYPTKPRIQKYMLWEEAGRQCLYCGRSIEEEQCLNGDDMEVEHIIPKSVLYDDSYGNKTCACHECNQTKGNRTALEYIRAKGWEAEYMERINGLLDKKAISYSKHQRLRWLKEDIPSDFLERQLRLTQYISRQAMAILQQGIRRVSASEGGVTARLRSLWGYDDILHTLNLDRYDSMGETERVSREGETTEKLRIKDWSKRKDHRHHAIDALVVASTRQGYIQRLNRVSSESEREAMSGEIEVQKATKIDKLSLLERWLTQRPHLSVRAVSDKVAEILISYRPGKRAVTRGRNIYRKKTADGREVTCVQRGVLVPRGELMEASLYGKILSQGRERIVKRYPLHDLKGEVVDPRLRELIAEYNQEITSKVKAKGTPLYLDAAEKQEVRSVRCYVTQPSVAKAIPIRFDERGRAITFVQSGSNHHLAIYRTPKGKLVESIVSFWDAVNRARYGLPLIIKYPRKAMEQVIQREDIPESVLSLLPPADYEFVEVFQQNEMAVVGLPEEEFRRAVDTQDYRTLSEHLYRLKGISSKDYEFHYHLDTDDPDETDSSKKKKKRVRNTSGRIPRIYRIRGIGSLQKKNVHKVCVDLLGRISLL

SEQ ID NO: 1988 - protein, 1368 aa, unidentified
  REGION 1..1368: note = Description of Unknown: Cas Enzyme sequence
MDKKMYVGIDMGTNSVGMAVTDEEYNLYRVKGKDLWCSRLFTEADTAAERRTNRISRRRRQREVARQGVLRKLFADEINKVDEGFFARLDESKYHLEDRDSEQKYTLFTDTGYTDKDYFKDYPTIFHLRNELLHPVKDSYDVRLVYLAIANMFKHRGNFLNESLDADKITSSADEAYRSLVETAMMYSIEFPENINVKKFIDIIGENGVSRSKHLENVCEYLEITKKDKQAYEILKLICGMSGVLINIYGEDVIDEENKKFSICFRDSNYEEKEGEALELLGDEYFELLETIKEIHDIGMLAGIIKGHKYLSEARVDLYEQHKKDLDMLQHVLKKYDMKAYDEMFRVMKAGNYSAYVGSVNAHSKKIRRNGGDGRTREEFYKNVKAVLKKFPEDDEEIKTILSEIDSETFMPKQLTASNGVIPNQLHVSELKAILTNAEKYLPFLLDKDESGLTVSERIVELFRFHIPYYVGPIGAQGENVWAKRRPGEENGKVYPWNFEQKIDTQSAAKEFINRMVRHCTYLSGERTLPKQSFLYEKFMVLNELNNLRIDGKKPSVQVKQGIYEELFKTGKRVTLNQLIKYLYNKSIIASKEDVVIEGIDGGFNASLTSVGKFRGVLGDELFTDANQAMAEEIIFWGTVYGNDKKFLKDEIESKYGTVLSKDQIKRILGFKFNGWGNLSKTFLELQGSCECGDCSLIQALWETNHNLMELLSEQYGFKKELDALASNVEKPLTEWTIDDLDNKYLSAPVKRMVWQTIKMLREACELTNKEPDRVFVEMPREHGKENDRKASRKKKLLDLYSTLKREDKTWAELKIREIEGRTEADFRIKKLYLYYMQQGKCMYSGEKIELNDLFNNNLYDIDHIYPRHFIKDDSLENNLVLVKKEINNHKSDNYPLESDIRKNMNKFWKSLRDKNFISKEKYSRLIRTEEFTDEEKAAFISRQLVETRQGTKAITQVLKQAFPNTQIVFVKAGIVSDFRKKFDINKVRALNDTHHAKDAYLNIVVGNTYYTKFTNNPMNFIKDARKNPKNDFYRYNMDKIFDYNVIRNGEEAWIADNGKTKQHVLRIMKKNSVTITVKTEEYHGALSNKVTVWSKEKAKGNPDAYMPVKTSDTKAQDVTKYGGITSIANSGYTLVEYKVKGKKVRSLEALPAYLGRSNALTNEDIMQYISAALQKEYAGKEISDLSVRVPFVPQKSKVRVDGFEYYLGGKTGKSVYLSNAMPLYLSGNDEEYLRKIMKAIEIDNYEEIDKDSNAIITEEKNVALFDVLCVKLNSEPYINNRWNICKTLEGKEEIFKNLDIKKQCYVIGQIISWINSAMQNVNLKDVCGSEHAGTQTLNKKISESKECILIHQSVTGMYERKIDLLSI

SEQ ID NO: 1989 - protein, 1064 aa, unidentified
  REGION 1..1064: note = Description of Unknown: Cas Enzyme sequence
MKTENLGIHFDVGHASIGWAVTSFRQEEAEFLRILGTGVVLFPADDCLANHRRAFRRQRRHVRATRQRIARMKALLLSRGVLSEGELDANTTASPWKLAAAALRGKTLSWIELWSVLRWYAHNRGYDGNALSCLRSGRGVDPEDSKKNAAARVAMTQFGTSSMAETVCAFFEIDPAQGKSASTKRFKGLNLSFDRGIVEAEAIRILEAHIGKLPGLDRDLVHILTASPVLEPACLRGRTNLPFRVPARFWGGVLFGQLAPRFDNRLIGTCPVSGRKLPLKATPEFLLYRWAMMLANTRVGETNRPLSADERAAMTERVRLVGGFAKGAYKKAIAKTTGEKVSNIDALLLAPEADKSLVCYPGLYALHQKGLDDWLDPSDAKKLAHRMFRGKTFRVRDVAALVSADRKSAFENWFNGAASNGRGKKKTDDERWNAPVAADLPSGRAPFAREVLAKAASEVLAGIDPREKGGVLYRDATEEDALPESAIDRETNNHLVRHRVKILLRLLKDVVHDYAENNPARVSQVTIEMARDLKDLSGKTNKEIESEMTLRTAQHNRVAKKLAEFLECDVSHVSAGLIRKARIAEDLSFTCPYTGAKYDLQDIRSGTVDREHILPRSQRATDSLDSLVLSFTEVNRMKGARSGLEFVRECGGQRVPGRENLVVLREEEYRKLVEDLRPAQSTNFPEDRRRQERRKENLLRLRATDIGMTEGMLTRTSYITTLAMKAVRGYFADCGRMPRLVSVPGRVTAFFRTQWNLLGLLARTDPRVLDERGELRLKSEIRDITHMHHAVDAITLGLAATLLPADGSFWATICKRRVTATEESALRKLRVFRFSANHEPALVGLPAFLSDSIVRALAEKRVVIHQPQERRGLLLEQNAWGVVREEGDKVVIRQRARDEKGKRIPPKTKTVQRSAVFGLEPEGGQGKLKAIKGVLVRSGNFGVALSPTPTVIPVFKVWKTLGGMKDGKRLPAIVRNGCLIFVPKGTYQGVWRVKSVKNNQSGIALDLVVPQAIAPVNKSATSRINAKLSTMIRDGLKILEPRYTGISLCPTTSSISPNPAPSSP

SEQ ID NO: 1990 - protein, 915 aa, unidentified
  REGION 1..915: note = Description of Unknown: Cas Enzyme sequence
MAKYGTTTMAETMCRFLGVDPMASKSSSREYFKGNKVSFDRKVIVDEVTRILESHKGKLCGVTADFIHTLVADPLADKNFLRLRTGLPFHVQNRYWGGVLFGQLAPRFDNRIIGCCPVSGRKLPSKATPEFLEFRWAMMLANVMVGPEGRHLSVVEIARLNSEVGKVGGFTKGEFKKIVKDVTAEQQNNVDALLTTPEADASLIRFPGVYALAKLGLRGAMDGKTFGKLANILFRGKRLTLEKIASLVDISAKEAVLSAADPERQKGKGRKRSRSVILQAAIKADLPCGRAPFSRDVMREAAKAVYQGKHPAEPGCPLYRNSVQADVLKEQDIDAATNNHLIRHRVKILLRLLKDIVHDYAENNPAQVAEVTIEMARDLKDLSGLTNKQIESDLRERTRQHQLAARKVAKHLGIEERLVSPGLIRKVRIAEDMGWTCPYTGMTYDVQDIVSKGDGEPGCVDKDHILPRSARLTDSLDSLALTYREVNAMKGARTGLQFIRDCAGMRVPGHENFVILDEPRYKKLVENLKVFGHDDDKKRQKRRKFNLLRLKTDDAGMTEGMLTRTSYITTLAIKAIRGYFSGCGRVPAIIAIPGRVTAMLRNEWGVLGILAEVDGRLKDENGRLRLKQEIRGITHLHHAVDAITLGLAATFLPRDGIFWSAMCKRRVGKDERAMLNATGVFTFSSHNEPHLIALPPYLRAAIRDALSEQRVVVHQPQERTGLKVQQNAWGVERIEGETVHIRQRSRDPKTGVIAIAHNQVPLSKAFGVNPECDRGKLKDIKGVLLSDGNYGVALMADPCVIRHQRVWGTLEEIKRRNSGRMPQIVRRGDLIKIASGGYEGLWRVVSIKDNHNGISLDVIAPSAIKVANGVSYAKINVLLKTLVKSGLEVLRPRYTGVAICPIISSTSRQTASRSR

SEQ ID NO: 1991 - protein, 1052 aa, unidentified
  REGION 1..1052: note = Description of Unknown: Cas Enzyme sequence
MASTKTEKSELGIHLDVGHDSIGWCVTRTFPGNEKFLAIPGSGVVLFPADDCLANQRRAFRRQRRHIRATRQRIARMKAMILELGVMTEKELSRNLTAAPWKLAAEALSCGKLLSWPELWSVLRWYAHNRGYDGNVLASAKNRQEGDADDIKKNAAAREMMKKYGTETMAETMCRFLGVDPQGDKISSREYFKGNKVSFDRSVVVKEVTRILEAHKGKLKGLTDDFIHMLVADPLLEKNFLRHHSGLPFHIQNRYWGGVLFGQLAPRFDNRIIGHCPISGKKLPSKASAEFLEYRWAMMLANVRVGVGGRGLTPDEIAQLNAEVAKSGGFTKGEFKKSILDVTGEALNNVEVLLTTPEADASLVRFPGVHALAKRGLREVLDDKSFRKFANMLFRGKRLTLAKLVAAANDEEARQSILSLADPRRQKGRGKKKSQDELLHDVIKADLPTGRAPFAKEVMVEASKSVYCGKDPRENGGVIYRDNTKEDVIKEDDIDKETNNHLIRHRVKILLRLLKDIVHDYAENNPAQVAQITIEMARDLKDLSGMTNKQIETEMREKTRLHQSAAKMLAKHLGIDERLVSPGLIRKVRIAEDLGWKCPYTGATYDIQDIVSKSDGEPGCVDKDHILPRSERATDSLDSLVLTYREVNEMKGARTGLQFIRDCAGMRVQGRSNLIIQSESAYKSFVDNLKIFGHDDDRKRQKRRKQNLLRFKSDDAGMTEGMLTRTSYITTLAIKTMRGYFAGCGRIPEIIAIPGRVTAVLRNQWNIMGILAETDERVKDDTGRLRLKQEIRSITHMHHAVDAITLGLASTFIPRDGKFWATMCKRRVRDDEKAMLGATGIFRFSAHNEPRLVELPPYLRATIRDALAEQRVVVHQPQEKSGLSVQQKMWRVVKINGDRTIIRQKEHGEKPSETEVATSSLFGLSPNGAAGKLSALKAALRSNGNYAAVLCNPPRIIRHWYVWRALAGVKQSEVARNGDIIKVDTGRYSGYWRIKSVKDGKTEPKLDLVRPYAIDEEDKRVGKREVSIKTLIKDHVSVVRCRYTGIALCHTT

SEQ ID NO: 1992 - protein, 1092 aa, unidentified
  REGION 1..1092: note = Description of Unknown: Cas Enzyme sequence
MSTPPDLHLAFDVGHSSIGWAVFALPEARTAFPKLLGTGAVTFRPDDCLASQRRLFRRQRRHIRSTRQRIARIKLLLANLGVLTVDQLNRSGSMNPWKLASDAWSGGRVLTWPELWDVLRWYAHNRGYDGNRRWSAEEALADEEEDETEKVENARRLMKESGHETMAQTMMAYLARYEKDIEAWKSGERKDKPAHFKGLKAAFPRDVVEAEVRNILGRLAGKLPKLDAALIAALCDDWHALPFPGKPLPMRFAGGLLFGQLVPRFDNRLIAQCPQSGGKVPTRNCPEFHRYRWAMQLANVKVQGPADADLRNLEAVERLDLHHRMEAAGALTKGEFKKAVRTVTKAVRDNLDQLLLHPDADDALVLDPVQKLIHTAPISIAWPHLDRRTQQIARGQWRRGKSLKLADLTEGHEAARTALRDWLAAANTKKRKKDKTASLEDLLGRSYHIFRPGQRAPFAREVMENVFQFVLKTNRHPADKGGPIHRSAEILQAQLQRRIDEQTNNHLIRHRLRLLAGDGSPKGMQGLLQDLIADPKFAGGDASRIKSVVVEVNRELRDQSGLTRKEVEKDLGLRLASHRRADEWLKKSFEGKPIHITAGLIRKARIALDLDRKCPYTGATIEPAQLLYGKMDRDHIIPRSLRPTDSLESLVITFPEINKLKDNMTAWQFVEKYQGRKITALGNVEIKSLSRYKADVEALESFKGHPDDTRRKRRRKELLLLADYTEKEFTPGDLTQTSHLTRLAVQAIKARIGIQAVSLPGAVTGAVRKSWHLLGCLAVANKHVLDEDEGTKNKTDIRGITHLHHALDAAVLGLASWYFPNNGALWTLMAKRKLNPTEQTEIRALSRGLFGFDSEGRFGVLDLPDEVKREITERLADLRVVQHQPSRIKGLRVEQNVWRVVKIENGWATLRQSTRGADGVRVHKQAMEAVTKLLGPNPPGGDGKLARIKGALIIPDNFGIAILDHATEEDDRLAVLPWHKVWPRLQALRKKNAGHLPRIIRLGSLVEVLNAGKRSDYRGVWMIRGTALHQRDGVLVDLAVPDLVDYRKFKPPYAYKGVNLSTLVACSLQIVGDSLAGVPARRLPKEQATGLT

SEQ ID NO: 1993 - protein, 1128 aa, unidentified
  REGION 1..1128: note = Description of Unknown: Cas Enzyme sequence
MSGTPDLHLAFDVGHSSIGWAVLKAANGQAPELLGCGSVIFPADDCLASQRRGFRRQRRHIRATRQRIARMKTLIEHLGTLTREQLDANDRAWPWLLAARVLAGGTPLTWPELWDVLRWYAHNRGYDGNKRWSEAEAAAKAEDTEKVNNARELYKKFGTSTMAATFCAVCGLDPLGSKRSCALAGDKRPKALNAAFPREDVEAEVRAILERQAGFLPKVDSAFIRALFEDWKAIPYDGLKLPLRFSGGLLFGQIVPRFENRIVARCPVTFERIFRERLAETNDRGWAKKIADKLAKVPSKECREFYEYRWAMQLANVMISGSNGKAERLIKNESWRRSVDAKMRERGFLTPGEFKKVVRELTGGAADNLGQMLLHPDAQKALLLDPVKKLITGDSLVATLWPLLPERLQKRAMGKWRRGKMLSVGELIADIPDEERSEIKMAIQKCLDGENTKKRNRAETVTHDEFVGVQLRVEQLDGRAPYHRDVLRNAVADVMDRGIHPTEEGGCLFRSEAIRNAQLQRAIDEQTNNHLVRHRLLILDRLHRDILKEYASGDKSRVERVTIEVNRDLREMSGKTAKEVKQDLGQRLANFNSVSDRLKRAFAGKDLRITPGLIRKARVAEDLGWRCPYTGKGFDEFDLLYRKVDKDHVIPRSQRPSDSLDSLVITFNEVNRLKGKRTALRFIEDEQGKAVEGMPNLTMKTLAGYIKDVEALESFKGHDDDKRRKRNRKRMMLVRDFVEKEFIPADLTQTSQLVRLGAQGLQKEYLGASKKPVITSLPGSVTGAVRKCWDLLGCLSAANSQVLDPVTGEVRTKTEIREITHMHHALDACVLAFASLFLPGRGRDGEGWKLLVKRRLNADEQARAHELFKDYIKFEKDGTSHLIDLPRPFKDQIRRCIAERRVAQHIPAQMSGLPAQLNAWGVERIQEGRVWLHQSIRQPDGSRKKNLKDVDLNKVIGLSPEEGNGKLKAIRGALILDQNYGIAILEKAEGLPSPKGKSKSRAASPVVEIVPYHKVWHRLETLKKTNKDCMPRILRSGQSIHVPRGTHTGFWRIFSVKNNADGLAVALGDIDALHHRNDKQNVRILTLLRDGLRIVGSSLCGIDAGVSDLITGMPPLPVEKPEGSSRQS

SEQ ID NO: 1994 - protein, 1071 aa, unidentified
  REGION 1..1071: note = Description of Unknown: Cas Enzyme sequence
MNTTPSLTFSFDIGHSSIGWAVCHQNKAPVLACGSVVFKPDDCLAINRAGFRRQRRSIAGRRNRIKRISKLFASVGLLSETEAKLVKQSHPWLLAAQSIKGGVKLSAGELFSVIRWYAHNRGYDGNALWSEVSDRADEDTEKVENANALMRKFGTQTMAETVCSFLGIEVNRPSAKSSRAYFKGQNAAFPRHIVEKEVIQVLKNCRHLKEVDDAFVNALCGKAHDAWRAIDCSIRLPDRYHGGLLFGQMVPRFSNRIITECRISGDKTPQKHCRAFYYYRWGMLMVNMRVEDALNGVRPLTPEERLKLTEIIEKTGSFTRASLKKALVNELGLIPGNLDTMFLSTEMEKALVLDPIKSSLNSKEDLKVVWPTIPEKQRKVLAGRLFKDKDLSRHSYEAWRLILEADNVSLHEFDAAVETAFQKARKRRKTLTMEEFIKRPIHIEGKVSGRAPYSKRLLKNAWDEITGVCKPNATFDPKAKGGCLEETASVLEKLEDKAIDSLTNNHLVRHRLLVFERLLEELVEKYAGGELGRIDGVVIEVVRDFQEFSAKTAKEIKQLLGLKMAHHKKMVQKLEKAREDMNGSFKVTAGLIKKARIADDLNWKCPFTGKVIGIPDLVNGLVDREHIIPYALRPSDSLESLVITFKEVNRMKGKMTAREFIAAHEGAPVDSMPNLTLFTLKQFDKFIDDLKPKSNPQKRDELVFKDDLLRKWRRKQLLKLDSFNPREDAGFTGRDLTQTSFINKLAATRAKRVMRKANGGSAKRSPRTIHIPGSLTAVVRKSWNISNCLVKTVPEVNGKSKGEIRDITHLHHAVDAVVLGLIAVFLCDGTADERLSSVMSKRNLSPADKAFIRRNLRDWCNVTNDSKTRVKDLTREMKENIAKRLHEKRVVMHLPASMHGLKVQQNMWRIEENNLDAKKVGIRQSVRDLKTGKRIRNSKTENLNKLLGPKFPGKLSSLKAALIIEENYGVALIQPPKVIPFVNVHDQVKALPLGTRILRRGQIIKVQSGGYQGVWRVHSVKDNASGIALNMASPELVTAASKKAGCKINVLLKTLMQSGLSVCEQAYTGFE

SEQ ID NO: 1995 - protein, 1072 aa, unidentified
  REGION 1..1072: note = Description of Unknown: Cas Enzyme sequence
MKLSLSFDVGHSSIGWSVLEINNKAKQIPDIIGCGTVLFEKDSALASQRRQHRSQRRHVRATRQRIARIEKLFLHLRTFTPEEINLKHQASGGHAAPWLLAARVLSSKGKQTLSWTELWDVIRWYAHNRGYDPLTEEIEATKEDTDKVTLAREAMETFGQDTMAETICAWLGVDPQGSQIASSENYKAKGAAFPRAIVCDEVRSILTSHLSKLPQLDEALITTLLDDATTISCPDIRFPKRYRGGLLFGRLAMRYHNRIIDTCPLSETKRPLKDCPEFYRHRWAMLLANIKISDTDATPHRPLTHDERVQLNQIAKTDGYFTPGAFRKTVRKITGAQRDNLDQMFMDSTSEENLVLDPALRLARGNKQISAVWAHLPQSIQRHALNRWRRGRSQTLGELRAKAEKLGHDLAPFDQALAAYCAAPVKKTRSKKTPPPPPTTVEILATPFKAKRLGGRAPYSRALLTQSHDEVMADPPIHPREEDGCLFETSAQRQANDERTIDQQTNNHLVRHRLAILGRLLEHLIADPAYGAGDPARISRLVLEVNRDLRDMSGLTAQDIAKEMNERLRDHSKVSKYLSDKLPAGTLMNASLIRKGRIAADLCWKCPYTGQEFEPIDLITKRVDLDHIIPRSLRQSDSLDSLVVTFSAINKIKGARTARQFIEEFQSQSVPGTNLQIMTGQRYEEFVKRLDTRGHSDDLKRKKRRKERLLLLTFDEKTGGFTPGQLTQTSQLSRLGQQVLFKPFGHLEKQPRFIALPGQLTARARSAWKVLGCLADAAPDVLETSTDAKGTKRSHLKTKTEIRNITHLHHALDACVIGLAADRFPQGEIWQALLERRPNATQRAQLEALQLGRFDNGGGFYLHDLPDELKKLLRLRLAECRVVQHIPSDMSGIKVEENTRGVIARENGRVILRQSKLDSKGKIVLNETSELEEKVIGLPTLDGKGGKLAAIKGVRVITANFGVAILDDATLPPSERFVIIPHARVWEQLQALQNRNGGRMPSVWRNGQVIELTQGRAGKWKIFSIKNNQSGMALDLGPADAIKATWINVLLKSLIRDGAHACRSSLSGSNTK

SEQ ID NO: 1996 - protein, 1127 aa, unidentified
  REGION 1..1127: note = Description of Unknown: Cas Enzyme sequence
MTAISKSIELAFDVGHSSIGWAVLSNAHGDTFPTISGCGTVLFPKDDCLASERRGFRRMRRHVRSTRVRVERIKRLLAHTGVLSLEALNKVESSSPWQMAAYVLSGGGVMTWPQLWDVLRWYAHNRGYDGNRRWSRESAEQAEDTEKVTNARALYETHGTNTMAETLCKHLGIDPLGQVAASNVRFKDLNAAFPREDVEAEVRSILTKHMGKLSSVTPELVRALIGNDRDDEHAWSAVECPSLKMRLNYFGSLLFGQLIPRFQNRIIATCPISFERRYQAVLDATGDPSKANHEAERDAKVPSKECVEFYRYRWAMQVANIRISTGEKQTRPLSKEERRALNAKIEERGFFTAGELRSTVQQITGSVTSNLSQMLLHPDAQEALILDPVRKLVYSKLDNIWPTLPLQAQKRAIGKWRRGASIKLAALGDWCEAERGAFDDAIKRRLDGEGTRRTKKQQPVHVADVLNESFSADLISGRAPFHRSILKEVVEFVFSTNKHPAEEGGPLFRSESLRQTQLQRAIEDQTNNHLIRNRLTLLDRLHQDVIKEYAGGDPSKVSRITIEVNRDIREFSGKTAKDIAMDLGSRLSNFKGVVKKLESDFEGQNIRISPGLIRKARIAEDLGWRCPYTGKDYDSFALAHTRVDKDHIIPRSLKPSDGLDALVITFPEVNKLKGNRTALRFVEEFQGQAVPGRPDLTVVTLKQYQAFLDRLDTGRGHDDDKKRKKRRKEALQLKDYVDKEFTPRDLTQTSHLVRLGAQLLERVYLPQKQKPVITSIPGSVTGAVRKSWRLIGCLAGINQSLPADSEDISKSDLRESTHMHHALDACVQVLASHLLPRDGGIWEILLKRRLNVQEQQIAKARLKGIAEIDSEGRLRLADLPVPLKAQIRERLFEKRVFQHIPADQGGLACDQTVWRVFDPLDEHPSAQRLAKWFNALKIEIPAADAETVLIVCRKRKDGLGAEGGKLLHAGKTWRWVYDLKAKSALIGLSPKDPERAKLKQIKAVKVLGDNYGLALDPEPTILRPIKVWEQLAELRAKNGGKRPRVLRKGSLFHIPNKTGRADYRGTWVVRSIKSKANGLHLAICTPDRVDCDGAGQTDAFGNVKLATLLADGLVVFHRPQLTGFQLS

SEQ ID NO: 1997 - protein, 1086 aa, unidentified
  REGION 1..1086: note = Description of Unknown: Cas Enzyme sequence
MIFMSTKKIQLAFDVGHSSIGWAVLKTGDVVDLLGCGAVIFRADDCLASARRGYRRQRRHIRSTRQRIARMKVLLAFLGVLSKAQLDQPGCAWPWQLAARVLRGGELLTWPELWDVLRWYAHNRGYDGNRRWSAAEKEADNEDTEKEENAKKLMNKCGVHTMAETFCAICGIDPLGKKRSTNLPGADRPKGQNAAFPRATVESEVRRVVQAHFGKLEKVDANLERALLGQSNQDKTAWQAIPCPDLKLPKRYEGALLFGQLVPRFDNRVISTCPISGAKVPSRNCPEFLNFRWAMQLANIRVSRLGEKELSALTVQERKQLDSLMRAQGGMGVEEFKKQVRQVSGAIRDNLETMFMHPDAKDALLLDPVTKLVESSEVKPYWALLPERLQKRTRGQWRRGKSITLAKLREQLSELCGDTASFDAAITRQLDKANTRGRKKDIPTTVAEFVNQPLSIRKLDQRAAFSRPMLKRAFEEVMAGKHPKEEGGCLFITEKMREAQLTREIAEQTNNHLVRHRLLILERLLADIVREYAAGDKTRVAKITIEVNRDLREMSGMTAKAKAQDLGLRIANHHQVVRKLEEDESLMKILHERRAKITAGLIRKARVADDLDWTCPYTGQRFQPVDLLTKRVDKDHIVPRADRATDSLDSLVITFSAINKWKGKRTAWQFMQEEQGKAVPDLPNLSIMTLSRYKGLVESLDTFKGHDDDKRRKKKRKELMLLPTYEEKEFTPGDLTATSQLVRLGAMALKKAFVGCARHPVVVSLPGSVTGAVRKAWRLLGCLSLANPQVLDEKGEVRNKDEIRDITHLHHALDACVLGFSSHFIPNDGRTWELITKRKWTPAEENELKALGVFDKDSEGRFQMRDLDNELKEQIRQRLAEKRVVQHVPARMDGLKVEQNIWRVVSVKDGEASLQQRIRQPDGSRPVKHGEEKVGKLLGLQPTGGTGKLNANKGVLIIPDNFGVGLDPHPTIIPFHKVWTRLKELKSSNGGKTPRVLRNGQIIQVPNGKNFKGIWKVFSAKNNASGMALDIGSPDVVRLKNKTEGHKINVRLATLMKDGLEIQKCGLTGVPACPTTSSALIPPTAP

SEQ ID NO: 1998 - protein, 1121 aa, unidentified
  REGION 1..1121: note = Description of Unknown: Cas Enzyme sequence
MNITNELTLSFDIGYASIGWCVLDNTNPPPAEPEILGTGVVTFPTDDCLASKRRELRRTRRHIRSTRQRIERMKLWIEHRGILSREELDRVPGRKQAPPFLLAAAALGKHRKLSAFELWTVLRWYAHNRGYDGNSLWSRNESNDDDTEKETNAKSLMEKHGTDTMAGTVCACLGLNPSEHTKQISSYLPYKTLNAAYPREIVFNEVKDILNQHIGEIPGLDGEAVRFLIKPAGLEILTAEEKAKLTAAGIKLPRRYHGGLLFGQLIPRFDNRIISRCPITWAKTYDEAIADGKPETEARKLAEKFAKVPAAKSVEFLEYRFARILANLRANAEPIDKDLRKALLELARQNGRLTVKDLNREIKAHYGSVKTNVTDYFTLHPDSSEALVLDPVADEVRKASESRAKLSPVWKLLTEETREHIKHIWTKGLSISLAEILHRNGNRDVLEAALLPAFAQANKPRQGKSKYADLEHYLRKTSVSPDFPSGRAPYARPVLREVLAEVLAGFDPTKAARKTSASDGESKDRDGILYSLLHPQSRVRVLQSERPLDQLTNNHLVRQRMLILERLTADITKEFVTPEKTVAQVVVEVARELKDFSGKTAKEIASELNSRLKDFKSTISYLEKFAPDLPVNGSLIRKARIAMDMGRRCPFTGESYDIQDITTLEREHIIPYSSRNSNALHALVLTWPEINKWKGKRTALQFVTDEAGKPVPGRENLSIFTVKGYEDFVSKLDTKGHGDDTRRKKARKALLLTKDMDDKDLGFTDGQLTQTSHLMKLAMRDLVKKFPTAAIDPIPGIVTAELRKAWDLNGTLGLVCPEILDEEGKARPKGEIRSLTHMHHALDAATIAIAAHYFPFRKQGEDRKGKLWRALLKRSRNAEEQKILQETGLFRSRKKNRHDHQGTPLGTTTELKLSDLPKTLKQSLRLSLAEARVMQHIPSDRTGAKAELTTWGIVSTEGEDEDVRITLQQNSTTVEEGRRKYSRKTREERPGKLLGPNPKNGLGKLAAIKGALIIGENYGLSLDPTPTIIPFLGVSAQLAALRKTNGDQHVRVLRNGILIEIDSWEGKNGIWRIQSCKASLKLDLARPHQPERSWREVSVKSLLKRGLKILPQNYSGYRTSV

SEQ ID NO: 1999 - protein, 1124 aa, unidentified
  REGION 1..1124: note = Description of Unknown: Cas Enzyme sequence
MAITLAFDIGYASIGWCALSAENGSKNPPEFMGTGVVTFPTDDCLASERRSLRRTRRHIRSTRLRIERMKRLLVHRGMLTREVIDRPGHPAPFLLAAAALQKHCSLDAWQLWTVLRWYAHNRGYDGNALWARGEEEDEDTEKVTNAYTLMESHNTNTMCETVCSCLALDPAEHEKRISSTLPYKTLNAAYPRKTVRDEVSRLLFLCQDKIPGIDSTTIRSLLSTDDLGGVARKELAGAGIKLPKRFHGGLLFGQLVPRFDNRIIARCPVTWANTYDEAIATGKDDKEARHLADKYAKVPSAKCKDFLEYRFARILANLKVAGAPLSSELRQHLWKLASERGSLSAAILKKEIKALAGNVPTNFEAYFKLHPDSEKQLVLDPTQDEFRKAAAKTSKLFPIWQLLPEASRNYALDIWKRGAAISLAALVEHAGSSPEILKALETAFANLKKGKTEKSSFRNLDDYLIRTRVTPEYPSGRAPYARPVLRQVVVEILAGNDPTRPAKSSRHMDGENKSSDGILYATLDPTSRVRQLQDVRPIEQLTNNHLVRHRMLILDRLLDDILTEFVTDDKKVERVIVEVARDLREFSGMTAKQIATELNSRLKDFKAAVAYLEKNAPDMETNGGIIRKCRIAMDLDWRCPFTGEKYDAYDLPKLEREHIIPYATRNTNALHALVLTWPEVNRMKGKRTARQFIAENEGKTVEGKSNLSLFILRRYDEFVEKLKVTGHDDDRRRQKARKALLATTDFEDKKLSFTEGQLTQSSHLMKLAMGALKRKIPTASIDPIPGPVTSEIRKAWKIIGTLSQACPEVIDSAGEVLPKNEIRGLSHLHHALDAATLALAAHYFPLQYHGQNQTGKIWQAMLKRQRTEDEKKFLRSLGIFSTYGRLRRDKDGNPSEEKDVRLDDLPKDVKERLSRSLAECRVMQHIPSDRSGVKAELTTWGVDSIEGEGEDARVRLRQTTSSVEGGRRVIKVKQDEKRAGILLGFAPKNEKGKLKNIKGVMIIGENYGLALDPVPVVIPFHDVQQRLVEIRAANGGKSIRTLRNGMLIRLAKSPVRSRQDYSGIWRITSIKNNRGAFLIDMIRPGYVTAQNGVVWSGMNKTLGPLLECGLEILPRRYTGYSIRE

SEQ ID NO: 2000 - protein, 1112 aa, unidentified
  REGION 1..1112: note = Description of Unknown: Cas Enzyme sequence
MSLILSFDIGYASIGWSVLSSKRDQKPEPDVLGVGAVTFPTDDCLASQRRGLRRTRRHIRSTRQRIERLKRWFLAKGILDREALDRPGHAAPFLLAAAALNGHRTLDAWELWNVLRWYAHNRGYDGNSRWAKGDESEEDTEKVQQAIALMKEQGTETMCETVTACLGLKPSEHDKRISSFLPYKTLNAAYPRNKVTEEVSRILGLHNGKISNLDSEAIRLILKESPLSEEERFKLVAAGVKLPKRFMGGLLFGQLIPRFDNRIIARCPITWATTYDDAIKAGEPDTKARKLADKFAKVPSAKCSEFFRFRFAMLIANFKVDDGKPISRDLRRALWSLGEKQGRLTYKDIVKVIKESGHKPYNLDAYFKIHPDSEDALTLDPIVEFPHKNQIVKGIWTSLSDETRDEVLDRWKKGGAVTPGELFEMSGKSEGARKAIEAVFDKDQKKAKGKRTYSTIQDLLDRKLSPASTSGRAPYARPVLRSVVEEVLSGPFHPLKASKATDPENGDDKAEDGVLYALGIPTSRVRQLQEERPLEKLTNNHLVRHRMLILHRLLDDIVAEFCTGSDEVGRVIVEVARELREFSGMTAKKIASELNSRLKDFKSAVAYLDKHAPNLEKSGGIIRKCRIAMDLDWRCPFTGEPYDAYDLPKLEREHIIPYATRNTNALHALVLTWPEINRMKGKRTARQFITDHEGKQVDGKANLSLFTVKQFDDFVEKLDTRGHPDDAKRKRARKALLLTTDFEDKELGFTDGQLTQSSHLMKLALRGLTKRFPSAICDPIPGPVTAEIRKSWRLTGTLALACPEIIDPETEKPRPKDEIRGLTHLHHALDAATLGLAAHYFPFQSRGQDQKGKIWQALLKRQRTAEEKDFLFKLGIFDRFERNRRDKQGKEFRESDVRLRDLPASLKDQIARSLAECRVMQHLPSDRSGAKAELTTWGVTEITGEGEDARVKLRQQTSTVEEGKRVIQLKTREERAGKLLGVNPKNGEGKLMAIRGAMIIGENYGLALDPEPTVIPFHEVQKRLVELRAANGGKPVTVLRNGMAIHLDGQGKRDGVWLIYTVQASLKIDLVRPGTYGRPKKGDCVWREVAVKGLLKNGLQVLPRRYTGYPLT

SEQ ID NO: 2001 - protein, 1074 aa, unidentified
  REGION 1..1074: note = Description of Unknown: Cas Enzyme sequence
MELNFAFDVGHSSIGWSVIAPKVNEAPDILGCGVVLFEKDSALANQRRLHRSQRRHVRATRQRIARLEKLLAHLGVIASSDLAAKHAAAGGHAAPWLLAARVLASNGTRTLTWFELWDVLRWYAHNRGYDPLSMTSDEADAAGTQKVANARTAMHAHGKVTMAETICAWLGLDPFGDKSASAESYKAKEAAFPRIIVQDEVRRILTAHLGILPSVTPEFIRSLLDKADALSCPDILLPKRYNGGLLFGRLALRYHNRIIGLCPLSGEKLPLKDCPEFYRFRWAMLLANINVTTAAAPNPRPLTPAERVQLTLAATSQGYFTPGEFRKTVRKLTGSIRDNLDQMFMDATAAENLVVDPARRLVHSKAYLSDVWPHLPERTRNHALNRLRRGNSITLAGLRAEASTAGHNLTGFDTSLANRCAAPAKKSRSQKSAAPPPTPEQILATPFHAERLGGRAPFARPLLTRAYDEVMADPPIHPRVEGGSLFETPAQRRARDTRTIDQQTNNHLVRHRLAILGRLLDHLIADPAYAAGDAARVSRLVLEVNSDLRTMAGLTAQDIAKEMNERLRNHAQVSKKLEVPGALPPGTRINASLIRKARIADDLGWRCPYSGHHFEPVDLVTRRVDLDHIIPHSQRPSDSLDSLVVTFSAINKMKGARTARQFIEEFQTKSVPEIPNLHIMEASHYEKFIDGLDTRGHPDDVRRKKRRIERLRLASYDEKSGGFTPGHLTQTSQLSRLGQHVLRKPFAHLAEPPVFVALPGQLTARARSAWSVLACLADAAPDTLETTTDADGREHREVKTKTEIRNITHLHHALDACVIGLAADRFRNDGSIWRALIERRPNPAQRALIEPLDLGEFDSSGGFRLRDLPETLKTQLRQRLAERRVVQHVPADMSGMKAKQNIRGIADDSDPDFLILKPGIGDDGTQQKKPEKVLRTKVIGLLPGKLKNLKGVQIIAANFGVAILNDTKLDPDARFIIIPHVRAWEQIRALRIRNGGKTPQIWRNGQLIRLAIGPRAGIWRICSIKNSAAKGLVLDLARTDQLQATWREVILRSLLKMSVTHLEPKLTGEKDTGV

SEQ ID NO: 2002 - protein, 1096 aa, unidentified
  REGION 1..1096: note = Description of Unknown: Cas Enzyme sequence
MKTISPAPDLELSFDVGHSSIGWAVLQSSAGVSPAANTPRVNILGCGVVTFGADDCLASKRRDYRRQRRHARSTRQRIAQMEKLLAHLKVLSAEQLKQKHQQAGGSSVPWLFAARMLASNGDAKHLLDWPKLWDVLRWYAHNRGYDGNRRWSAQEAETQEQDTEKEKNANALMEKFGTQTMAETLCKALGLEPLGEKEASRENFKRLNAAFPRNIVEKEVRRLLESHQKKLPAINTTFLKSLFEDWHAADVPGLKLPARYQGGLLFGQLVPRFDNRIISTCPITGEKVPSRNCPEFYKFRWAMTLANIRVAGAKEKELRPLTGDERKKINALMENEGALTPTALKKSVRETTSCTRDNLETMLMHPDAKDALLLDPIQKLVRSDKLATLWPAFSPRVQKRARDLWLRGKLVTLKGICGIAQKLGESLADFEAELNKLADATNTKRSKKTGSFNREALLKEPLTIKKSDGRAAYARPLLVRAYAEIMAGKHPKEEGGCLEVTEAMRQAQLQKQIDQQTNNHLVRHRLLILERLLKDLIAEPAYANGDKSRVAKVTIEVNRDLREMSGMSSQDIKKDLGRRLDNHHKVAAKLETDLAGKTYNGQPIQITAGLIRKARIAEDLGWTCPYTGKTYDALDLVSRQVDKDHIIPRSLRPSDSLDSLVITFSEVNKMKGQRTALQFVSDEQEKTVDGMPQLSIVSVTRFKKWVEGLETFKGHDDDKRRKKKRKELLGLQSYEEKGFTPRDLTVTSQLVRLGAQNIKKTFTGIGKVPTVVSLPGSVTGTVRKGWNLLGCLALAAPQVKETDGSMKNKTDIRNVTHLHHALDACVLGLASHYLPNNGGLWELMIKRNPNDMEKTLLRSTGYFGPDKEGRFGLTELPEALKEQIRQRLAEKRVVQHIPADMSGMRVEENTRGITGMKDGRVFLRQQSRDAKTGKLSIKPTEESVNKVVGLKPGKLTPQNGVRVITDNFGVAILDHAAEGEEKFVIVPWHKVWPRLQELKARNAGKVPRVLRIGTLVRVPKKAGRSDYRGLWMVRGVQLNQKAGFLVDLSSPDVIQYRVSGRDDCAQNIRLQSLYEGGLEILKTPLAGIPTSQTKPC

SEQ ID NO: 2003 - protein, 1076 aa, unidentified
  REGION 1..1076: note = Description of Unknown: Cas Enzyme sequence
MKDKQKNTLSQTADLELAFDVGHSSIGWAVLQSVSPAPAQTETPSVNLLGCGVVTFGANDCLASHRRAFRRQRRHIRSTRQRIARIKILLKQLGVLDEATLNQPGCAWPWRLAAQVLQGGKRLTWAELWDVLRWYAHNRGYDANRRWSAAEAQAQQEDSEKEANARTLMDKHRTKSMAETFCRELGIDLSGKKKSSTKRFKGLKAAFPREIVENEVRKILQAHHDILPGVDGRLEEALFTNWQAIPCPNLKLPNRFQGGLLFGQLVPRFDNRIISQCPISGQKVPSRNSNEFLNFRWAMQLANVRIARFGELKLSPLSPGERRELDQQMRRVGAMTAEQFKKTVRNVSNAIQDNLDTMLMHPDAKEALTLDPVQKLVRSTELAPFWELLPERLQSRLRGQWRRGKVFSLAQIRTQLAGYGDVAAFDTAVQKQLEARHVKSRKKDKPLTREDLLERQFPPQPIKLAGRAAFARPLLQQAYAEVMDGQHPKEPGGCLFLSEEIRQRQLAREIAAQTNNHLVRHRLLILERLLNGIINEYAGKDKTRIGKITIEVNRDLRAMSGKTAKEKAQDLNRRIDNHHAVAAKLEKAFAEENTRIPITAGLIRKARIAEDLGWKCPYTGQDYEPRQLVSRYVDKDHIVPRSHRASDALDSLVITFSAINKWKSNRTAWEFVEQEQGKPVPDLPHLSIMSLSRYRQFVESLETYKGRHDDDKKRKKRRKELLLLPKYEDKEFTPRDLTQTSQLVRLGAQVLKRAFAGHEQPPIIVSLPGSVTAAVRKAWKILGCLSLANPQVLDENGEVKNKTDIRGITHLHHALDACALGLASHFIPNHGRVWELIVKRTVNDAEKEELMALGIFTFSANHRFEMRDLDNRLKEQIRQRLAEKRVVQHVPARMGGLRVEQNTWRVVEVKAGKARIQQRIRQADESRPLKQTEEKTSKLLGLQPGKLSVNKGVLIIPDNYGVALDPEPTIIPFHKVWERLRELKKANGGKRPRVLRNGQLVKVPQGKFMGVWRVFSVKNNTSGIAVDLGFPDVVRLKNKMAGHKINVLLASLLKNGMRVVKPPLTGVPTWPTTSSA

SEQ ID NO: 2004 - protein, 1076 aa, unidentified
  REGION 1..1076: note = Description of Unknown: Cas Enzyme sequence
MNAPGAQPPSNLELAFDVGHSSIGWAVFENDAELKIKGCGVVIFRAEDCLASKRRDFRRQRRHIRSTRQRIRRMKTLLRHLGALTQEQLDKPGCAWPWKLAAKVLVSNGAHTLSWPELWDVLRWYAHNRGYDANRRWSGAEVDAQEEQEDAEKLKTAKNLLQKHGVQTVAETFCKELGIDPLGQKSASTVRFKGLNAAFPREIVEEEVRRILRAHFGKLKGVDENLERALCGRDSRDKDAWQAIPCPDIHLPERYEGGLLFGQLVPRFDNRIISKCPITGQKVPARNCREFLEFRWAMQLANVKVAATGNGPLRPLTADERRQVDTKMREKGALTPTEFKEGVRVATGCVRDNLETMLMHPDAREALTLDPVQKALTSDERIAALFAKLPARIQKRARGQLRRGKTITLGQLRDHALAVGESVTDFDEELGRQLNAAAAKKRKKDAGISRESLLARPLHVEKLSGRAAYGREILRKACEEVMAGKHPKEEGGCLFVTEQVRQAQIQRDIDQQINNHLVRHRLKILERLFHDIIAEYAGGDKSRIGRITIEVNRDLREFSGKTAKEKAQDLGLRIADHHRVAEKLQKALAGQTLNGQPIRIGPALIRKARIAEDLGWTCPYTGQKYEPIDLVTRRVDKDHIVPRSQRASDSLDSMVITFSAINKWKGKRTALKFVEDEQGKPVPDLPNLSIVSLSRYRDFVEKLDTFKGHDQDKKRKKRRKALLLVRDYEEEEFTPRDLTQTSQLVRLGAQMLKRPFLREKHQPVITSMPGSVTGEVRKGWNLLGCLSKACPQVLDENGEVRTKTEIREITHLHHALDACVLGLAAHFIPNNGRIWELIVKRNLTDTEKLQLRALGIFDFSPEGFRLKELPDELKNQIRERLAERRVVQHVPKRMTGLRVEQNAWRVVKIEGDEAIIRQRMRQPDGSRPVKETTERVTKLFGLNPVGGSGKLKALKAALIIPENFGIALDPEPTIIPFHKVWPRLQELKKANGGKWPRVLRNGHLIHVPKGRYQGTWRVFSAKNNKSGMAVDMGWPDVVRLRNGVQGHKINVLLASLLRDGMTILDTPLTGVASPVR

SEQ ID NO: 2005 - protein, 1158 aa, unidentified
  REGION 1..1158: note = Description of Unknown: Cas Enzyme sequence
MGKISRTPDLELAFDVGHSSIGWAVLEKSGPDLLGCGAVIFPADDCLASQRRAFRRQRRHIRATRLRIARMKRLLAHLGVLTDEQLDTVVSSSPWLLAARVLRGGEKLTWAELWDVLRWYAHNRGYDGNKGWSRQEAIANAEDTEKEQKAHELLDAFRKKYGREGTMAEVFCDRLGLDPLAVKTSSQIRFRDLGAAFPREEVEAEVERILQMQDVEEKVIVAIMRDHTAFAGPNYRLPARYGQRVNGARTPGGLLFGQLVPRFENRIIATCPVQFQREYERVLAATRDAKKATHEAEKLAKVPGIGCVEFHRFRWAMQLANVTVATSDTRKTRRLSKDERITVNAEMEKLGALTPKQFKDLVRIETKTDRDNLDRLLALPDADKSLVLDPARKLAMSGILGVLWPHFDARLQKHTLTNLRRGKSVTARGLLEKCPAAQSAFDHWWDSEAMKSPRKTKKNPTPEARTRDQALNEPYSLSPMNGRAAHSREVMDEVWKFVLSSDGHPMDPGAPLFRSEAIRRAQLERAIDEQSNNHLVRHRLKLLERLHEDLLKEYAGGDKSRVDRITIEVNRSLKELSGKSAQEQAKEQGQQTFHFRSVEKKLAAAYEGLGVKLGPGLIRKGRIAEDLGWKCPYTGASYDELDLLHRRVDKDHIIPRSQRMSDSLDSLVITFSEINKLKGNRTAVQFVAEFQSQPVPGLPNIMIKPLTNYFKDVDSLDTFKGHNDDQRRKKNRQRLMRLRDYVEKEFTPGDLTKTSQLVRLGAEALQRAYLNEKAKPTIVSLPGSVTGAVRKSWNLAGCLEAANKNVMNAEDLDDNGKPRVHRKTELRGITHLHHALDASTLAITSHLLPCDGGVWKREVVELLSKRRCNPAEQSLLRQLLRWKITFTKEGQPVLGEITDELREQLRARLAERRVVQHLPASMSDMMSDQTVWRLFDPADPHSNAKRLARWLAEAEVKVPAPEAKTALIVTRKRKAAPKQGEKEASAAGKVFHEGKIWRWVYDIKAKNGLLGFAPSGNPAESKLKAFKAVKVLGDNFGIALDPEPTLIRPLHVWRQLQTLKVANGGRWPKVIRNGMLVRVLRAKSAKVDYRGVWMVRGVQVNQTKGYLVDLSPADQVRYRGEEGCFQNVSLETLRKCGLEVLHSPLCGVQPRPMKETSR

SEQ ID NO: 2006 - protein, 1158 aa, unidentified
  REGION 1..1158: note = Description of Unknown: Cas Enzyme sequence
MNYNLKNHETDLQLSFDVGHSSVGWAVLKARTNQTPDLLGCGSVIFQTDDCLASERRGFRRQRRHIRATRLRIARMRRLLLHLGVLDKEKLEAPGCAWPWLLAARVLQGGNKLSWSELWDVLRWYAHNRGYDGNKGWSKHDTASAEDSDKEKRANELLTEFKKKYGRCGTMAEVFCDVLKLDPLGPLKSSMMRVRNLGAAFPRESIEAEVEHILRAHLGMLKHLDERLIDALMRDYTALPGPDLRLPARYGQRLSDGSLSPGGLLFGQLVPRFDNRIIASCPITFERVYQSVKAETNDEEKAKHEAEKQAKVPGIDCIEFYRFRWAMELAKIKIATSDTHAPRNLTGVERQAVNAEMEKHGYLTPGVLKKTVQRLTGGALDNLNQILTHPDADRALVLDPVRRYIHSDQLVSSLWQILPIRLQKRLIGQWRRGHAITGAELLADCGEASIVAEAVFEKYLDEQNTKKRKKDEQLKREDVLRMPLSIAQSKGRAPHTRQVMREVVEFIFSTDRHPAEDGGPLYRSEAIRQAQLQRALDEQTNNHLVRHRLKILERLHSDLLKEYAADNRARITRITIEVNRDLREMSGKTAQEQAKLLGQQLANFKSVAKKLTEAYEGLGVHVGPGLIRKGRIAEDLGWTCPYTGKPYDALDLLHRRVDKDHIIPRSDRPSDSLDSLVITFAEINKWKGKRTAVRFVEDEQGKPVPGLPQLMIKPLSTYLKDMAKLSTFAAHENDERRKKNRKRLLLLRDYVEKKFTPGDLTQTSQLVRLGAQALQKHYLGAEKQPAIISLPGSVTGAVRKSWNLLGCLAAANPLVLNPEELDEGGRPKVRTKTEIRGITHLHHALDACVLALASYFLPRDGGAWELLVKRRLNEGEQSRARTIFGKQIEITKDGELRLSDLAPALKAQICDRLKERRVVQHLPADVSGLRCKETVWRIFDPTDTHRNSQRLARWLAQKEVAVPTADAKTALIICRKRRTADVAGEDSAGGKVFRETKTWRWVYDVKDKSALLGLTPEGDLAAAKLKRIKAVKVLGDNFGLALDPEPTLIRPHKVWHQLETLRQRNAGKTPRLLRIGTIIRVKEKSARSDYRGTWMVRGMSFKQRDGLTLEIAPVDYVQNRRVQGVFESASVMTIMKCGLEIIKTPLVGVISSFPKPND

SEQ ID NO: 2007 - protein, 1092 aa, unidentified
  REGION 1..1092: note = Description of Unknown: Cas Enzyme sequence
MSPKLEFSFDVGHSSIGWAVLQNGAGVSPAANVPRVNLLGCGVVTFGTDDCLASKRRDYRRQRRHARSTRHRIAQMEKLLAHLKVLSAEQLKQKHQQAGGHAAPWFLAARVLASNGDSKNLLDWPQLWDVLRWYAHNRGYDGNRRWSAQEVEAQSEDTEKEKQAIALMEKHGTTTMAETLCKSLGLEPLGDKQSSKENFKRLNAAFPRSIVEKEVCRLLELHQKKLPAITGAFLKSLFKDWRAPKIADLKLPDRYQGGLLFGQLVPRFDNRIISTCPITGEKVPSKNCSEFLKFRWAMTLSNIRVAGAIEKELRSLTADERKKINAVMESEGALTPKELTKLVRETTGCTRDNLDTMLMHPDAKDGLLLNPIQKLVRGDKLKTLWPTFSPRVQKRVRDLWQRGKLVTLERICGIAQKLGESLSNFETELNKLADIANTKRSKKAGSLNSETLLKEPLAIKKSDGRAAYARPLLIRAYAEVMAGKHPKEEGGCLFITEAMRQTQLQKQIDNQTNNHLVRHRLLILERLLKDLIAEPAFANGDKSRIARTTIEVNRDLREMSGKSAKEIQQDLGRRLANHHGVAAKLEEDLDGRTFNGKPIQITAGLIRKARIAEDLGWTCPYTGKTYDAIDLVSRQVDKDHIIPRSLRPSDSLDSLVVTFAEVNKMKGQRTAWKFVSDEQGKVVEGLPQLSIVSLTRFKQWAEGLESYRGHDDDKRRKKKRKELLLLPNYEEKGFVPRDLTVTSQLVRLGAQIIKKTFTGSEKPPMVVSLPGSVTGTVRKGWNLLGCLELAAPQVKEADGSIKNKTDIRDLTHLHHALDACVLGLASYYLPNNGGLWEVMIKRNPNDAEKSLLRSTGYFDFDSQGRFGLTELPDALKEQIRQRLAEKRVVQHIPADMSGMRVEENTRGITAIKDGRVFLHQQSRDAKTGKLSTKPTEESANKVIGLKPGKLTPQKGVRVITDNFGVAILDHAAEGEEKFIIVPWHKVWPRIQELKPKNSGKVPRLLRIGTLIRVPKKAGRSDYRGLWMVRGVQLNQKAGFLVDLSSPDVIQYRVSGRDDCAQNIRLQSLYDGGLEILKAPLTGIATPQIKPAE

SEQ ID NO: 2008 - protein, 1087 aa, unidentified
  REGION 1..1087: note = Description of Unknown: Cas Enzyme sequence
MNATQKIQPATNSDLQLAFDVGHSSLGWAVLQSSAGIPPAAKRTAGDNSINILSCGAVVFRADDCLASSRRTYRRQRRHIRSTKQRIARMKIILRHLGVLKENELNQPGCAWPWQLAARILQGGKLLTWPELWDVLRWYAHNRGYDGNRRWSAAEAEAQKEDSEKEANARTLMGKHGVHSMAETFCKELGVDPLGKKKSSMKRFKGLNAAFPREVVEGEVRKVLQAHSGKLKGVDVNLEKNLFSDWRAIPCPDLKLPKRYEDGLLFGQLVPRFDNRIISICPISGQKVPSRNCPEFLNFRWAMQLANIKVGKTKDRELQPLKTEYRVALDKQMRERGYLTPKELKDTVRSITSCERDNLDTMLMHPDAKEALLLDPVQKLICSNDLQPLWKLLPERLQKRLRGQWRHNKVFTLAQIRKQLESLGDVSAFDAEFQKQLDTQNSKAKKKEKQVTREQLLQQHFPSRPLKLDGRAAFARHLLKQAYEDVLAGKPHPKEEGGCLFITKKIREAQLNRAIADQTNNHLVRHRLLILERLLADIIKEYAAGDKKRVGKITIEVNRDLREMSGKTAKEKAQDLGLRIANHHAVAEKLEKAFAEERNGKSIPITAGLIRKARIAEDLGWRCPYTGIDYEPKDLVTKRVDKDHIVPRSERASDSLDSLVITLSAINKWKGKRTAWQFVEQEQGKPVPDLPNLSIVSLTRYKQFVESLETYKGHDDDKRRKKKRKELMLLPKYEEREFVPRDLTQTSQLVRLGGQVLKRAFANSEEKPTLVSLPGSVTGAVRKAWKVLGCLSLANQQVLDENGDVKTKTDIRDITHLHHALDACVLGLTSHFIPNNGRVWELIVKRNPNDLERQQLMALGVFGFNAEKRFEMRDLDNKLKEQIRQRLAEKRVVQHIPARMDGLRVEQNTWRVVSSDENGNVTIRQRIRQADGSRPEKLGEEKTTKLLGLKPANGNGKLAANKGVLVIPDNYGVALDPLPTIIPFHKVWPRLQELKKANGGKLPRVLRNGQTIKVPEGKYKGVWRIFSAKNNATGMAIDIGQPDVVRLKNKTEGHKINVLLTSLLKNKMEVVKTPFTGISAIPATSST

SEQ ID NO: 2009 - protein, 1080 aa, unidentified
  REGION 1..1080: note = Description of Unknown: Cas Enzyme sequence
MNSKGKISRGEDSNLHISFDVGHSSIGWAVLEKTGHQISDIKILGCGSVVFRADDCLASSRRAYRRQRRHIRSTKQRIARMKILLKQLSVLTMAELDRPGCAWPWKLAAQILQDGKLLTWPELWDVLRWYAHNRGYDGNRRWSAAEAEAQKEDSEKEANARLFMDKYGTKSMAETFCVMSGINPLGKKKSANLPGDKRPKGQNAAFPREIVEREVRQILQKHFGKLEKVDANVERVLLGNDSNDKLAWQAIPCPDLKLPKRYEGGLLFGQLVPRFDNRIISTCPISGQKVPSRNCPEFLNFRWAMQLANIRIACVGEKDLRPLTVVERKVIDQAVREKGGVTPFQLKLLVREKTKCVRDDLEQMLMLPDFEKALLLDPVQKMISADDFQSFWKLLPDRLQKRLRGQWRRGKVFSLAQIRKQSESFSDVIAFDAELQRQLDAHNSKAKKMEKQITREKWLQRPFPSKPLKLDGRAAFARHLLKQAFEEVMAGKHPQAEGGCLFISEEIRQKELNREITEQTNNHLVRHRLLILERLLKDIIKEYAGGKRERIVKITIEVNRDLREMSGMTAKEKAMDLGSRIANHRAVAKKLEKAFAEESNGKSIRITAGLIRKARIAEDLGWICPYTGQPYEPKNLITRSVDKDHIVPRSERASDSLDSLVVTFPAVNKWKGKRTAYEFVEQEQGKAVPDLPNLSIVSLMRYKQFVEGLEAYKGHDDDKRRKKKRKELMLLPKYEEKEFTPRDLTQTSQLVRLGAQVLKRTFADCEEKPTIISLPGSVTGTVRKAWKVLGCLSLANPQVLDENAEVKNKTDIRDITHLHHALDACVLALSSHFIPNDGRVWELIVKRNLSDLEKQQLTALGVFGFTGEKRFEMRDLDDNLKEQIRQRLAEKRVVQHIPARMDGLRVEQNTWRVVAVRDDEVILRQRVRQPDGTRREKMTEEKPAKLLGLNPTNGKGKLARNKGALVIPDNFGVALDPQPTVIPFHKVWTRLQELKKANGGKMPRVLRNGHLIRFKEKNKEQICRVFSIKNSARGIMLDFGSPDEVSCSRNNNHLSSFLKGGLQIVKGRLTGIPCPTTSSA

SEQ ID NO: 2010 - protein, 1090 aa, unidentified
  REGION 1..1090: note = Description of Unknown: Cas Enzyme sequence
MKTKASVPSRTNRADLHLAFDVGHSSIGWAVLQTTDSKTESINILGCGAVTFRADDCLASARRGYRRQRRHIRSTRQRIARLKILLKHLGVLSEEQLNQPGCAWPWKLAAQVLRSGELLTWPELWDVLRWYAHNRGYDGNRRWSAHEADAAAEDTEKEEMARSLMDKHGTKSMAETFCAISGIDPLGTKKSCNLPGDKRPKGQNAAFPRPIVEGEVRRILQAHVGKLAKVDAAFVRALLGDSPNDAEAWKAIPCPELKLPRRYQGALLFGQLVPRFDNRIISTCPISGEKVPSRNCVEFYRFRWGMLLANIRVGNATDRELRPLKVAERASLDLLIKIKGALTPKELREAIRQHPGSSRDNLDTMFMHPDAKEALVFDPVQKMIASDDFLPLWNHLSPRLQRRLRGQWRRGKSFTLDQIRKEAVKDGNVSAFDAEIDRQLDAANTSKKKKQGQMSREQLLARSYPSRPLRQDGRAAFSRPLLQKAYDEVMTGKHPKEEGGCLFITEEIRKAQLDKAIAEQTNNHLVRHRLLILERLVRDIVKEYAGNDRSRIARATIEVNRDLREMSGKTAKAKAQDLGLRLANFKGVSKKLEESLESERMNGRPIQITAGLIRKARIADDLGWACPYTGQSYEPKHLVTRYVDKDHVVPRSDRASDSLDSLVITFSAINKWKGRRTAWQFIADEQGKPVPDLPNLSIVSLSRYKQFVEGLESYKGHDDDKRRKKKRKELLLLPAYEEKEFTPRDLTQTSQLVRLGAQTIKKLFADLEKPPVIVSLPGSVTGTVRKAWKVLGCLSLANPQVLDETGVVRTKTEIRDITHLHHALDACVLGLTSHFIPNNGRAWELIVKRNPNDAEKRELMALGIFHFNAEKRFEMRDLDNRLKGQIRQRLAEKRVVQHIPARMDGLRVEQNMWRVVSVKDDEVVLRQRMRQPDGTRSDKTAEEKPGKLLGLKPANGVSKLGRNKGVLVIPDNFGVALTKPEPTIIPFHKVWTRMTDLKQSNGGKIPPVIRNGQLIIVPKDRYKGVWRVFSAKANMKLDIGWPDSVKMKTKGPDVRGNVMLATLIRDGVIVKKTPLTGIPTSQIPESQISD

SEQ ID NO: 2011 - protein, 1317 aa, unidentified
  REGION 1..1317: note = Description of Unknown: Cas Enzyme sequence
MSIKDKILGGADANLHLSFDVGHSSIGWAVLEKTGAKTGDINILGCGSVVFRADDCLASSRRAYRRQRRHIRSTRQRIARMKILLNHLGVLTGTELDRPGCAWPWKLAAQILQGGNLLTWPELWDVLRWYAHNRGYDGNQRWSNHEVIQAFSTDGLRHKGKPSSEDESNLVAAAERADAESGIQNEADSDVKKVKEAFKQMGDYGKVTMAETMTSHVAKFEKETAEYHQGKRTEKPVRFKGLGAAFPRRIIRDMNGQKELVGGVEWEVRFILRAHFGKLHGCDEKFEQAICGGLPEKSDDWMAISCFKIRLHKCYQGGLLFGQLVPRFDNRIISQCPFTFAENYQNNLDEGLTPKEAKHKAEIAAKVPGKNCLEFLEFRWAMTLSNIGVGFGNETYEIGKRLRPLTIGERLKVDARVRQLGFLKIEKDEVSKKTGLMKVGKNELREIVLEETKCDRHNLDSLLLHPDAKDGLKLIPVAGNVTAFRLAFSCFDAPKHDKEGGFYRDDSIRRRFIVQLLRQKSLTLNEILRQLEKIGKSEIAERVRKAAQNETSKSGKVDEARFQDLLEAKFHCEKLSGRARFSREKMKQAVQQAFHKDNPIHPLEKDGCLEQTDAIKQAAIQKDLAEQTNNHLVRHRLRILVGDPKAKRKRKPGEPKPGLLEDIIAEFANGDKRRIARITIELARDLQEMSGMDSKKKAKELTIKLGHHKQVSEELATKLRDANGNPLRDADGKPFFSKPGLIRKAMILDDLENRCPYTGQDIEFVHLVYPHLKFGRADKDHVIPRSQRLSDALEAQVITFSEINLLKSNRTAIQFIRDMNQPENRLHKDRFGIKTEAQFRRDVEALWPKFDPFKRTRAGGAKTTDDEARCWRRKQFLLKETWDEKEFTPGDLTKTRHIVKLAAQQLETAFLDLAPEQRPPVIPLIGAVTATFRDKSWKLLGELAAVNPAVKEVLDNGAKDWDAGKNFNPKKAVREVTHLHHALDALTLGLITDLLVPPGHRSLDGELARLIVKGKLTVDKEKNLDELATFRTLCAKLRLPRFVSIDNRNRLYIESLSEPIKKQIRQRLAEKRVVQHIPADMSGLICDETVYHVFDPNDITLNSKRLKRWFEKLLLAGELKKLTVLPDPKNEKDSLVLLTARKRRNQQGGDSGKTLHDTGNEWRWIYLLTGKDAVHGLNPTGTLPGKLSAIKAVKVLGDNFGVAAITEKGVEPKFEMLRPRKVFEQLEKLRQIDPNARLQIIRKGTLFRLTENDNSQTLLRIFGCGERPGRGIYFDAGNPDAKDREREIPISAFTKGNANIIETTLTGIAVCPTTSSA

SEQ ID NO: 2012 - protein, 1091 aa, unidentified
  REGION 1..1091: note = Description of Unknown: Cas Enzyme sequence
MKDKQKITEKITSPPAHSDLELAFDVGHSSIGWAVLQTDGKMEISGCGAVIFRADDCLASTRRGYRRQRRHIRSTRQRVARMKVLLKHLGVLSGEQVDKPGCAWPWQLAAKVLRGGGLLAWSELWDVLRWYAHNRGYDGNRRWSAAEAEAAAEDTEKEENAKTLMGKHGVNSMAETFCAELQINPLGGKRASAIRFKGLNAAFPRAVVEGEVRRILRAHFGKLRGVDAALERALLGKDSQDKTAWQSIPCPQLKVPKRYEGALLFGQLVPRFDNRIISKCPVSGQKVPSRNCPEFLNFRWGMQLANVRVTRFGEKELSALTATERKQVDAVMRERGGMGVEEFKKQVRQIAGAIRDNLDTMLLHPDAKEALLLDPVQKLVESSEVKPFWRLLPERLQKRARGQWRRGKTITLAKLRAELEELGLSSASFDAEVTKQLDAANTRGRKKDKQTSREEMLSRPWSVKRLEQRAAYARPLLKRAFEEVMAGKHPREEGGCLFVTEAMRQAQMAREIAEQTNNHLVRHRLLILERLVGDIIKEYAGGDKARIAKITIEVNRDLREMSGMTAKQKAQDLGLRIANHHQVVKKLEEDDSLMKVLRRQKTRISAGLIRKARVAEDLGWVCPYTGQQFEPVDLVTRRVDKDHIVPRADRASDSLDSLVVTFSAINKWKGKRTAWQFVEQEQGKPVPDLPNLSIMSLSRYKQLVESLETFKGHDDDKRRKKRRKEWMLLPSYEEKEFTPRDLTQTSQLVRLGAMALRKAFVSCKQQPVVISLPGSVTGAVRKAWKVLGCLSLAAPQVLDENREVKTKQEIRDITHLHHALDACVLGLAAHFIPNNGRVWELIVKRQWTPAEERELRALGIFDKDAEGRFQMRDLDSRLKEQIRQQLAERRVVQHIPARMDGLPVDQNMWRLRGWGSEGKAILEKHSRDASGKRQKDNPKPGADNRDRLIGWQPEKGDGKLQRLKAVLITNENFGVALTKPQPVIVPFHKVWPRLSELKAANGGRMPTILRKGQLIRVPCGKNFKGVWRVFSAKNNASGMALDIGSPDVVRLKNKTEGHRINVRLATLIKDGMEVLKTPLTGVAACPAMSSA

SEQ ID NO: 2013 - protein, 1111 aa, unidentified
  REGION 1..1111: note = Description of Unknown: Cas Enzyme sequence
LALDWFQYEESLDGNLVTLLFLVILISTNYVSVMSFSLSFDIGHSSIGWAAFKFPKNQLEILGCGVVTFPAEDNQNQQRAGFRRQRRHIAATRNRIKRLEAFLVQAGALSVEDVEYCRENPNPWPWLLAAQVIVTNRGLNWRELWPVIRWYAHNRGYDGNALWAGEDSDPDDVKKVQTARELMEKNNTSSLCETVCKLMDIDLKVQKNPKLRHYFKGENAAFPRDVVVAEVRKVLERHLGILDGMTQELIEALLDDWKRVSEVGFDAKLPARYFGGLLFGQMKPRFENRIIPNCRVTGEKTPSKHSREFYRFRWAMLMGNLRVADPFEGGSRALSPTEREQLNVAMATSGYLTKTTLKKVLVKDLNLEPTNLDAMLLIPEMEKALVLDPALREMSGTKYKKIWKEIPNTWHSALLNQLFNGRNYRSKPASLAQWRSRIESKGALSVELDSALTDAYDSECKLLAKKKGVGELPSYEAFLNRSLRIAPSNMASGRAPYARVKLIEAVEAIMKGEDPRAVGGVLEETASVRQRQQKEGVDQNSNNHLVRHRLKIFEKTLIDLVNRYADGDASQVEWVGVEVVRDMVEFSGKTAKEKAKIIGEQLWHHRKISKYLEKEREAAGGSWEITAGLIKKVRIADDMGWKCPYTGKIYNLNQIIHGDVDREHIIPRSKRPTDAMHALTLTFSTINKEKGARTAMQFIEATKNDSRTLTPKQFYEFVSKLKKSNGPSKDDERRCMKRKVALLTRDYEPRGKAKEKSEETAIDGFTEGSLTQTSYLNKLAAQRVHHWFSEQLEDGSKLPKVMQLSGSVTAATRRGWNLLSPLEAACPETRGKSKTEIREITHLHHALDAIVIGLSAHYFPLDGRLWTLLSKRSIKDPSAQAYMRAQLGDLISFSSSGSWQLEPLEDSLISQIVERLKEKRVVRHNPRTMRGLRVQQNVWRVEDEAPDDPSKMLIRMKPRNEDGDKVLKQKSERKTKLFGSDPKDVTGKLKDLKGVLIVEDNYGMALDPEPKVIPYQQVWAQLQQLKKQNGGRTVRVLRNGHIIRVQKGRYRGLWRVHSIKDANMGLVLDIASPELVRVSNGVVGAKLNVRLKTLLSNGLELLNLDSSSHEV

SEQ ID NO: 2014 - protein, 1128 aa, unidentified
  REGION 1..1128: note = Description of Unknown: Cas Enzyme sequence
MKTYPLEKDPATPNSRDLHLAFDVGHSSIGWAVLQTPAAEAPSLLGCGTVIFQADDCLASRRRAFRRQRRHIRSTRQRIARMKTLLSHLGVLSPEALDNVSSSSPWFHAARVLAGKGREKLTWPLLWDVLRWYAHNRGYDGNKVWSREGQDAAAEKEDTEKVENARSLYDRYKTRTMAETWCAVCGLDPLGTKTSCHLPGDKRPKALNAAFPREDVERETAAILHAHIGHLPHVDEALLAALLSDWHAIPCPEIRLPARYQGGLLFGQLVPRFDNRIIATCPITYERRYQQLVAETGDGKSAKDKALKLSKVPSAACPEFFRYRWALQLANIQIASPTGLRRLSVEERQLLHQQIHARGYFTKGDLKKAVRSLTGGVPDNLDQMLLHPDADKALILDPIQRLLTSGEFVPVLATLPEPLKKRLRGRLRRGDRLSLATIREWLGADTAAFDAALETRLSAAATRRSQKTAPISREILLAAELHVGPPSGRAPHSRALMAEVADFVLSTDRHPAEEGGPLFRGEAIRSAQLQRAIDEQTNNHLVRHRLKILDRLHTDILKEFAQEDTARVGKITMEVNRDVREMSGKSTQEIAKELGQQLANFKSVVKKLEAAFEGKGIKIGPGLIRKARIAEDLGWKCPYTGQDYDAFDLLNRRVDLDHIIPRSLRPSDSLDSLVVTFAEINKMKGKRTAMQFVEEEQGKPVEGLPQLSIKTLAQFQKDVENLESFKGHKDDTRRKKNRKRLLQLRDYVEKEFTPGDLTKTSQLVRLGAQGLQKNYPENPPVITSLPGSVTGAVRKSWRLLGCLGAANPAVTDETTKTEVRNITHLHHALDACVLAFASHFIPRDGGIWELLVKRSLSEPEQARLLAVETLFQRDAGRKVSLTDLPKNFKEQIRKRLAERRVVQHIPADMSGLQSEETVYRVFDPEDSHPSAKRLARWFKEKNIRIPKTEDSTVLITARKRRSGVGTESGKLLHETSTWRWIYQEIEKNKLLGLNPEEDATSKLKPLKAVKILGANFGLALDPEPQVLRSHKIWPQLCTLKKKNGGKWPRVLQNGMLIQVSKGSRIGMWRILSTKQTEAYGLALDLAAPDGMKLLKGNAPILSLIKDGMTIVSCGFCGVLSSALKENDS

SEQ ID NO: 2015 - protein, 1083 aa, unidentified
  REGION 1..1083: note = Description of Unknown: Cas Enzyme sequence
MQNDTAQTSSASRNSAPLSFAFDVGHSSIGWSVLTAPASGMPDILSCGVVLFEKDSALAIQRRQHRQQRRHIRATRQRIARMERLLSSLGVFSAEELKSKHIANGGSPTPWLLAARVLASNGQQTLNWPELWDVLRWYAHNRGYEPIGADEDEEENKEKRAHAREGMERFGKQTMAETICAWLGQDPLAPRSGTTESYKAKDAAFDRHVVREEVRRLLTSHIGKLPCIDEDFIRALLDDAQPKPCAGIRLPRRYTGGLLFGRLATRYHNRIIGRCPISGAKLPVKDCPEYYRFRWALLLANITVATAADSPLRELTATERAELTKIAERDGYFTPAEFRKTVRTLTGAVRDNLDQMFMDATAAENLVLDPALKLATTNSWIGPLWLHLPENTRRHALNHWRRGRTQTLADLRSKAASSGADLTGFDSALAQLCTAPARKSRKKEPVPPPTADEILSTRFAAPLIGGRAPYARPLLIQAYQQSMQGRHPRAEDGCLFETPEQRRSRDQRTIDQQTNNHLVRHRLQILGRLVAQLIADPAYANGDAARVERITLEVNRDLREMAGLTAQDIAKEMNERLRSHAQVSKRLLAELPPGTRINASLIRKARIADDLNWQCPYTGHDFEPVDLVTRRVDLDHIIPRSLRPSDSLDSLVVTFSEINKWKGNRTAWQFVADEETKAVPGLPHLHIKQLRRYEEDVRAFDKRGHIDDQRRKKRRIEKLLLARYEEKGGGFTPGQLTQTSQLARLGQQVLRAPFTHLAQPPVFVALPGPVTARVRAAWDALGCLAEAAPGVLEKTKDADGREHFVVKTKTEIRNITHLHHALDACVLGLASALIPNRGDVWRLLLERKLKPDQRADLEALNLGDFDANGGFRLRDLPHSLKQQIRTRLAERRVVQHVPADMSGLRVEENTRGVLKRENGRVFLRQRKKNTNGEFVVNRTDELESKVVGLNPEGKLAKIKGVRVVTDNFGVAILDDEKLPPAERFVVIPFARVWEQLETLKARNGGRSPQVWRNGQVIKLPKGPRAGHWRIFSIKNTSNMGLVLDLGTVEAIRPTWINVLLKTLLRNGASRAITTLAGSEARNA

SEQ ID NO: 2016 - protein, 1163 aa, unidentified
  REGION 1..1163: note = Description of Unknown: Cas Enzyme sequence
MQKYQNHFMSATKKVADLSLAFDVGHSSIGWAVLQTLRSQPLSLLGCGSVIFPSDDCLASQRRAFRRQRRHIRATRLRIARMARLFAHLEVLPKAQLEAPGCAWPWLLAARVLRGGKKLSWAELWDVLRWYAHNRGYDGNRGWSRNDVASNEDTDKEKRASELLTEFEMKYGWAGTMAEVFCDVLKVDPLGEAKSSTQRVRNLGAAFPREGVEREVERIMRAHVDVLERVDDRLINALMRDHKALIGPDLHLPARYGQRLSDGSLSPGGLLFGQLVPRFDNRIIARCPITFERVYQREKAESGDEQQAKHEAEKLAKVPSVDCVEFHRFRWAMELAKIKVATSDPRAPRNLTAVERQSVNVEMEKRGYLSASELKKAVRAQTSGAPDNLEQILTHPDAERALVLDPVRRYIHSDQLVSALWQGLPERLQKRLCGQWRRGHATTVAELLNACGEFRTAAEAVCEKYLDSQNTRNRKKDKPLTREDLIRTPLHVKPPNGRAPHTRQIMREVVDFVFSTDRHPAEEGGPLYRSEAIRQAQLQRALDEQTNNHLVRHRLKLLERLHVDLLKTYADGAWTRIARITIEVNRDVRELSGMTAQEQAKLQGQQLAHFKGVAKKLAEAYEGLGVHVGPGLIRKGRIAEDLGWTCPYTGKGYDALDLLHRRVDKDHIIPRSDRASDSLDSLVITFSEINKMKGKRTAARFVEEFQRQPVQGLPQVMIKPLSTYLKDVEALETFKGHDDDQRRKKNRKRLLLLRDYVEKEFTPGDLTQTSQLVRLGAQVLQKHYIGAEKQPIITSLPGSVTGAVRKSWNLIGCLAPANRQVLNPDDLDEDGRPKVRTKTEIRGITHLHHALDACVLAFASHFFPRDGGGWELLVKRRLNAEEERRARTLFGSHIEITKDGQLRLADLAKLAPYLQAQVGNRLKERRVVQHLPADLSGLRCKETVWRVFDPADPHHNSRRLARWLAQKKVSIPSPDAKTALIICRKRRAADVAGEESAGGKVFRETKTWRWIYDIKDKTALLGLAPEGDAAAAKLKRIKAVKVLGDNFGLALDPEPTLIRPHKVWHQLAALRQRNGGKTPRLLRIGTIIRVTEKGPRSDYRGTWMVRGMSFKQRDGLVLEIAPPDYVQSRRVPGVFESASVTTLLKCGLEVLKAPLCGVATILA

SEQ ID NO: 2017 - protein, 1108 aa, unidentified
  REGION 1..1108: note = Description of Unknown: Cas Enzyme sequence
MKKLLFSFDIGHASIGWAALETTLDHAPELKGCGSVLFPTDDCLASTRRQLRRQRRHIRSTRTRIARMKKLLAHLGVLTMAQLDEPGGPWPWKLAARVHAGGALLSWVELWDVLRWYAHNRGYDGNRKWSRDDEEDSEDTEKEKAARALMEKLGKPTMCQTICAKLQIDPLSSDKKTSSIAYKTSNAAFPRDIVLNEVIDLLVKHVGKLPQVTPALIIALCAEDNAPKDGKTVREVLTQLGFDARLPGRFVGGLLFGQAVPRFDNRIIGECPVSGDKRPLKNCREFLEFRWAEILANVTVRRSKDGDKEPLTVEQRAALTMTARSAGGFTAGEFKKAVLEVSGASFSNADLMMTHPDAEEALVLDPARRFVRTNGMMKVIWDDLPEVLQKRLLGRWNKHRRVTWAWLLGQPEAPKTLEAKLKAAWQETKRKPRKGDAEPTWEDRVKQSLSPNFASGRAPYSRTVMMQAAEQAHQGKHPREAGGVLEITEDRKERERQKEIDELTNNHLVRHRLKILLRLVEDMVKTYAEGNPEQVDRCVIEVARDLVEFSGKTNKEVAQELGIKLKNFKDVSKKLTSDLEGTTIPIGAGLIRKARIADDLGWKCPYTGESYDAVTLARGKVDKDHIIPRSQRPSDSLDSLVVTFAEVNKWKGNRTAWRFVEEEQGKQVPGRPELSIMTLRQYEAFVIKLAGEKKPNRFTPGQGSHDDKLRIWSRKQKMLLKDYEEKEFTPRDLTVTSHLVRLSARQIEKRFAHLRDSGRIISIPGSVTGSVRKSWDCLGCLAPACPEVMEMRPTMDKNRQLILDDEGKPSLSLQVRPKGDIRDITHLHHALDACVIGYASILLPNNGKLWEQIVTKKVRPNERAAFSKLHGWNKMLKLSSPTDSPNENTTLKLHVDDLPADYKKQIVDRLKERRVVQHVPSDMSGARLEMNTWRVVKTDGDQVTLRQRTFGPKDIDPETGVRKRTKKEAKERASKLVGLKEGKLSALKGALVIGENYGVALQPEPTMIAFHQVKKQLEALRVKNGGKPVQVLRNGMLLRVAEGDFAGVWRVRSCKNDASKGLLLDLTFADSVPPQAAKVNWCRRDVRLRSLMKAGLTILDSSYCGTPS

SEQ ID NO: 2018 - protein, 1471 aa, unidentified
  REGION 1..1471: note = Description of Unknown: Cas Enzyme sequence
MGNRADLELAFDVGHSSIGWAVLKTQPELEMKGCGTVIFRPDDCLASKRRDYRRQRRHIRSTRLRIERMTNLLLGIGAITQSDVESGKKQHKGEPPPWLLAARVLAARTETEKAKALLTWPELWKVLRWYAHNRGYDANVRWSGESKVEAFSPSPQINTEDVEEQAVEAEESELADVEVAEDSDSDSDKLRAGKHLMSSKYGFHTATFAETVAKILLGPKRDVKPGQAGKTGKLAETTESFSESDFRKLLFDTPTESWSHPRHLSIYFKGIRAAFPRRIVKVIGGQRTLVGGTEWEVRAILRAHFDAPKGKALCDETFEAAICGRLPETREDWRAYAETHPTLYLSSDDQAKLRSLRAPPKASQEKSERIRQQRRNILTGKLFLPSRYEGGLLFGQLGTRFFNRIISRCPFSFARIVAAILSGDENTLRLYGTTLAAVNRSRHSRNGVMETDLDLARRWAAKLSKVPAAKSREFLLYRWAMTLANVIVARPGRERLTGYERRCIHRRLRRTGYFTKDSFKEAVRQTTGCEPANLDQMFDTTTEAENSLFIDPVRKYLATNEVAGVVLPVLSQFLQVRLARLLQKGKGVRVREIAEWLDETAKRELSQRIEQYVQENNAKAKAAKKKPHDTHSPDEDRRKKQNKLTAAAVLRVRLEAPLPKGRASYHRVVLRKAVAEVLKGFDPRKPKRDRSNPDGENKPSHGCLFRTPETNRQLLGNPNNEAEYERWKQRWLSHQKNYQRYIARERLSPGSGEAFVRSEYHAAQSYRWLASQSNNHIVRHRLTILDRLLRDIIADQNYCAGDPKRIRRISIEVANDILTFSGLERKQLSGQVMPSLREHHDHVVRLLQQELKGTQWENKIDGELIWKAKIADDLGWWCPYTGKKYSPCELASGEMDVDHIIPKSRRLTNAMSAVVVTFKTINNLKGDLTAWEFVERYQDQPVGPHGEKVRKLWDYERFVKNPDNEMDKPRLSGETGHSDYPRWPKYLPGSRRKLHPDYVRRKLRRRYLLLKHYEKDKDTFTPRDLTITSHLNRLAQQVLLRSLPHLAEHQITAIPGSVIGVLRDAPGWRLLGCLDGAATADVIRKVLQLDHEGKPMCASDVAPLMKRIPKPKGEIRELTHLHHAVDACAIAIINHLLPKDGKLWELVAKRELTDADKNAYDDLRQKNQSQWQPRRLARLFSIVPNLDDKGQQPKHDHKWRIRPCRLKDVLPDIGAQVNKCLRERRVVEHTPADMSGLAAEETVWRIFDPSDNHPSARRLKQWFEKKIKDGEIQKLPDPTNEADKTVLIVCRKRRDAKSNDKGKTLHDTGNVWRWVYDEVNKVRVVGLNPGKLHRIKAVKLIRENFGIALDPEPTIVPFHKVWQRLMELKAKNGGKMPRVLRNGQLIRVLSGSRAGLWRVTSVKQTEAYGLVLDLAYPDSVHLSRPNAPVEQLLKEGLEILKHSLTGYDASVVAYAPVKRRPRKPKAAQSEQ

SEQ ID NO: 2019 - protein, 1107 aa, unidentified
  REGION 1..1107: note = Description of Unknown: Cas Enzyme sequence
MIASPKSQDLQFAFDVGHSSIGWAVLQTESAKNSLNLLGAGAVIFEADDCLASKRRGFRRQRRHARSTRQRIARMEKLLAHLGVLSAADLKAKHRQAGGDPAPWLLAARVLASKDGVQPSPLTWVQLWDVLRWYAHNRGYDGNRRWSNDAVEESAEQKEDTEKVNNAIALMDEHGTRTMAETFVRVLELDTHGPKKSSRVPFKAKNAAFPRAGVEGEVRRILEAHRGKLPQLDDNFVRLLLVSRLAKNDREQLTAIGIKLPARYDGGLLFGQLVPRFDNRIISECPISGEKVPARNCREFFRYRWAMQLANIRVASASDGALRPLTIDERKTLDGKMRATGYLTKPGLQEAVRTLPGVARDNLDALLMHPDAEEALLLDPILAKINRTRDGNLKKLWPLFSSRVQKRARDAWERGKTLKISDLLAIAGKLGEPTVSFNDAITRILDAANTRKRKKDTPLSRESLLAEKTSIKKETGRAAYARPLLVRAAEEVMQGKHPKEEGGCLYLGEQIRRAQLNRSLEEQTNNHLVRHRLLILERLLRDLITDPQFAAGDRNRIARLTIEVNRDLREMSGKTAKEIEQDLGLRLSNHGKVVEYLEAAFREQTFNGKPVEITAGLIRKARIADDLGWQCPYTGQTFEPIDLVTRRVDKDHIIPYSQRPSNSLDSLVVTFSEINKRKGARTAWQFVEEEQGKPVPGMPNLSIRSLTEYKQWVEGLESFKGHGDDKRRKKNRKALLLLPSYEDKAKTFLPGDLTATSQLVRLGAQILTKNFADMSKPPPVISIPGAITGEVRKSWNLLGCLSLAAPDILEADGHSTKIKSDIRDITHLHHALDACALAYTSVLLPRDGGLWELMLKRNPNQAETAQLIATDCFERDAQGRTRLRELRNEYKEQISRRLAEKRVVQHVPADMGGMRAEENTRGIVRVEDDRVYLRQQSRDQKTGEIKIKETDEPVTKVVGLAPEKGEGKLRPMKGVRVITHNFGVAILDHVADTEERFAIIPWHKVWWRLGKLAECNAGKHPRLLRKGMLIRIPEGKYPGIWMVRGVKNDAKMGIVIDISFPDRIAYNLPGRRDCKRNVSLKTLMRDSLEILDTKLTGLPIAQTPTAK

SEQ ID NO: 2020 - protein, 1110 aa, unidentified
  REGION 1..1110: note = Description of Unknown: Cas Enzyme sequence
MKNTTQNIQLAFDVGHNSIGWSVLKVQGEAPEIAGCGSVIFQKDGCLATIRRAYRRQRRNIRATRQRITRLKQLIFSLGVLSHDQLNGVSSSSPWHLAAGVLEGTRKLDWPELWDVLRWYAHNRGYDGNRQWAANGTVEEEEDTEKVENARGLFAKHGTTTMAQTLSAELELDAKGGKAASRIRFKGLNAAFPRESVTAEIRAVLDAHKGLLPGVDDAFIRSLIGKDHSDRDAWKAVPVSGLKIPNRFHGSLLMGQNIPRFDNRIISRCTVLFDRILQQKLDEGMDRESAEAEAQKLSKVPSKKVPEFLQFRWAMLLANVLVTGVDGKSRSLSVDERKAVHLKIRERGAFTPTQFKLEVMTATGAIRSNLEEMLSHPDADKALVFDYVTRETQRGTLGLIWPVIDDLNKTRIKRLLRDGKTITIRDVVAGNDSAISALQNSLTASATRKTTAKSRTASKSLDELLTETVCIQPINGRAPFSRQIMKEAVADVMERGIHPTMEGGVLYRGESIRLAQVQRKLDDQTNNHLVRHRLLILERLHHDLLEEYAEGNPDLVERITIEVNSDLREMSGKNAKEAAQEEGLKLADFKGVTKLLEAQLDGQSIQITAGLIRKARVAHDQGWKCPYTGKDFDVLDLVHRRVDKDHIIPRSLRQSDSLDSLVITFSEVNRMKGQRTAVAFIEEFGGKVVEGRPELSIMSLASFEEGVSKLDTRRGHDDDKRRKKNRKRLLMLKDYVDKEFTPGDLTRTSQLVRLGAQLLERPYLGSSKRPVITSLPGSVTGAVRKSWRVLGCLSKANPAVTAESTKTDVRSITHLHHALDASVMALASHFLPRDGGIWELIVKRKLSPNDQQRLLDKGRQFARDSEGRVSLIDLPTFLKNQLSDRLAEQRVVQHIASDMSGLASEETVYRVLDPNDPHPSAKKLMKLCAARGVEVPDAREEVALIVSRKRRSPIESGDLLHETPTWRWTYRIEKKSKLLGLESKEPTPGKLKSLKAVKIIGENFGLALDPEPEVLQLSSVWKRLRELKQAHGRPVRILRNGDLITLSSANVPEQRRGNWRVMSVKNNTTGLALDLARPDETKATWINTLVQSHLKNGLKIVDARLSGVMK

SEQ ID NO: 2021 - protein, 1113 aa, unidentified
  REGION 1..1113: note = Description of Unknown: Cas Enzyme sequence
MKIAIQNLQLAFDVGHNSIGWSVLEVGGEGPDIQGCGTVIFEKDGCLAVKRRTYRRQRRNIRATRQRIARMKRLLFQLGVLSEYQLDSVTSSSPWLLAAGVLTTGRNLTWPELWDVLRWYAHNRGYDGNRGWADNSVHMEDREDTEKVENARGLYDKYGTRTMAETLCAELSIDLASGKLSSIKRFKGLNAAFPREDVMDEIRRILAAHRGVLPAVDDALIRTLIGNGPADTDAWKTIPVEGMRIPLRYRGSLLLGQLVPRFDNRIISRCPITYQRVLVEKLDEGLEQSEAEREASKLSKVPSKNCIEFLRYRWAMMLANVVVGGIDGKMRTLSITERGEVDREMRLKGKLTPTQFKFCVLSVTGAVKSNLEEMFTHPDAGESLVLDEATYKTQQGTVALIWSSLDGAMQKRIQGRMREGKQISIAEIVQGNEALLEALRQSLHSISGRKVSTKKEVNSLENLLAEIVSIKPIIGRAPYSRTVMKEVVADVMERGIHPTAEGGVLYRDEAIRLAQITRRLDDQTNNHLVRHRLLILERLHNDLIAEYAEGDIERIGRITIEVNSELREMSGKTAKEAAQEEGLKLADFKSVTKYLEEKLVGTGITINAGLIRKARIAHDQGWKCPYTGREFDVFDLVHRKVDKDHIIPRSIRPSDSLDSLAITFSEVNRMKGQRTAAAFIEEFGGKEVEGKSELSIMSLGPYQEAVKMLDERRGHEADKRRKKNRKRLLLLKEYVEKEFTPGDLTRTSQLVRLGAQLLSRPYLALESQPTITSLPGSVTGAVRKSWRVLGCLTQANSQVTNETTKTEVRSITHLHHALDATVLALATYFLPRDGGIWELIIKRKLTSAEQEHLLAKGRQFARDSEGRVSLIDLPTYLKNQLSARLAERRVVQHISADMSGLATEETVYRVLDPRDQHPSAQKLRKWCALSGVEIPDPKDSQVLLISRKRRGESESGKLPKNILHETKTWRWTWQHEKRSKLIGLEQKDGENGKLQSLKAVKIIGENFGLALDPEPEVIQLSNVWKRLREVRQQHGRPIRVLRNGDLITLTSPDVDEKRRGLWRVMSVKNNSSGLALDLARPDETQSTWINTLVQSHLKNGLVTISTSLSGLTR

SEQ ID NO: 2022 - protein, 1113 aa, unidentified
  REGION 1..1113: note = Description of Unknown: Cas Enzyme sequence
MINTTQNLDLAFDVGHDSIGWSVLSHKGDAPEIKGCGAVIFQKDGCLAVKRRGYRRQRRHIRSTRQRIARMKSLLRSLGVLDESALDEVSSSSPWFLAAGVLAGSRSLTWPELWDVLRWYAHNRGYDGNRGWATNDIPEDDEDTQKVENAKGLYGKHGTRTMAETLCAELGMDPQGEKASSRIRFKGLDAAFPREDVTAEIRRILEAHKGVLPRVDDMLIRSLIGKSHDDHEAWKAITVEGLKIPLRYRGSMLMGQVIPRFENRIISRCPVLYQRILQKRLNEGWVREEAEADAEKGAKVPAKSAVEFLRFRWAMLLANILISEPRGKARSLSVAERSAMDQKMREAGSMTATEFKKALIEVVGPLKSNAEAMLTHPDADKALVLDATMREIRKGAFGIIWDHLDEQTRKRTLGRLRHGKSVDLAGLVAGNQKAKEALEQHVSKASMSKGKGAKVAKAPITLVSLLSETISVNPPQGRAPFSREVMSEAVADVMERGIHPTAEGGVLYRGEEIRKAQVERRLDVQTNNHLVRHRLLILERLHKDIIEIYADGDPGRIGRITIEVNSELRAMSGRTAKEIAQEEGKKLADFKVVTKELEKRLEGTGVTITAGLIRKARIAKDQGWRCPYTGKDFDEMDLVRRKVDKDHVIPRSLRPSDSLDSLVITFSEVNRMKGQRTSLAFIEEFGGKPVEGRPELTIMSPASYQEAVKKLDERKGHDDDKRRKKNRKRLLLMRDYVEKEFTPGDLTRTSQLVRLGAQLLERPYKEQERRPIITSLPGSVTGAVRKSWRVLGCLQRANPLVTDGMTKTDVRSITHLHHALDASVLALASHFLPRDGGIWELLVKRKLFPSEQEHLLKKGRQFARDSEGRVSLMDLPSYLKNQLGERLAEKRVVQHIPADMGGLAAEETVYRVFDPKDTHPSAKRIAKWCAARGIKIPDPKDEEVLLVCRKRRSEQENGDVLHETPTWRWIYKTEKRSKLLGLEPAGGSNGKLKAQKAVKIIGENFGLALDPEPEVLQLSSVWKRLSELRKQSGRRIRVLRNGDLITLKSPEIPEKRRGIWRVMSVKNSKNGPSLDLGRADQIGVTQQSWREVRVSSLLRDGMRIVKPRLIGGS

SEQ ID NO: 2023 - protein, 1095 aa, unidentified
  REGION 1..1095: note = Description of Unknown: Cas Enzyme sequence
MSASVKPPRVEIAFDVGHSSIGWAVLGTNESSPPGVLGCGAVIFEKDSALANTRRRHRSQRRHVRATRQRIARMEKLLVHLGIFTATELAAKHQANGGSATPWLLAARVLASDGAHTLTWPELWDVLRWYAHNRGYEEITGEIREQTEESDEKKQDTEKVENAKAALAQFGKNSMAETICAWLGQDPLGARTGTTENYKAKNCAFERALVDAEVTRLLASHLGKLHGVTEALVAAIILDARAIAVPSIRLPLRYRGSLLFGRLATRYHNRIIGLCPISGEKIPGKNCPEFLRYRWAMQLANLRIADAADAALRPLTANERSKIHAFMVAAGSLGVRELKEAVRALPGHARDNLEQFLLHPDAKEGLVLDPTQKLIVGSPVVAAVWPHLPERLQNRARGRWRRGKSTSLAKLREEALQLGHNCAAFDVAVEALCAPPKKPSKKTPPPVKGKLLHDPIDARRELAKLSGRAAYARPLLAKAFDEVMAGRDPKATGGCLEETEVVRRRREALPLPQQTNNHLVRHRLQILGRLLNDLIADPAYGAGEPARIKSVTLEVNRDLREMAGLTAQDIAKELGQRLKQHGDAVQWLEQDPQVAPKISAGLIRKARVALDLGQCCPYTGESFSPIDLVTKRVDLDHIIPRSLRASDSLDSLALTFSAVNQWKGKRTAWQFIQDEGGKPVLGASNLSIMTPARFKAHVESLNTRGHLDDHRRKKRRKEFFLLERYEDKERTFTPGQLTQTSQLARLAAQVVREPFARLPEPPRLVALPGSVTGAVRKAWDMLGCLSTAAPGVLETVKLADGTEKQEVRTKTEIRDITHLHHALDACALGLAAHFIPNRGDVWRLLSERRLDSAQRAELAALDLFDFDERGQFRLRDLAPELKEQIRHRLAERRVVQHVPADMSGLRVEENTRGILRRENGRVFLRQRKKNADGQVVVNHTEESEGKVVGLPRADGSGGKLAALKGVRVIDGNYGVAILSDVKLPANERFIVIPHERVWKRLKELSLRNGGKKPLVLRNGMHAVVPRGRYQGRWMVRGVKLNQRSGMLVDLSFPDFIKYREPGRAESRQNVSLSTLMKDGLHVIRTHLSASERVSA

SEQ ID NO: 2024 - protein, 1086 aa, unidentified
  REGION 1..1086: note = Description of Unknown: Cas Enzyme sequence
MTASTNPSPLDLAFDIGHSSIGWAVLATPDAAPPAVLGCGSVIFEKDSALANSRRLHRSQRRHVRATRQRIARMEKLLVHLGVFTADELRLKHRASGGSATPWLLAARVLASDGAQTLTWPELWDVLRWYAHNRGYEEITGETSDETEESDEKKQDTEKVENAKAALAQFGKNSMAETICAWLGQDPLGPRTSTTENYKAKNCAFERAFVDAEVTRLLASHLGKLPGMTEALVAALILDARAIAVPNIRLPRRYQGSLLFGRLATRYHNRIIGHCPISGEKIPNKNCSEFLRYRWAMQLANLRVADSADTPLRPLTVAERKILHDAMMHEGALTPGELKKLVAALPGRARDNLEQFFLHPDAKEGLVLDPIQKLIAGDSRAVAVWPHLPERLQKRARGRWRRGKATTLAKLRDEAAKLGHDCTAFDAAVDALCAPPKKPSKKTLPPTRDELLNAPLDARRELAKLSGRAPYARPLLAKAFDEVMAGRDPKATGGSLEETDDVRRRREARPLPQQTNNHLVRHRLQIFGRLLADLVADPAYGADKPSRVSRITLEVNRDLREMAGLTAQDIAKELGQRLKQHGDAVQWLEQDPQVARKIGAGLIRKARVALDLGKRCPYTGEEINPIDLVTKRVDLDHIIPRSQRTSDSLDSLALTFSAVNKWKGQRTAWQFIQDEGGKAVPDAPQLSLMTPARFKAHVEALNTKGHLDDYRRKKRRKEFFMLERYEEKARTFTPGQLTQTSQLARLAAQSVRQVLPHLEPHDLVALPGSVTGTVRKAWDVLGCLSAAAPGVLETVKLPDGSEKQEVRTKTEIRDITHLHHALDACVLALAAHFIPNRGDVWRLLAERRLDSAQQAQLAALGLFDFDARGQFRLRDLAPELKDQIRQKLAERRVVQHVPADMSGLRVEENTRGIIRRENGRVFLRQRKKNADGQVVVNLTDESENKVVGLPCINGTRGKLAALKGVRVIDGNFGVAILDNPALPPTDRFVIIPHERVWKRLKELRARNSGKRPLIWRNGQVIELPKGARVGRWRIFSIKNNTSGMALDLGTVEAVKPTWINCLLKSLLRDGARCIAATLVGSERPTA

SEQ ID NO: 2025 - protein, 1091 aa, unidentified
  REGION 1..1091: note = Description of Unknown: Cas Enzyme sequence
MNANKKNSVEAPAPATLKLAFDVGSSSLGWAVLDTSGDAEIKGCGVVIFRANDCLASARRAYRRQRRHIRSTRQRIARLKTLLESLGVLARQDLDRPGCAWPWQLAARVLRGGKLLTWPELWDVLRWYAHNRGYDGNRRWSAGDADACAEDTEKEENAKSLMERHGVHTMCETVCLELKVDPLGAKRASTVWFRGLNAAFPRGTVEAEVRRIIRAHFNALPRVNPDLERALLGTGPGDKSAWKAIRCDPIKVPKRYEGGLLFGQLVPRFDNRIIARCPISGEKVPSRNCREFLDFRWGMQLANVRVARAAGREMTPLTAAERQQVHATMRQQGAMGVEEFKKSVRTAAGALRDNLDELLMHPDAKEALVLDPVQKLIQAPGVRTLWPLLPSRIQKRARGQLHRGKTVTLGRLRAQAQEIGADLAAFDAELDRLGGLAGGKARPGGGGSPKNDLLDKALAARGLAQRAAFARPLLSRAFEEVMQGRHPKEAGGCLFMSEAVRAAQLARGTADQTNNHLVRHRLLMLERLFGDVVREYCGGDKARIGAITIEVNRDLREMSGLTAEEKASEMGRRLANHRSVSERLENDASLKAVLQQGGTRITAGLIRKARVADDLGWTCPYTGQKFEPVDLVTKRVDKDHIIPRSERASDALDSLVITFSAINKWKGKRTALRFIEDEQGKPVPALPNLSIMSVTRYRQLVGGLESSGGHEDDKRRKRKRKELLLLPAYEEKSFTPRDLTTTSQLVRLGAAALRKALPPGVGQVPVISLPGSVTGAVRKAWRVLGCLGLAAPRVLDESGETRTKDEVRDITHLHHALDACVLGLASHYLPNHGRVWELLVKRKWTPAEQEELTALGLFLRDSEGRFQMRDLSPGLKEQIRQRLAERRVVQHVPARMDGLRAEQNAWRVVSVAGDTATLRQRVRAADGSRPPKETQEKVVKLLGVAPSGAPGKLKTNKAALVVPDNFGVALTTPNPVVVPFHKVWPRLAELRLASGGRMPRVLRNGQLIRVPGTGRFSGVWRVFSAKNNAGGIALDIGLPDAVKLKNKTEGHKINVRLASLLKEGMEVLRTPLTGANTCPTTSSTSTRRSAR

SEQ ID NO: 2026 - protein, 1070 aa, unidentified
  REGION 1..1070: note = Description of Unknown: Cas Enzyme sequence
MIKAMPSQAVSSHKEGSLTLGLDIGHRSIGWAVLKKEVQEATPEVLGCGTVIFRGGDCLNSQRASLRRSRRNIRATRSRIRRMEKALAHSGVLPQEQFDRLHAAGKGDPAPWWVMARWLTGVIPSLSPGEFWQILRWYAHHRGYDANRRWIKEDGEEDSKRTEETRKEMAKAGANTVAEFLCLKSGCKPSDRQPAFGKAFRGSKDSVLFARSTVEAEVRKMVDAHIGKIKGLDANLRNTLVGEADGSWGSTAWFGDKRLPKRYRGSLLFGQLIPRFDNRIISACPFEPEPNNKEVGRKVPSKANWEFLNFRWAMTAANIRIRVAGMERALTSDEMKKFFQACWDEGDIKPATGKDSKIQKNSDKLRAILKKAGLDFSSGDNLDQLVVLPDSLKAFRLVPIGSGLKAFRAIWACANDFQRRWLRNRLLKGDELTPAEIFAKPQPIFVEWKRNAATQTLFQGKDSVLLNESFKGEVPDGRAAYSRPILIKAFEEVMNGKDPREMKGCLFRQGETALEAAVPLDRRTNNHLVRHRIRIAEKLRKDIVKEYAGGQAKAFGQVVIEINRDLPSLSGKNAKEVASAESAKLKNFNDVKKQLESSLAGHKVHMTAGLLRKARIASDLDWTCPFTGQKYSAVELVRGVYDKDHIVPRSSRVSDSLSSLVVTKREVNKFKGNRTGLQFVKEEGGKKIPGTSLSVVSEDRYRSFVENLQPPTRMKDDVRRSDIRKRLMLTAHAPKVDDVGFLPKDLTQTSYLAKLALQELRKGFAADGAKVDVRPLPGLVTATARKTWKLLGCLVPACPEAKDAAGSNDKQAIRKLTHLHHALDAVVLGLSGLLLPREGNVLAALAARNQDEPSRRLLKSKMGEMIVISEDRAQLADLPKVLKDSIGAKLAEGRVAQHIPGTWSGTKSGPTMWGVVEKNEGRVTIRQRNKGMSSTSKTDNKGEWKSLVVPLESVIESSSLSGVLRIEENYGVLLSNPPEILPWNCVYRRLRKSKGLRVFRKGNLLNIPKGRYAGIWCVAGLTLNTKSGILLNLRKPPATDESYENVSLKTLQNNSMEILSSKLTGCPITL

SEQ ID NO: 2027 - protein, 1076 aa, unidentified
  REGION 1..1076: note = Description of Unknown: Cas Enzyme sequence
MNSSETLQCLPPLKIALDAGHSSIGWAVLSCPENADYDILGTGVVTFEADSALAITRRGHRQQRRHVRATRQRIARIEQLLIQQGAMTPKAITLKHRANGGNVAPWLLAAKVLATGGKDTLSWPELWDVLRWYAHNRGYEDMTAGGKDVDDDDTLKVEDGKRALAEYGTHTMAETVCKMLGQDPLAPRTGTTVSYKRRNCAFERPLIASEVLQILAAHLGKLPGVDEALVATLMLDARAIPLPGVTIPKRFHGGLLFGRLCLRYDNRIIRTCPITNQKTPSKSCSEFLSYRWAMQLANIRITTLSSPSRPLTADERCAVHAAMCARGHLGVKDLKKAVRDIPGVTNDNLDQMLVHPDAKDALVLDPVKKLITGNREVSGIWPTLPVQLQKRLAGQWQKGKAATLAAIGKDMVALKHPTGAFDRVVDELFASLPKPRGKNLPLNREQFLTQKLSAREAQAKLSGRAPYARHLLSKALDDVLAGKDPKASGGALEETGSVKERRSDLPLDAVTNNHLIRHRLQIMERLLKAIIADPAFGNGSPDRFTHVVIEVNRDMQTMSGLTAKQIESELNDRLRGHKRVSEFLAEALPPGTPITASLIRKAIIADDLGWCCPYTGAHFDPIDLVSKQVDKDHIVPRADRPSDAMASLAITFSTVNRMKGKRTAMQFVAEFAGRPVEGEPGKTIVTPKQFEAFVNGLNVKGHEDDRRRKKARKDWFLMANYTESERTFTDGALTQTSQLGRLAAHAINRVFKDTKKFPQVVSLPGAVTGAVRKAWKVLGCLSLASPSVLEPDGTLKTKTEIRDITHLHHALDACVLALTAHCIPNRGNIWKLLCLRRLNELQKAELSALGLFDFNQDGHFVLREMNDRIKEQIRHRVAERRVVQHVPADMSGILVEANTRGIIAITDGFVHLRQRGGYDPKTGTYATKAPTKEPVGKVIGLNAGSKLAAVNGVRVIEGNYGVAILDDTKLPPDERFVIIPHERVWQRLQDLKARNGGKKPMILRNGMLIDVPTGRYQGRWKIRMITKNMKLGILINMSLPDYVMGNVSGVSECKMQVNLASLVSIGITQVPGGLLG

SEQ ID NO: 2028 - protein, 1067 aa, unidentified
  REGION 1..1067: note = Description of Unknown: Cas Enzyme sequence
MPLLNFAFDVGHSSIGWAVLSAAQNSAPSVLGCGSVIFEKDSALAKSRRLHRQQRRHVRATRQRIARLERLLVHLGAFSAEELARKHSANGGSPTPWLLAARVLASNGEHALTWSELWDVLRWYAHNRGYEAIGADEDEAENKEKRAHAREAMERFGKNTMAETICAWLGQDPLAPRSGTTESYKAKDAAFDRAVVVDEVRQVLAHHTGKLPGVDDAFVRALLEDAHAIVCPDIRLPRRYRGGLLFGRLATRYHNRIIGRCPISGEKLPLKDCPEFLRFRWAMLLANINVASASDQSLRPLSKEERSALTQQATTKGYFTPGEFRKTVRALTGSVRDNLDQMFMDATAAENLVLDPALRLVSTNRWIAAVWPHLPEIVQRHALNRWRRGRSQTLGKLRDEAIRRGADISAFDAAVAQLCSVPEKRSGKKTPTPPPTAAQILTTSFTVPPLGGRAAYARPLLLSTYQQVMSGTVHPRSEGGCLFETPELRRARDNRPLDQQTNNHLVRHRLQILGRLLQHLIADYAGGDASRVQRITLEVNRDLRAMAGLTAQEIAKEMNERLRNHAQVSKRLLAELPQGTKINASLIRKARIADDLGWRCPYTGHDFEPIDLITRRVDLDHIIPRSQRPSDSLDSLVVTFSEINKWKGKRTAWEFVRAEETKTVPGLPNLQIKQLSRYKQDVEALDKRGHLDDQRRKKRRVEKLLLERYEEKAGGFTPGQLTQTSQLTRLGQQVLRAPFAHLPSPPTFVALPGPVTARIRAAWDVLGCLAEAAPAVLEKSVDTEGNERIVVKNKTEIRQITHLHHALDACVLGLAAALIPNQGDVWRLLLERRLNTEQRGALEKLDLGDFDANGGFRLRDLPGDLKQQIRDRLAERRVVQHVPADMSGIRVEENTRGVISRENGRVTLRQRKKNADGKIVTNCTTELETKVIGLNPDGKLSKVRGVRVIADNFGVAILDNPEIPPAERLVIIPFARVWAQLGALKQRNGGKPPLIWRNGQVLKIPAGPRAGLWRIFSIKNNASGMALDLGTVETVRPSWINVLLKSLLRDGALRLNTDLTGRAFPQD

SEQ ID NO: 2029 - protein, 1081 aa, unidentified
  REGION 1..1081: note = Description of Unknown: Cas Enzyme sequence
MSGKEAHLTFAYDIGHSSIGWAVLEGKSGNAEPELLGTGVVTFPADDCLASQRRTFRRQRRHIRATRQRIDRIAKLLNHLEVLTPEETSKRGNSSPYLDAAEVLNGVKHLTWFELWNVLRWYAHNRGYDGNKRWKRGEPEEDAEDTEKVANAHQLMRKHGTDTMAETVSAALGLKLGSNRRSSQRGYKTLNVAFPREIVVNEVRKILELHEGKLKKIDRDFIETLIAPDNSRAAAQAWSRISVPEIHLPKRYTGGLLFGQLVPRFDNRILTRCPFSGEKVPAKACMDYYRFRWAMILANIRVDGAPLSSEARKDIDQRMREKGRLTKSELAKAVEEATGSNDHNLKTYFGIHPDSEKALEVDPARAMAYSGENKRTGLYPFWNELSESVKERAINRWKKNKPVTVGWMIEAMEQTGENTEGLEQVVETEWNKRGKGKKKSSYLTRDHVYRKPFVPSEISGRAPYSRAMMKATTDFVLNTNRHPSEKGGPLERTPELLEREQKRHIDDLTNNHLVRHRLKILKRLTSDMVRSYAGNDPDKVKTVVVEVASELKEFSGKTTKEIESELKGKLKDFNDAVKYLEKKKVPNISGSLIRKCRIAQDQNWTCPFTGQKFDPHNLTHMEREHIIPRSIMQTDAMYALVLTYPEVNRMKGNRTARRFIEEEQGNLVTGRDNLSILTSRRYENLVDKLPTKGHPQDVSRMKKRKQLMTVMDMQERETGFTEGSLTQTSQLVRLAAAQLSKNLPSIDPHHVISFPGQVTAIVRKSWDLLGCLSAPEVCGDRVKDKTKTEIREITHLHHAVDAITLAYASFYFPRNASWEGATQPGALWRAMVARNPTEDQCLLLERCALFYSRPNRSGRKRYELEDIPRTLKAQAAERLAEKRVVQHVPADMHGMKAELNTWGVMDIDGDPKNPNTRVSIRQNTIQEVVDSTRIRKKKTETEKAGKLLGLNPKNGTGKLKDINGVLVIKSNYGMALDPEPTIIPFHKVWHRIQNLKELNGGQHPRILRNGMLIKISGHSEKRDGIWKVFSVQSSLKIDLGKPDLIKRESKGIQVWREVKVDTLLKKDCLEILYYPFTGNPS

SEQ ID NO: 2030 - protein, 1090 aa, unidentified
  REGION 1..1090: note = Description of Unknown: Cas Enzyme sequence
MENYLSLTTSFDIGHSSIGWSVLSGDGLETKVVGAGSVIIPSGMALANERAGNRRMRRHIKATRERITLLGKYFVHRSLIPASEAEKQAAAGHNQPWLLAARALRDYQTLTSQELWHVIRWYAHNRGYDGNAAWARAEGEDKEDTEKVENAKKLMQSFETASFAETVCAFLEIDITDPAKRSSRKYFKGESVAFPREVVIAEVRKILQKQRGIEPTIITALLDDKEADATFQHGLPPRWKGGFLFGQKIPRFDNRIIPVCPVTGHKKPLKHTPVFFRYRWMMLLRDLRVYVISTGESRPLTAEEIARIDAWGQTAGRFTKTSFKDLVETITECEAPQLDQRFMTEEMTGALEVEPVKATILKAFKLGKKLPALEAIADLWRVIPAPLRHQLFRQADRQTGTISIAEIGQRAQAFGITADDFEKTIATSLETFHPRRTKSTPTCEEVLATRIHIKRESGRAPYAKSVLRKAVAQIGEGKDPRAVGHALHIPPERMEELAATPIDHLTNNHLVRHRLKVYQALLSDVRRNYEKEGTKIARVVVEVVRDLTEFSGLNAKEKESLLKSKTRHHKKISEWLENQLKELGKESQFSAGLIRKARIGDDQGWLCPFTGHALDLKMLLEGQLQLDHIIPYSQRPSNSLDSLVLTFREVNELKGNRTARTFIREAHNTEVTVLSGSNRRIVQIMTEDRYEKLVRKMRASVPTDDDKRRCKRRIELLLRADYDKREREFTAGDLTQTSHLNKLAAAVTHRAFQDREKADRPTLIHLPGGVTGAVRKSWKLLGTLATAVPTVLLNSDNPAQGTKSKGEVRDITHLHHALDAIIAGLAATRLPRDTTFYRVLLARRNKPEEIERWRRWVNVGKNHKAYLPDLSAHEKNAITAILAEKRVVYHQPRSMRGMKTEQTTWRVEGPMENGKISIHQRTEIDTTGKGQRKIGDPRRRWKHDAEWPNKLLGYHPPIVRGKLAAIKGAIVISDNFGLALDPEPSVIPFHQVYAHLKELTQANEGKRPRVIRNGSLIHLRSGKNPGIWRVLSVKNTEAFGLALDLIAPERIKIKGMKKADGFIGNAMITTLLRSGLEIVAFDYCGFRQDD

SEQ ID NO: 2031 - protein, 1089 aa, unidentified
  REGION 1..1089: note = Description of Unknown: Cas Enzyme sequence
AFDIGNPRQPSLDGCGTVIFPADDCLASQRRAFRRQRRHIRSTRMRIARMKEFLLGLGVLSQAEVDEPGGPAPWKLAAEALGNHRVLSMRELWDVLRWYAHNRGYDGNRQWSQSQAADPDDTEKEKNARDLMVRHGTATMAETICARLQIDPRSSSKASPIRAYKTLNAAFPRDVVVTEVCRILESQSSRFSFIDAAFVEAMCAEDNTPREGLTVRDRLAALGWQRELPSRYVGGLLFGQTVPRFDNRIIGVCPVDGGKLPLKACREFREFRWAMIIANVRVSDGAAGTRSLDVPERAALTTSLRRSGSLTAAQFRKEVATVTKQGEGNTAAMMTDPNAAESLVLDPPLAYVRSNTEMKVAWPQLSESLQRRILARMNRQKGITWGWVANQPGAPPTLPTAIEQAAAGRGKKKSKDAPITWATLSRRNVGPRWPTGRAPYSRQVMRKAVEEVMAGRHPAAPGGVLFITEERIERERAKTLDELTNNHLIRHRLRMLDRLIGDMVQRYASGDSSQVVRCVVEVVRDLAGFSGKTNKEITAELNARLKNFNDVAKQLEEDLRGINVTIGAGLIRKARIADDLGWKCPYTGEGFDAVTLARGGIDLDHVIPRSQRASDSLDSLVVTFPAVNRWKGNRTARRFIADEQGKQVPGMPNLSIRSVASYDTMVASLASEEKPNRFTRGPGSLGDKLRRWNRKQRMARTDFNEPDFTPRDLTVTSHLTRLACRQIERSLPAMKVPGSITSIPGSVTGVIRKAWHCLGCLAPAAPLVLHDVPVWDDLGNPVIDKDGKQATKSLPRPKAEIREITHLHHALDAAVLGYVAMLLPRDGKLWEQIVTKKVLASEAMEFRKAFLWTGMLRLAAPSHGNGSHRLEVLDLPTPYKKTLADRLAECRVVKHVPSDMRGARLELKAWRVVSLSNGRVALRQRTFDPKNNDPETGARRRTWKQDDVPAAGVVGLSPGKLARARAALIISENFGVAVLDTDESNQKELHRVIPFHHVKQRLAELTALNNGVRPLLIRNGDTILVRTGSYAGRWRVFSVKNAKAGVMLDLGQPDTIKPLNKTDGHKINVKLASLLAGGLTVAGKNLTGG

SEQ ID NO: 2032 - protein, 1129 aa, unidentified
  REGION 1..1129: note = Description of Unknown: Cas Enzyme sequence
MQEEILNTSDVSKNLEVSFDVGHSSIGWAVLKSPDKNKMNNPEFPQIELLGCGVVTFEPDTCLAKKRRDYRRQRRHIRSTKMRIKRMKQLLEHLKVLTASELEKPGSPYPWKLAASVLQGKRLLNWNEIWDILRWYAHNRGYDENRHWSEVAEKEDEDDTESVKKSIELMKNHQTKTMAETICKELETDPSESDKRALHKSYKEIGAAFPRSVVVNEVREILEKHIGKLPGLSQELVETLAGESKDAWKTIDCPPIKLPSHYWGSLLFGQLLPRFNNRNIKECPFSGDTLPLKECVEFYRYRWGKILTNIRVSADGLFGQKRPLNPDERKYVDSKMQELGSMTKTELRKAVEEAVLMTLNKEGVPQPVKINTNLETMFLTSEMEGGLVLDPVKKLINSDTVQSFWGVLPPQLQKRLAGKWRRGKQITIGEIQKELEKIAPEKVEEFNLAIKSNIKRKKKTENHLNDKIPESPLKMLKGRAPYGRKLLQQAYEEVLAGKDPHEKDGCLYRDENILKEEIRKAIDKQTNNHLIRHRLLILERLFDDIVKEYAGNDKNKIKLITIEVNRDLREFSGMTAKEIESELNARSADFKKAKKQLENMLQEAGLSNTRITATLIKKARIAQDLDFTCPYTGAKYELIDLINKQVDLEHIIPKSKRPSDSMESLVITFKEVNRWKGNRTALRFIKEEQNKPVPGKENLMILTEKRYQELVNGLNTKGHPKDTERKKKRKELLLMEDYVEEKFLPRDLTQTSQLVRLAVQVLMKKYIGEKEKPVFVSMPGSITGKFRAGWNLLGCLLKAVPWAADEDNQVKPKDELRNITHLHHAIDACVLALAAHFIPTYKNGKVWELMFKGTVKPSEKMYIEDVPVLQLDSENRLHIKDLPDSIKEQITERLYERRVVQHIPKDMSGVKCDETIYRVVDPNDNHPYAKKLIRWAKEKDIQIPSADDDTALIVAKKRRGADGATGSKILHEHKGKTKYVWQYDIVKKTKLLGIEPVGGNGKLKRLKAAKLISENYGIALDPKPQIIRHFKVYKTIQELKKLNNGKPPRILRKGSIINVPKGTYKGVWKVISIKEGYSEIKVDILKPQAIKIVDKTDYCKREVLLRTLITSGMQVIEAPYTGVNVALYN

SEQ ID NO: 2033 - protein, 1084 aa, unidentified
  REGION 1..1084: note = Description of Unknown: Cas Enzyme sequence
MTTKSSPAPVASQNSHSLALAFDVGHSSIGWSVLTAPDKGRPDILGCGVVLFEKDSALASQRRLHRSQRRHVRATRQRIARLEKLLAYIGVMSPQQLTAKHASGAGHAAPWILAARVLASNGERRLNWAEFWDVMRWYAHNRGYEPIGVDVEEKENQEKRANAKNGMQQAGKTTMAETICAWLGLDPMGDRIASMGNYKRKDAAFERDTVRAEVRRLLVAHKGKLPGIDDDFISALLDQAHALPCPDIKLPKRYTGGLLFGRLAMRYHNRIIGHCPLSGEKLPSKNSPEFYRFRWAMLLANITVAGAADAKLRPLTRDERLILTRDATTRGYFTPAEFRKTVATLTGTNRGNLEQMFMDATAADNLVVDPALRLATSTTIISPLWPHLPASTRKHALNRWRRGRTQTLGDLRIKAAALGHDLNPFDAALTDLCGKPRKRGKKDVPPLTPEEVLGTKFSAPIAEGRAPFARPLLTKAYDEAMIGQHPSAEGGCLFESPDQRRARESRPLDQQTNNHLVRHRLMLLGRLVEHLIADPAYGANDPARITRLVLEVNRDLRTMAGLTAQDVAIEMNERLRNHSQVSKKLEVDGALPPGTRINASLIRKARIADDLDWTCPYTGHEFCPVDLVTRRVDLDHIIPRSLRPSDSLDSLVVTFAPINRWKGARTSWQFVRDEQTKTVPDLPTLQIMDLKRYEKTVQALDKRGHPDDQNRKKRRIERLLLERFEEKAGGFTPGQLTQTSQLSRLGQQVLRRPFEKLPEPPVFVALPGQLTARTRAAWDVLPCLADAAPAVMETTTDTEGREHRTVKHKTEIRGITHLHHALDACVLGLAADRFPNRGDIWRALIERRPSPDQRSQLESLDLGAFDSSGGFRLHDLPEELKTQLSARLAERRVAQHVPADMSGIRVEENTRGVLKRQDGRVYLRQKKRNAAGHLVVNETHEPEGKVIGLPGVNGTEGKLAAINGVRVIADNYGVAILADEKLPPAERFILIPFARVWGQLQALQIRNGGKTPQVWRNGQVLTIPDGNKVGSWRIFSVMGSKGGVTLKLDRVDAINYDDSKGCSGFKTTLALLLSRGTLRLKAKL

SEQ ID NO: 2034 - protein, 1156 aa, unidentified
  REGION 1..1156: note = Description of Unknown: Cas Enzyme sequence
MSASTAPDIHLAFDVGHSSIGWAVLRSGPGGSPDRSHPSILGTGVVTFGADDCLAVKRRQFRQTRRHVRATRQRIAHIARLLVQLGVLSEQELASRHRQAGGDSFAWRLAADVLVAARTGSPLPAIGWPELWDILRWYAHNRGYFAPPWANRSGERGPGDGDADDTEKVENAETKMGELQTGTMAETIAAYAVWYEREVAKWHQKQRAQKPPHFKGLSMAFPRKSVVWPEVRELLEALRGRLPLLDDALIRTLLGNDVDPLQDPRAWQTIPCPSIKLPKRYHGGLLFGQSIPRFDNRIIGTCPILFGRLHARYLSEGLDAEEARARAEKESKLPSKASPEFLRFRWAMQLANVFGSAAHEPTTRPLTAGERTQVTEQAEQRGKLTAGEFKKVVLAATGWSRSNLDNLLMHPDAKESLVLDPVQVANSESPLNDALSSLPDRYSKRLRGKLRDGKTLAGAEVRSWLENEDLARFDSAVATALDKNNSRLSKGKPPATAEGLLRQPLAAPFPAGRAPYSRSILREAYDEVMDGRDPRAEKSATQPRGCLCITRDLQEAQLHRAVDAQTNNHLIRHRLMILARLQRDLIQSPEFADGNPRRIATVTIEVNRDIRDLSGKNRKEQEQDLNIRLKDFKHVAAKVEEACKERSTPVAVTAGLIRKARIAEDLGWVCPYTQKPYEIAQLLSGEMDKDHIIPHAHRQSDSLDSLAMTWKEVNTWKGKRTALQFIRDEGGRTVPGRPELTIMTETQFKNHVEGLDTKKGHADDKSRKSRRKKRLLTERHEEKEFTPRDLTVTSHLVRLGAQVLKRAFPDEYRPHVVSLPGSVTGEVRKAWRLIGCLGAANPGIFEPNSTTPKRKDDIRGITHLHHALDACVLGLASLYFPRNGSVWSAMTKAGAEREADDERRLWLAMTRRNPSEQEAQLLRATGLYKRDAAGRLHLDPLPNSIEHELRIRLAEKRVVQHIPADMSGVRVEENTRGVVEHKDGRVELRQRTPRHPQTGLQTVKPSFEAEGKLLGLRPLQSHGKLAIQTGVRVITDNFGVAILDHAADGEERFVVIPWHRVWHRVQELRPRNNGRQPRLVRNGMLIRLSGLAGKMASKNGVWRVFSVKQSLKLDLGSADRVVMADSGTGVWREVSLASLGPERITILDHGYAGSPA

SEQ ID NO: 2035 - protein, 1159 aa, unidentified
  REGION 1..1159: note = Description of Unknown: Cas Enzyme sequence
MTKPDCANLSLSFDVGHSSIGWAVLRCVHSERSSGLTPEILGTGVVTFGANDCLAVKRRKNRQARRHARATRQRISRMEQLLAHLGVVSAEELAARHEQGGGDSFAWQLAADVLAAARVGKPLPKIGWPELWDILRWYAHNRGYFAPPWADRQNDLPADDDDVPDTEKVARAHTKMQELGTRTMAESTAAYTVWYEREVAKWQKKQIPEKPTHFKGLNAAFPREAVVWPEVRDLLGTLKGKLPKLDDALIRALLSNDVDPLKDPEAWKTIPCPGLKLPKRYHGGLLFGQMIPRFDNRIIGVCPIQFARLQSQYLADGLEPDEAKHLAEKEAKLPAKATPEFLRFRWAMQIANIFGSAQGERNTRPLTADERRKVTEQAERVGAFAEGGFKKAVRAIAGWPEKPPRDNLDNLLMHPDAEKALILDPVQNELRKSPLAGALARLPERFAKRLRGKLGNCRTITVAEVRSWLDSAEAASFDEEVQRVLDAANTKKSKLQKATCREDLLAEKLTAQFPSGRAPYARPILRQTYEEVMAGQDPRAEKNDHQPRGCLCQTDELKEAQLHRRLEEQTNNHLIRHRLLILERLLRDLIASPEFANGDASRIATLAIEVNRDLRDQSGKTRKEQEQDLGLRLDDFKRVAAKVEEACRRRNIAVTAGLIRKARIAEDLGWECPYTAKGFDFDTLLDGVMDKDHIIPHSDRQSDSLDSLVITWNEVNKWKGKRTAMEFIRDEGGKAVPGLPHLTIMPLAVFEKHVKGLNTYKGHPDDQGRKKRRIRRLLTENYEEKEFTPRDLTVTSHLVRLGAQVLQRAFPPESRPPVVSLPGSVTGEVRKAWKLIGCLAAANPQVLETDGTPKRKNDIRGITHLHHALDACVLGLATHYFPRNGAVWTAMLRAGADRTANDDRRLWLAMTRRRPMGEEVALLRATGLYQADASGRMHLADLPEPLKEQIRYRLAEKRVVQHIPADMSGVKIEENTRGVIGTKDGRILLRQRSARDAKTGLQTVKPTDEAPGKLLGLNPPDGDGKLKRVRGVRVITDNFGVAILDHAAEGEEKFVIIPWHRVWHRLDELKTRNRGKRPVLIRNGHLIRVAKGNYSGIWRVFSAKNNASGMALDIGRADVVRLQNKTEGHKINVLLASLLKAGLEVVSSGLLGVTSPPSE

SEQ ID NO: 2036 - protein, 1065 aa, unidentified
  REGION 1..1065: note = Description of Unknown: Cas Enzyme sequence
MATSNETHVGDGIVLGIHLDVGHSSIGWAVTESSTPVVFRGCGTVLFPKDGCLASERRVNRRQRRHIRSTRQRIARLRTLLAYLGVLTEGELNCPGCAWPWKLAAEALTQGRILSWPELWDVLRWYAHNRGYDGNALWQRESQSAEDDKETRESLENARNLMASHGTTTMAETVCAVMEITPGGAKCASQKRYKAAKASFPRDVVVGELRRILKAHERKFPEVNDALIRTLTGSAIDDSEAWRAVVCPGIVLPGRYAGGLLFGQLVPRFDNRIIGLCPVGGEKKPLKSCPEFLEYRWAMQLANVRVRRAGESELSALSVSERKVVTNALREQGYFTKTAFKKAVKEACGAEESNLDDMMLDPNAEKALVLYPAIQESKSKDLQHLWDTFPDGVQRRILKRLGKGKSVKLSEVRGWLADTEAFDQRLKETGGKGKKKEGDPLEKSFKATFPSGRAPYGRTVMRQVTTEVMAGKDPRAEGGVLYAASQAPSLAEDAIDQETNNHLVRNRLRIMRRLVEDIVEEYANGDKALIESVTIELNREVKDLSGKTAQQIAKELGLRLKSHSEAVAYAADKLGIPSYKLGGSLIRKVRIAMDLDWTCPYTKVEYDIHQLRNGSVDLDHIIPYSKRESKSLDSLVITFKAINAWKSSTTAMDFVQTNGGKQVPGMPNLSIVSPKAYKEFVDQLRNKKRPHPDDQRRRDNRCKRMMTRLVDESAEKGFTPRDLTVSSHLAKLAQAVLRDLFADLETPPSIRSIPGRITAEVRMSLKIMGELVRVNPQVLNADGELKTKTEIRDVTHLHHAVDAMTLGLATTVIPVNGDIWALMIKRNLYPAEKEKLQKTGAFQFDASGRPSLRPLDTRSRKSIEKCLCECRVATHIPKSKHGATLEKLTWRVVAQEGGMVDIRQRSRDEKTGVINRKTDTVKATKLLGIAPRGKSKLQAVKGALVISDNYGIALDPAPEVLPYHQVWKRIGELKKKNNGIMPRVLRNGMIIRLAKGRYEGIWKIFSVKNAQTGIKVDMGTPDVVRLQDKTPGHRREVNMSTLINDGLEICSSNYTGVPRDVAPPD

SEQ ID NO: 2037 - protein, 1140 aa, unidentified
  REGION 1..1140: note = Description of Unknown: Cas Enzyme sequence
MEAKPPFPDLQFAFDVGHSSIGWAVLKTIKPWPAPPQILGTGVVTFGADDCLASKRRQLRRARRHIRSTRQRIRRIERLLEHLGVMSASELKQRHKQAGGDSFAWKRAAAILKAKREGASLPPVVWPELWDILRWYAHNRGYDGNSRWARASEETSGLESDSEKEQTARALMNEYKATTMAETIAAYTEHYEREVALWVQEQRKDKIRHFKGLGAAFPREIVIAEVRSILEALKGKLPHVDDTLIRCLLSDGNADVVAWSVIPVQGLQLPKRYQGGLLFGQLVPRFDNRIIGQCPIWYARRAAEMKAAGISEGHALRRAAIEAKLPSKNSPEFLRFRWAMQLANLFGVRPGQTESQPMTAEHRRKLTILAEQQGAFSAGEFKKTVRSITGWTRDNLDQTLLHPDAENALILDPVQRAIRNSPLKEIWPELPPIIQKRLRGKLRRARSVKIGTVRQWAGEMPSFDAILHHHIDRTNTKKGRGKELLTLDALLETEIRIEFPTGRAPYARPVLRQTIDEILNPSDPLSPRHPRESGGCLEQTEHLREAQLCRRLEDQTNNHLVRHRLLILERLLNDLISAPEFASNDKRRISSLTIEVNRDLRNLAGKTAKEIAQDLGIRLGDFKRVAANVEAECQRRGIQITAGLIRKARIAEDLRWTCPYTGQKYELAALIDGAVDKDHVIPHADRQSDSLDSLVITYSAVNKWKGRRTALQFITEEGGKPVPGQPSLSVLPLERYKSFVEALDIRNGHDDDKQRKKRRKQRLLLAVYEEKDFTPRDLTVTSHLVRLGAQVLQRHFLDLPRDERPPTVSIPGSVTAEVRKAWNLLGCLATASPQTAGKTKTEIRGVTHLHHALDACVLGLATHFFPRHGSLWAAMVKAGKVNAEEGPTLWRAMVQRRPSTQEQALLRGTGLYRADPEGRMRLGDLDNSVKDEIRLRLAEKRVVQHLPADMSGVKIEENTRGIAGMDGDRVLLRQLAPRDAKSGIRLAAKKTPERPEKLLGFKPGGGIGKLQKQAGVRVITDNFGVAILDFASDPEERFAIVPWHRVWHRLRELRVKNQGRRVTLIRNGNLIRIRAGNFAGIWRVFSAKNNSSGMALDIGWPDVVRLQNKTEGHKINVLLASLVKGGLEVIPSNLVGTSSS

SEQ ID NO: 2038 - protein, 1062 aa, unidentified
  REGION 1..1062: note = Description of Unknown: Cas Enzyme sequence
MSATGKRDLIFSYDVGHSSIGWNVLKETANGPEEIALGTVIFEADGCLASKRRTYRRMRRTIRSRRQRIEAVEKLFVQQGILSRSQIDAKHKAGGGNSAPWLLAAGVLSSKGKFALKEDELFDVIRWYAHNRGYDGNRRWAGNASDEGGDSDREKAAFSLMDQHKTTTMAETVCAQLGLQPDGHKKAAMAAYKNKEIGAAFPRKTVVAEVRQILGAHVGKLKGLTLEFIETLCGDLKNDWQIISIPEFEKQKTYHGGLLFGQKVPRFDNRILSFCPVTDTPTPLKSAKEFLEYRCAMFLSNVRVGAVGDSMMRPLSKDELAVLWEKIHSHGYLTEDQFKKAIRGFDSITQDNLDALITIEDTAKNLVVDPPLKMLSSSTVLKAPVSLLPAKAVEALLSKLWKKASVTLSEVLADVSESEDKAAAVDAAFKKDKAAVKKYGTKERWLEGKTYHAEFDSGRAPYARSVMLKAVEEILAGRDPRAKGGCLYLTDEMLQRQENRSVDELTNNHLVRHRLLILQRLFKDMVDEFCDGDRRKVQTVVVEVNREVSQMSGKTNKQIAQEEGLKRADHKKAAKIMEEAVKESGENIKVSAGLIRKARIAQDLGWTCPYTSEKFGPMELIYGQVDLDHIIPRSERLSDSMAGLVVTFSEVNRWKGKRSAFQFITDEQGKPVQGKSNLSIQPFSSYKDFVSGLKTFGGHASDEGRRKSRKGYLMLPSYQDKDFTPRDLTISSYVAKMAVQQLKKEFKQVSNPPQVISLPGRLTGEARKAWKLTGLLKAVNAEIKDETTKDEIRGLTHLHHALDAAVMGLMAHCAGNLSDGTTWQLLLKRSLLPHEKNLLAANMRNIGFDGSRAHLMDVPHEIKDQLRKCLSERRVVQHVPASMEGLRVEDNTRGVVSFDEESGKVTLCKKGEKPTCEVPGKLVGYSVADSKLKRQKGVRVIEENFGVALTVPPQVIRWHKVYPQLHAIQEASAGKWPKVWRKGDVLCIPCEQGNELRRIAGIDENTRDGIIIKLRTLDGMERPSESRVSSLLRAKAFCLKGKYTGDVLCRTTSSISEAQPSA

SEQ ID NO: 2039 - protein, 1056 aa, unidentified
  REGION 1..1056: note = Description of Unknown: Cas Enzyme sequence
MAAIAPPSFRPGLVLGIDLGSNSLGTALIRTDLDLIEFMGVRIFPAGVEGNLEEGKEESRAAKRRQARLARRQTQRRQRRLYKVFHFLQRIGLLPTGDRLEVLGRLQNELEHCYPQTTVLPWFLRARALDQALGPHELGLALYHLAQRRGFLSNRAGGKDNEKERSEVKASIKGLAAAIEAAGKRTLGEYMASLNPREKLRNSAEFSGHYTHRSMFEREFDMIWDSQKAHHPEILTENHGAKLHDAMFHQRPLKDQSYLVGQCELEPTEKRAPLRLLAAQRFRILGFVNNLRLRLEDGNERKLTPNERAVLLDLCEKAEKLSLAAARRVLGLSTAQRFTIEEGGEKNVPVNLTATRLRAALGQAWDGLTAAQKDDLIEDVGDGKRCPTDEDLERCGREKWGWPQEVANALSKVRLPDGYGRYSLRALVALLPALEGGITVEEAIRAIPAYAETRNAAEPLPMLPPVRDLKAMLGEIRNPAVLRSLTELRKTVNAIIRRYGIPEQIHIELARDLKKSKKERQYQAELNREREKMRQEATEELRKYDAVRFANPRNTDIEKYLLAKEARWQCPYTNKKYGFTDVFGDHPQVDVEHIIPRSRSLDDSYVNKTLAYRSANAEKGNRTPREWLFESDQEQYEQMIRVVKQFDPRFEVGKKLRRFSMELSDPDSLLREFTERQLQDTRYASKLACRYLGVLYGGTIDASGKRRVFASAGQVTAKLRRAWDLDRILSPDKPEKCRDDHRHHAIDALTVALSSTTLIRELARAAGEADRLFRRKIILPVPWVGFGEQTRSAVERIQPSHRPMRKLAGPLHEETFYSRPRKEAVGTDKKGNPIKKEFVHYRVPVTSLASAKDFESIVDSHVRAAVKEKAAQLGGGGNKFEKNWPALVTRKGQTVPIRRVRIRKVQSVVSIGKDERKRFVVPGSNHHAEILKELDANGRVKRYLCETVTMLKALERKRQGVPVVSRDHGPGYKFHCTLSEGDLVEARGPGDEALRIWKVRTVRDSQQLALTPALDARPKADVQKDGMWSPRVNSLFLGGARKVLITPLGEVIPAND

SEQ ID NO: 2040 - protein, 1462 aa, unidentified
  REGION 1..1462: note = Description of Unknown: Cas Enzyme sequence
MPYSIGLDIGTGSVGWAVIDDNYRLVKKYGKYLTGVRLFSEAETANGEDGKGRRSHRSSRRRKDRKKWRLREVDRLFKTKFPEMDPILWTNKAYSWVSRDDKRAGYRAAKKQLGRNPLQKFYKVPAGENFAWLVPFKWTDTQHPRPKYFEENTAYFPTIYHLRQALIETKHPERYSVEQVYLAIYHIVNSRGHFNFDVHAGVQSDAQLTQQLQALFQALQDLKITPVLSEGVEPTTSYVAKVPDATAVQKMAEILVKPDDSDARYTLKDKQQDLVAAYNDGVLEAQKKFDKKFIEQIFNGILGLTFNVSAAFKNVLEFDNLFSEERKYELKNATARENYDAFVAMSGELETALTAITTINDFLLLQTSTGGRPISRFMIEKYAQHAQQLALFKQLLGEFEQEATTQSLAKPLRWLYDQWIDYPNSVLMRQKKTAKKSAEATFGFVNSGGDDKAKLTPNGWLDYILNDPKLTDKGEPTADWQKITTLYVHIDQPAFQLTPKARQLLADLRASFAQYGVFPKQRDGQINRALPNSLHVDEFVAILTNMQTIYPELLSPDEFSNKEGVEQSQFVSLARFRVPYFVGPLVTDSQLSTWSWAVRREGFEDAKITPYNYATVIDLPKTQQAFIERLKVVDPRLWNDATYEDYLQDVNYQLPAQQDPRTLPLNSLVYQEFLVYEELNNFRFVDDLSRLNKDGEKIGNYLSPKIKHRIFKEIFQNPKNTGKITYEKIFDWLRAESLALNPTFTNKSLKRSFNNALKTYHQYLAAGVSQAQLDDPKNRTVFERIANLQTVLQEPQSITNALSALRPEAPFLTDAVIKNLSVRAAGYSKQSWKILEGLRDEDTGYTLLDMLKNAEKPTTFDAVYRLGGFAEMVDAINQTDQDTWREKIKKLDLSPMFKRPMIQAVRIIQDIEKYMGEAPAGVYVEVATDDEATQLRNRRKMTQNRFEQLKKWGVTVNNAYAKDILTQKTRSGKADKLFLYFLQEGKDIYTGQPFDGEVLAAIINGTDHLEIDHIHPYSRSFDDRLDNRVLTTSANNAYKGDANRVPEAFQQAGQGLWQALYKDGKGHLMSATKYKLLTSKNFKEDKERFVQRQLTGVRQITKNVVEILNSITTPAGEQRYPTFGVKAAWSQQLRNLILEDGLKNKPSKVRDLNDIHHAHDAYFIAQIGQTNHRLFPEMDMPNPPLRKIYDRMREFNVAGAHKNADHQSYGYLVAYVQANGFPGANNTDFMQNSKADLSIKQYIMSKMLLHKNGKGAKFYDETLARKGANDAVKVIKGKLAVPELYGSHSKAYSSGFKIVKKDDQHVKLLATYPFEVNKFEMPSNLLIQDLAGNRWVLRSPEVWGRALEFIPAIQDLSAFYDVLNNEAPNADHVARATELLASTKVRAMYPYLPVTTKISDFVKAVEYGGSYANGSGKDVVQDYSYQRQAKGGRTLPNTMMVVQQSPSGLFEKLVPITDFISE

SEQ ID NO: 2041 - protein, 1058 aa, unidentified
  REGION 1..1058: note = Description of Unknown: Cas Enzyme sequence
MADLSLPQAHKGLILGIDLGSSSLGTALVNPEGEEIPFLGVRIFPAGVVGDIEEGREESRSAQRRDARLARRQTQRRQRRLYKVFRILQRMGLLPLGPRVEVLYELQRELERRYPETTVVPYFLRARSLDQALTEHELGRALYHLAQRRGFLSNRAGGKKDDAEERSKVKGSIKGLRAAIEAAGKRTLGEYMASLDPRVTSIRNKPEFSDHYTHRSMYLDEFNLIWDAQQPFHSGILSAQFRAKLHHAMFHQRPLKDQSNLVGQCELEPEEKRAPLRLLDAQRFRVLGFVNNLRVGLDDGNTRTLSANERALLLDLCEKSEKLSIPAARRALGFARTSKFTIEEGGEKNVPVNLVAGRLRAVLGDWWDNLTTEAKADLVEDVGDGKRCKTDEELELCAREKWCLAPEIAEELSKVRLPDAYGRYSLKALRELLPALEKGLNVEEAIRSHPQYLESRKVAEPLPLLPPVKDVLGEIRNPAVLRSLTEMRKTVNAIVRRYGKPEFIQVELARDLKRSKKERQLETGRNRDREKLRQLAVEELQRHDSVRYSNPRGTDIEKYLLAMESNWHCPYTDRKYGFVDVFGEHPSVDVEHIIPRSRSLDDSYLNKVLAYRSANMEKGNRTPHEWLHESDVERYDRMIALVNGFDSRFEVGRKLRRFSMELSEPDSLLAEFTQRQLQETRYASKLACRYLGVLYGGEVDAEGNRRVFACAGQVTAKLRKAWDLNQILNPVGKPEKSRDDHRHHAVDALTIALTSSKMVRDLANAAGEADRLFRRKIILPVPWVDFAEAARMSIEAIQVSHRPARKLAGPLHKDTLYSRPRKYAVEIDKKGTPVEKEYVHLRVPVVKLGTRAAAEVIVDVRVREAVMAKAEELGGGGNKFQNNWPVLHTRHGGSVPIKRVRVREVKSVVPIGKQGRERFVSSGSNHHAAIVAEMDTKDSVKRYVFSTVTMLEAFERKRQGLPVVQREHGPGMHFLCTLSDGDMVEGKRPGDAVPRIWKVHTVDKNGRIFLSAAVDARKKDEIKKAHDHWEPTVNSMFGAGGARKVLVTHLGELISAND

SEQ ID NO: 2042 - protein, 1355 aa, unidentified
  REGION 1..1355: note = Description of Unknown: Cas Enzyme sequence
MEVQQSRAYYLGLDCGTDSVGYAAADTDYALLRSGGEPVIGVTTFDGAVTAQERRAYRVTRRRLQRRRQRVQLVQELFAPAIAAVDAQFFLRLRESALYRDDRRIGGDAIPRALQKPYPTIHHLLVELMESDEPHDVRLVYAACAWLVAHRGHFLSNVSEDDLGAVLDVRGAYDALMEYFSGEKPWDCGAEAFGAALREKLNVRAKEARLRELLFAGKKPPDLVYDPDDPDAPRYSRAKMLTLLSGGRVKPGELFVHRSAEYEQIGSFSLGGKEEELAAALAQLGDDAELVLRLKALFDWAVLTDVLQGEPCISRAKVRVYEQHRADLACLKALLRKYAPEKYDAVFNGTGKEANYAAYSRHAPSRGAAPEAYAAREAFSEFLKKQVRDLPVSQDDRPAYEDMLARLDTCSFLPRQRNADNRVIPRQLYAYELRAILARAERYLPFLAERDADGLSVSDKIVSVFNFRIPYFVGPLDPRSSHAWLTRKAGRIYPWNFESMVDLDRSEDAFIRRMTGRCSYLPGEPVLPKNALCYARFTVLNEINPLKVNGAPLTPAQKQAVYTGLFEKRQRVTLKALREFLLSEGYMQRGDTLSGVDEAGIKSALRPQLAFRRLLEKGLLTQEQAEQIIERLACTEDRMRLRRYLTREFPQLPEVDVNYLARLPFKDFGRLSRRFLCGLEGADRETGEVYTVLQAMWETNCTLMELLSDRFTFAEAVQQEAQAYYAAHPQTLEARMDSLYLSPAVRRPIHRALAIVKDVVKAAGGPPSRIFIEMARGAAEQQKGRRTVSRKEQLLALYRKFGDEEARALREQLEAKEENDLQSEKLFLYFMQLGRCMYSGQPISLDALFADKRYDIDHIRPQSRVKDDSVWNNKALCLAELNGNKGDTYPIRADIRQRMTPFWSLLHSRGLMSDEKYRRLTRATPFTEEELMGFIQRQLVETRQSAKALATLLAERYPGTEIVYVKAGLVSDFRHEFNLLKCRAVNDLHHGKDAYLNIVVGNVYHERFSRQFFRLDQPYTLKTRELFSHRVMSGGRCVWRGGEDVARVRAIVQKDALHVTRFAFCRHGGLFDQQPRRAGSSDELLPRKAGLPVERYGGYRKPTASFFVLARYAAGRRGGLMVVPIDLMAAPRFLSGGAEAEAAVRAALEGVLKQPVDAVSLPLGGRILRVNTVFSLDGFRVALAGKSNGGKTLLLSPLMPLRLGPELERYVKRLESFQKKRADNPALRLDPGFDRLTPEEDLALYDALRQKLAAWPYSKRPAGHVIAGTLDEKREAFIALAPEARAAQLLALLPVFGRSGAGCDLTAIGGMSRVGIPRLSSALVNWKKAYDDVRIIDQSASGLFAAASMNLLELL

SEQ ID NO: 2043 - protein, 1132 aa, unidentified
  REGION 1..1132: note = Description of Unknown: Cas Enzyme sequence
MSLTLSFDIGYASIGWCVLSAGAPAPADPIILGTGVVTFPTDDCLASQRRALRRTRRHIRSTRQRIERLKRWLQHRGILSREELDRSGHPAPFLLSAAALRGHRLLTPFELWTVLRWYAHNRGYDGNSRWARNEETEEDTEKETHALDLMSRAPATGTMAETVCKCLALDPAHSRTRIASTLPYKTLNAAYPRRIVTAEVKQLLNLHLGQIPNLDADAIEMILTPDELPSEARSQLAAANIRLPKRYCGGLLFGQLVPRFDNRIIARCPITWAKQYDEAIQSGLTDPKARQQADKFAKVPAAKSTEFLEYRFARILANLKAAGKPLDSTLRHRLWAIAKERGSLSAPILQKEIAAHCGKVETNVEAYFNLHPDSADALVLDPAQDEIRKASGTAAKLSPIWSLLPEAAKQAARTAWSRSRKITFHELLEKAANNPAVAAALQKTFAKDNKPKRGKTTYTSFESYLQKSGVSPKFPTGRAPYAKPVLRQVVTEVLAGFDPTKASAATDPEKGELKTANGVLFDLNIPTSRVRQLQNQRPLDQLTNNHLVRHRLLILDRLAEDLSSEFCGADPTQVRRVIVEVSRDLREFSGMSAKQITMELNGRLRDFKAAVKYLEDNAPHLPKNGSLIRKCRIAMDLGWCCPFTGEKYDVWDLPKMEREHIIPYATRNTNALHALVLTWPEVNRMKGKRTARQFIAECGSQPIPGKSNLTLFTLRGYDEFVDHLDTKGHDNDIRRKKARKALLATTDFEDKELGFTEGMLTQSGHLMKLALRGLSFTFPEATLDPIPGSVTSEIRKSWDLIGSLSMACPEVMDKIAGKPKPKDEIRAITHLHHALDAATLALTSHYFPLKMGGLDQKGTIWLALLKRRRTDEEKKFLHSLGIFDRYQRHRRDKEGKEYEESDVRLRDLPKELKEQLALSFLEGRVMQHLPSDRSGTKAELNTWGVVSIQGEGEDARVTLRQRATTVEKERRVLVHKEREERGGKLLGPMPEGGSGKLQSISGALIINENYGLALDPVPTVIPFHNVQRRLDEIRKANDGKPPRILRNGMLIRLTNNPARSQQDYTGVWRIASLKNNKGKFLIDMIRPPYVTPQNGVTWSGMNKTLGPLLECGLEILPQRYTAHATPNTKKQP

SEQ ID NO: 2044 - protein, 1009 aa, unidentified
  REGION 1..1009: note = Description of Unknown: Cas Enzyme sequence
MPSRLVLGLDLGPNSAGWALIEESVDADGSTNPVRLVDAGARIFPEGVEANRNQSRNTARRDARAIRRQHDRRTRRREGLLRHLTAAGLMPKEADALREILAINPYSLRARALDQKLEPFELGRALYHLGQRRGFLSNRKAERGSEKKKENEGVAAAISTLDKNIAESGARTLGEYLSRLDPALERIRKRYTSRAMYQHEFDAIWNAQSPHHPDLLTDDLRRRFHQIIFNQRPLKVQKGLVGECELEPGRKRSPRGTWYAQQFRLIQDVCHLEFPDAATGEVRKLNDDERAKLIAALQRKKSMPFPAIRKTLDLLEAQKFNFETADHRKELKGNATEALLRSVLKSDYDRLSDDRRDEVVRDLLYLDSEDVIRRHAVERCGLDADTAAELASKELQPGYVHLSEKALRRMIPHLERGLPYMTALEAAGYERPDQRRIESRDRLLTEDMPKLRNPIVSVALNQTRRLVNAIAAAYGKPARIRVEMARDLKVSLGKRAEILKENKKNREENEAADQLITEQFRVANPTRDDRVRLRLWIEQAQTCPYTGRTIPNNSVFSPEWDVDHILPWPRSGDDSYMNKVLCDAAANRQKGNRTPHEAWHGDQPRWDDILLRIKSLPWSKRRKFDVKEIDTDAFISRQLNDTRYIARAARDYLATLTGKYTVEVGKGAATAALRRRWGLNRILSDSGEKTRADHRHHAVDAVVIALTTPTVIKRMSALSSAGRRPDEAGFPPPWENFRHDVKQRIDAIRVSHRVIRGIVGALHDETNYGILGTTDEKGMSMYAVRKPLERITQSELSKIADDRVRALVIDHLRRNGADPDAKNAEKTAEWKQAMTPPSFPTLANRAGAPVPIKKVRLHIPSKSMFALKNRQGVEYRAVESGSNHHIAIFEVAGRNGKKEWKAEVVPMFHAARRARAGEPIIRRDESDGRRFIMSLSKNEILRMNLGGIEGLWRVQKFDINGRVTVRPHNDARKSDDRSFEKSPSVSQLQKAASVKVTIDLLGRVHDAND

SEQ ID NO: 2045 - protein, 1220 aa, unidentified
  REGION 1..1220: note = Description of Unknown: Cas Enzyme sequence
MKKILGLDIGVSSVGLAIVTDDNGTKAIENLSVRIIPEDPDFHGKFYSGNTASKNEGRTEKRGIRRNNQRFKLRRDKLYKTLRDHNMFPEEQLFNLSARELYGLRAKAAIERISLQELGRVLILLNQRRGFLSNRKSVSAEENSSDYKERIKLLESSLDGKTIGQQLHRELESSAEALDVLLRERTYLRSSYLYEFDTIWDCQSQYHPQLTGGPHCDNNKSTLYDLIRNQTIFYQRPLKSQKGLISECPFEKHHKAIAKSSPYFEMFRIWQRLNDLEATLTDGSKRKPTPEQKQRLFDILFYGKDKLGEIALGSDFKLKVTNIKKVLGLKLREGYLNFTELDGSKTFNMLRLALESAGISAKKQSECLSFNIADNDPKGGLFELWHITYSLPDVSEVSNALQKRFSLTQTEADTIADNVAYASDYGSLSTRAVRKLLPYMIDGKSYSDACDAVGYDHSGYKTVVEPQKKLQAVKQNSLRNPVVEQVLNQVVNMVNLAIDTYGPFEEIRVELARELRNSAKTRKNISASNAKNKRRNDQIRNTLRDEFEFNVVNGRDVKRYILWEETNKQCLYCNNPITNTDLLNGNADIEHILPKSRTFSNAMDNFILSHRKCNAEKGQMTAYDFMAGRKNGGLQQYVDKVNELYKDGKGTISRRKFENLLCKGEDIPSDFVERMKKDSQYIAKEAVKMLKAICPKVHTSTGQITDYLREHWGLKLVLEELSFQKYKAIGQTEQKEIKDRDNKTKTIEVIKDWSKRDDHRHHAVDALITALTDPKIIYRLNNLNKIYQYEKDALSPEELADIEDFLGGRFSFKEYLEQTANIMDCPVADVRKATKRLLEDIFISFKKNNSKVLSPKTNRLANGTEQKTWVPRKRLHEETVMGQAKRLAEKKLKLDTKFPHGAERLIVSPAIQELVTYRLALYGGDPKLAFDKKQLAKDPLVYKGRELDDVAVWEYTCTKRVPLTENFTAAQVAKIADKAAKEAIEQHIASNGGSSGSIKQAFKDLAGNPVRHKNGKTIKRVTVYDESKTVSTVSKKDRFGNEILDETGKPVPTGFVKTGGNHHALIFRDENGNFRDRVVSFWEAVAIGLSNIEETGKPYPIIMRKDDPELGTFQFSMQINDLFVFDLKHSDHPAEEGELDFTDPANRHIISGKLFRLQKMTKKASGAFEVTYRHHLESTLGRSIVDTKGMTWDEHGSNKHLERLTKVHLNHLGQIIKIGE

SEQ ID NO: 2046 - protein, 1109 aa, unidentified
  REGION 1..1109: note = Description of Unknown: Cas Enzyme sequence
MREDQKPSRSTAGSKEWVLGVDVGDRSVGLAAVEVENGLPSKILAAVSVIHDGGVGDPKHQTSRLAEAGMVRRVHRLQRRRLARLRKLDYVVKSLGWVLPPSTSRHPFDAWEARRRLVEEEILDEQERAVLLGRAITHMARHRGWRNPWLPVRTLWEAEVPSAGLVDAVKNAEERFGVTLTPGTLGQLGTLLCREPQLRMHPQRGTQQAASLLSSRTRQEDVLWELRLIAEKQGIDDTTLRKLADAIFEQHPTRVPKERIGRDPFDPTQLRAPVASLEFQEFRILDKVANLRIRDGRSTRRLTLDERRQVVDALMKSSKRLTWAEVALDVLGLENEQLLVIPEEHGYSSLAPRDDTTAVIKALFANKGKALEQTRQWWAKASRTERSAFVRFLTDHAGDDDLDVVQQIPEEELEELAGFSISLPSGRAAYGLGTLQQLNDAMASSDLDQHEAIKACFGVDDNWQPPLPRLDEPTGHPTVDRNLAAVRKFLSAATLRWGPPSRIVVELTREGERTPAKLQEEKQERARRRGWNERLREELRQSRLIEPRQADIVKHTLLSMYGNTCLYCGNSISWEDSQLDHIVPRADSGSNRLENLAVVCAQCNQSKDRQPFGLWAKQQGIDLEAVLGRVQALRYERGSRWASVYELNAYKQAVEARLRRVTKDSEEVRSIESTSYAAVALSERLRRFMEDNGKDASRTVAVFSGVVTAEARRVLGLSVPEIFNRPGHNKRLDRRHHAVDALVLTTMTPAAARMLVQRSIVRREQEFFYRPAEVNLGSWEARAASSEKFRAWQKAGELMASLIREAGEDDRIAVVRPLRLRPSGKFQEDTIFALQRHRVGDPWTQEQIRRVVDATTYMALSSAAEKSGGVLGSDEHRCLPTEHGEVGSNARVKLFPKDRAMMRSSTGAVNMRNVHHARLYAWKDERKGGYQFAVLRVWLGDLAICGVLGSRDDVFNKELPPWSQSWRHANDSLRRAVSEGKAQYLGWLAPGDEIEFADPQHIPGDGMIKEFLNNFEERHWFINNFPESGKVNLGPLYLADEGVVKNADTCSSVQKIIQNGWRIAINTLFSCSDLVIIRRTALGTPRWNGQAGNLPISWRPWQRAAEVLG

SEQ ID NO: 2047 - protein, 1053 aa, unidentified
  REGION 1..1053: note = Description of Unknown: Cas Enzyme sequence
MKRLGLDVGTNSIGWCLIEDDAGLIDIGVRIFTDGRDPKSGASLAVDRRAARGARRRRDRYLGRRSAFLNALVQHGLMPADADEAKLIAERDPYELRVCALDRRLEPYEIGRALFHLNQRRGFKSNRKAERRQKDSEGGKIASGAQALDRAMAESGADTLGQFLAGRAEKRVRMHGESQDYDFYPQRRHVEYEFDRIWDTQAKHHPELLNETARAHLHRILFFQRPLKEAEVGVCTFFPDERRLPKAHPLFQERRLYEEVNHLQITTPGETARPLSREQRDALILELRGRRERSFEGLAKRLKLEPGQSFNKASETRTTLRGNEVHAAMSDKKRFGNAWAHLSSEHQWEIVERILEEEDPDALLAFLKSRGLDDEHAEAAARAPLPEGHGRLGETATRLILEELKKNVITYDQAVGRALSRSHSDERRGEVLERLPYYGELLSRDIPPGTQLPSDPPEKRWGKITNPTVHIGLRQLEKLINAVIAVHGRPDEIVVELARDLKLNEKQKDEHKRRIRETTAAAARRSEKLREMSVPDTGANRMLLRLWEELNPREVLDRRCPYCGGMIGAEMLFNGTADIDHILPYSRTLDDSPANKVVAHRGCNRAKGNKTPWEAWSLDPDRWETISQQAGRLHKSKQWRFGPDAMERFEKDDGFLARQLVDAQYLSRLARKYLSSLYADRGEGSGHVYVIPGRMTAMLRRLWGLNSLLPDHNFVENEHSDAPKNRLDHRHHAIDAAVVAVTTRGLMQQISKAAGRAEEKDLDRLFENLPQPWPGFREELGEKLTGVTVSHKPDHGRKGGPAPGRDVTAGRLHNDTAYGLTGETAVDGKTPIVVHRVPLMSLKPADLDDPSRIPDKALREALRAAVGSRTGKEFEHALARFAKQHPVFAGIRRARVREALNVITINDRNGRPYKAYKGDANERFELWRLPDGKLKTRVVSMYQAHQNHLVQTRPHPAAKKLLQLRQNDIVAVERNGNARELLRVVGFNVSGRLTLSAANEGGNLRERDSASEEVDPFKYIYLSGNSILKAKARQVRVDPLGRVFDPGPREPAV

SEQ ID NO: 2048 - protein, 1055 aa, unidentified
  REGION 1..1055: note = Description of Unknown: Cas Enzyme sequence
MRRLGLDMGTNSIGWCLTEDDARIVDIGVRIFSDGRDPKSGASLAVDRREARAMRRRRDRYLGRRAAFLKTLKRYGLMPASETEAKLLAERDPYALRAKAIEERLEPFEIGRALFHLNQRRGFKSNRKAERKTKDNEDGKIASGAKALDQTMAESGAETLGQFLAAQDTKRVRMGSDAQGYDFYPQRRHVEYEFETIWERQKAHHPALLTDHAKTALHRILFFQRPLKEQEVGVCTFVHSERRLAKAHPLFQERRLYEEVNQLEITTPGEPSRKLNLDERDRLVRELREKKKIAFKSLAKSIRLQAGESFNKASETRTELVGDEVYATMKDAKRFGDRWPHLSRDEQWTIVERVMEEEDPEVLKAWLTGTWGLSDERAEAVGRAHLPEGYGRLGPTATARILDELRKDVCTYAEAVERCGWHHSDDRTGEILDRLPYYGELLTREIPPGSFDPADPPEKRWGKITNPTVHIGLRQLEKLVNAIIAVHGRPDQIVVELARELKLNEKDKEEHNKRIRKDTAAAELRGRKLDEEGFQNSGANRALLRIWEELNPANPLDRRCPYCGEPIGMRQLFTSEADIDHIIPYSRSLDDSASNKVVAHRSCNRIKGNRTPHEKWGHDPDRWEIISAQASRLHKSKQWRFGPDAMAKVEKDGGFIARQLTDTQYLSRLAGRYLSSLYPTKEDGSVYVIPGRMTAMLRRLWDLNSLLPDHNYGAVENRHSNAPKNRLDHRHHAIDAAVTAVTTRSLLMEIARASARAEDKDLDRLFEDLPQPWSGFREELFDALRRTIVSHKADHGRKGVPARGRDTTSAKLHDDTAYGLTGRIGPDGKTPEVVKRVSFESLQPQDITTDNRIRDPLLRDELRKATKGLSGDALLQRLKHFRETHALFKGIRRVRVLGERAGTPTLSVIPIHDSKGNAYKAYKGNANARFQVWRMPDGKWVHRTVSVFAAHQQGFEAPRPHPAARKMLDLRQNDLIAVERNDSPREIMRVVKFSESGQVTLAAHNEAGALKARDTTSNDVDPFKYVAPTAGGLKTMKARQVRIDPLGRIFDPGPR

SEQ ID NO: 2049 - protein, 1124 aa, unidentified
  REGION 1..1124: note = Description of Unknown: Cas Enzyme sequence
MRNRPFSFAGGGFKQMKRLGLDIGTNSIGWCLIEDDKRIVDVGVRIFGYSPSGAGRDSKSGTSLAVERRQARAMRRRRDRYLGRRSAFLKTLIEHGLMPANADEAKLVAESDPYTLRARALNEKLEPHEIGRALFHLNQRRGFKSNRKADRKAKPGEEGKIASGARELVQAMAEDGADTLGEFLAGRPVKRVRLDSDNQEYDFYPQRSDIAHEFQRIWDEQSKHYPTLMTESTLTWRQLDARLTKRENGWDPKEARDALYRILFFQRPLKEQQVGYCTFGGMSGVPADERRLPKAHPLFQQRRLYEEVNQLRVVSAGAADRALTLDERDRLVKTLQEKKAIKFETLAEKVLKLAEGERFNKESESRKELIGDEVRAEMSSKKRFGNDWLHFGLDEQLRIIDRLRNEENPEVLLGWLKSEYGLDDATAEAVANARLPEGYGRFGKTATTRLLDALKNESFELEDGKRRPVTYNEAVEIAFGRSHSDFRDGLVHDRLPYYGEILTREIAPGKEEYGDEKERRFGKITNPTVHIGMRQLEKLVNAIIAVHGRPDQIVVELARELKLNKKQKDEHKKRIGKDTQDAQRRSRALLGVDGDGNPIGDPVADDNGANRAKLKLWEELNPGNLLDRRCPYCGDPNRTIGIAMLFSDEVDIDHIIPYSRSLDDSAGNKVVAHRNCNRAKGNKTPYEKWGPPHVDPERWDRISDQVARMHKSKQWRFGPDAMERVNGEKGFLARQLTDTQYLSRLAGKYLRSLYATKDEGRVYVVPGRMTAMLRRLWALNDVLDDSKFVENKNSNAPKNRLDHRHHAIDAYVCAVTSEALLMRIAEAAGRAENKDLDRMFEGLPEPWPGYLQELNNKLARVTVSHKPDHGRKGGPSKYRDITAGRLHNDTAYGLTGEIAADGKTPIVVHRVPFMSLKPGDLTDPQRIPDAELRDALYGATRDRSGKDFEQALARFSKEHPVFRGIRRVRVREPLNVIAIRDRQGRAYKAYKGDANARFDVWRLPNGKWTSDIVSMFDAHRSDQQDRRPHPAAKKMLSLRQNDILAIERNGGPPQIVRVVKFSTIGTIALAGDNEAGALKARDAAPNDVDPFKYVLSSAGGLKGLRARQVRIDPLGRVFDPGPRE

SEQ ID NO: 2050 - protein, 998 aa, unidentified
  REGION 1..998: note = Description of Unknown: Cas Enzyme sequence
RDRYLGRRSAFLRTLIECGLMPANADEAKLVAERDPYALRARALDEKLEPYEIGRALFHLNQRRGFKSNRKAERKAKDGEDGKIASGAKALDQAMAEADADTLGQFLAGRDEKRVRLNGESQGYDFYPQRRHIEYEFGRIWEEQAKHHPALLTEAARAALHRILFFQRPLKEQEVGYCTFAGMNGVPADERRLPKAHPLFQQRRLYEEVNQLRVVSAGAADRPLTLDERDTLVLKLQDKKKVSFQSLGKLIKLGEDERFNKESENRKELIGDEVRAELADKKRFGSRWLHFGLDEQLRIIDRLQNEENPDILLAWLKSEYGLADTQAEAVANARLPEGHGRFGETATTRLLEALKADVVTYDKAAEAAGFHHSDHRTGEVFDRLPYYGEILTREIAPGKEEYGDEKERRFGKITNPTVHIGMRQLEKLVNAVIAVHGRPDQIVVELARELKLNEKQKDEHKKRISKDTAAAIARGEKLRSLSVPDTGANRMLLRMWEELNPANPLDRRCPYCGEMIGAEKLFDGSADIDHIIPYSRSLDDSAGNKVVAHRNCNRLKGNKTPHERWGPHIDPERWDRISVQVARLHKSKQWRFGPDAMERVNGEKGFLARQLTDTQYLSRIAGKYLRSLYPTAEDGRVDVLPGRMTAMLRRLWGLNSLLPDHNIVENAHSNAPKNRLDHRHHAIDAAVAAVTTLSLMQQIAHAAGRAEDKDLDRLFEDLPQPWEHFREQLGEKLLRVTVSHKADHGRKGRPSKNRDVTAGRLHNDTAYGLTGEVAADGKTPIVVHRVPLMSLKPGDLIDPQRIPDAALRDALYGATRDRSGKDFEQALARFAREHSVFRGIRRVRVREPLNVIAIRDREGRAYKAYKGDSNARWEIWRLPDGSLKTIVVSMFEAHKPGTDTRPHPAAKRLLNLRQNDLIAVERNGGPREILRVAGFNVAGRLTLAAANESGNLKERDGLPNDRDPFKYIYLQGRSIVNAKARQVRIDPLGRVFDPGPRE

SEQ ID NO: 2051 - protein, 1071 aa, unidentified
  REGION 1..1071: note = Description of Unknown: Cas Enzyme sequence
LPKGNPLAKRTMEKGVSLRRLGLDIGTNSIGWCLIEDDRRIVDIGVRIFSDGRDPKSGASLAVDRRDARAMRRRRDRYLGRRSAFLKTLIGHGLMPADADEAKLVAERDPYDLRKRALSERLEPHEIGRALFHLNQRRGFKSNRKAERKSKPGEEGKIASGAKALDQAMAEADADTLGQFLADRETRRVRLNSENQEYDFYPQRRHIEYEFTRIWEEQARHYPALLTETARAALHRILFFQRPLKEQEVGYCTFAGRGGVPENERRLPKAHPLFQQRRLYEEVNQLRIVSAGAADRPLTLDERNRLIKVLENKKKPSFKSLGKEIKLGEGERFNKESENRKDLLGDAIRAELGDKKRFGTRWLHFSLDEQLRIIGRLQNEEDPEILLDWLKTEYALNETAAEAVANAHLPEGYGRFGETATRRLLDALKADVITYDKAAQTAGFHHSDHRTGEVLDRLPYYGEILTREIAPGKEEYGDEDERRYGKITNPTVHIGLRQLQKLVNAIIAVHGRPDQIVVELARDLKLNDKQKDDHKKRIKRDTDAAIARGDKLRAEGFADTGANRMLLRLWEELNPGNVLDRRCPYCGDPIGIRQLFSGEADIDHIIPYSRSLDDNAGNKVVAHRSCNRAKGNKTPYERWGHDEDRWDAISAQVTRLHKSKQWRFGPDAMERVNGEKGFLARQLTDTQYLSRIAGQYLRSLYATKDKGRVDVIPGRMTAMLRRLWGLNSLLPDHNYVENEHSNAPKNRLDHRHHAIDAAVAAVTKLSLMQEIAHCAARAEEKDLDRLFEDLPQPWGGFREELGERLLRVTVSHKPDHGRKGRPSKHRDVTAGRLHNDTAYGLTGEMAADGKTPIVVHRVPLTSLKPGDLIDPMRIPDKALRDALYAATRDRSGKEFEQALARFARQHPVFKGIRRVRVREPLNVIAIRDRNGRAYKAYKGDSNARYDVWRLPDGKWVHDVVSMFEAHLPQSSERRPHPAAKKILSMRQNDLLAVERDGGSREIVRVVKFSAAGTLALAPDNEAGSLKSRDASSSDVDPFKYIYASASGLKKMKARQIRIDPLGRVFDPGPRE

SEQ ID NO: 2052 - protein, 1047 aa, unidentified
  REGION 1..1047: note = Description of Unknown: Cas Enzyme sequence
MRRLGLDIGTNSIGWCLIEDDARVIDIGARIFSDGRDPKSGASLAVDRRAARAMRRRRDRYIGRRSAFLDNLVRYGLMPSDADEAKLVAERDPYSLRARALDERLEPYEIGRALFHLNQRRGFLSNRKAERRQKDSEDGKIANGAKALDQAMAEAGADTLGQFLNARDEKRVRLDGANQSYDFYPQRRHVEYEFGRIWEEQARYHPALLTDEARAALHRILFFQRPLKEPEVGVCTFVQTDRRLAKAHPLFQERRLYEEVNQLEITAPGEAPRKLTLDQRNDLVLELRGRKERSFDALAKRLKLQPGESFNKASETRRTLRGNEVHAALADKKRFGDAWAHKSPEQQWTIVERLLDEEDPDALHAFLTGDCGLDEEHAGATARTSLPEGYSRLGETATRLILDELKMDVITYAEAVKRAGWHHSDDRTGEILGKLPYYGELLAQDIPPGTQLASDPPEKRFGKITNPTVHIGLRQLEKLVNAIIAVHGRPDHIVVELARELKLNEKDKEEHNRRIRRDTAAAEARSTKLIEEGFADTGANRMLLRLWEELNPANPLDRRCPYCGEPIGMRALFSGEADIDHIIPYSRSLDDSASNKVVAHRHCNRIKGNRTPFERWGHDEARWDTIATQVARLHKSKQWRFGPDAMARVEKDGGFLARQLTDTQYLSRLAGKYLRSLYPTKDEGSVYVIPGRMTAMLRRLWGLNSLLPDHNIVENEHSNAPKNRLDHRHHAIDAAVVAVTTRSLLQQIARAAGQAEDKHLDRLFEGLPRPWESFREDLGAALARITVSHKADHGRTGRPSRHHDVTAGRLHNDTAYGLTGEVAADGKTPIVVHRVPLMSLKPADLTNPERIPDTTLRDALYAATRDLTGKPFEAALQRFRETHPVFKGIRRIRVREPLNIIPIRDRTGRAYKAYKGDANARFELWRLPDGAIKTRVVTMFEAHQRTNETRPHPAAKRLLNLRQNDLIAVERDGGPRQILLVTGFNVQGRLTLAAHNEGGYLKQRDGLDNDLDPFKYIYLSGRSILKAKTRQIRIDPLGRVFDPGPRE

SEQ ID NO: 2053 - protein, 1081 aa, unidentified
  REGION 1..1081: note = Description of Unknown: Cas Enzyme sequence
VWGFPPLLPRLRRRAMRAKIIDGSMSNANRAYRLGIDVGSNSLGWFIVWLSDDGQPIGLGPGGVRIYPDGRDPQSKTSNAVDRRVARGARRRRDRYVKRRTSLMSLLVMHGLMPVEETGRKALEKLDPYALRAKALDETLPAHHVGRAIFHLNQRRGFLSNRKTEKGDNESGAIKLAAGKLQQMMQESGARALGEFLHRRHIVREPVRARNRSSGAKAEYDFYPTRQLLLDEFDGIWKRQAPHHPSMNEEARTAIHSAIFFQRPLKQPPVGKCSLDPATSNDDVEGFRCPWAHPLAQRFRIWQEVRNLAIVETGKPSRPLGKEDGDRIALGLFQNGKLSFDKLRGDLKLPSEARFNLESEKRDHLKGDETAAALAAKKYFGKTWRSFGLERQIEIVTRLLEEVDERTLVEWLVENTGIDEATADRIASAFLPDSHSRLGLRAIRKILPHMESGLNYADAAKAAGYDHALLPTGELSLNGRLPYYGEWLQDDVLGSGDPRDKNDKRWGRFPNPTVHIGLGQLRRVVNALITEHGAPSEIAVEMTRAFKLSPKKLAEVEKAQAENQRKNEKRADEIRSLGQAVNARNLLKLRLWEEQNPYDPLDRRCPYTGEVINIAKLLSDETDIDHLIPFSDSWDDSAANKIVCMRYANRAKGKRTPYEAFGTSPMIDGRRYEWDAISLRAAAMKGKDWRFGPDARQRYDSQGGFQARQLNETGWLARVGKHYLAAVADPYKIHVLPGKLTAMIRGKWGLNDLLPDHNYSDAKNRKDHRHHAIDAMVAALTDRKLLHKMSSAYDDERQKIEIPLPWPTLRADLDAKLKAMTVSHKPDHGMQGQLHEDTAYGAVREPEKEDGANLVYRKSFLALNEKEIDRIRDRRLRGLVQAHVAREKREGKDLKAALQSFGERKDIPGLPNGVRHVRLTKSEKPEYLVALRNKSGKPYKAYSAGENAFVDVFEMPGGKWAGEAMSVFEANQKDAKLGWREKYPDARFVMRVFKGDLISLDYRGQKTIMVAHRLDAAANRFKLAPHNETGNLDERHNETNDPFRWLMASYNTLKGMGAERVRADELGRLWRVKPEEAARSL

SEQ ID NO: 2054 - protein, 1057 aa, unidentified
  REGION 1..1057: note = Description of Unknown: Cas Enzyme sequence
MRRLGLDIGTNSIGWCLIEDDKKIVDIGVRIFSDGRDPKSGASLAVDRRDARAMRRRRDRYLGRRSAFLQALVVHGLMPADADEAKLVADRDPYQLRAKALHVALEPFEIGRALFHLNQRRGFKSNRKADRKANAGEDGKIAEGAKALDQAMSEAGVDTLGQFLALKETKRVRLGSDGQAYDFYPQRRHIEYEFDRIWKVQSEYHPALLTEAARAALHRILFFQRPLKAQEVGFCTFAGVNGIAANERRLPKAHPLFQQRRLYEEVNQLRIVSAGAADRPLTLDERDRLILRLQDRKKVSFDTLAKKDLRLADGERFNKESENRKELIGDEVRAEMSDKKRFGTRWVHFGLDEQLRILAKLQDEENPEALLDWLRSEYGLDEAAAESVANARLPEGYGRFGETATRLLLDALKAEVITYDKAALRAFGHHSDFRTGEVLDRLPYYGELLTREIAPGKPEYGDPLERQYGKITNPTVHIGLRQLEKLVNAVIAVHGRPDQIVVELARELKLNEKEKDEHKRRIKRDTDAAIARGRKLASEGFIDNGANRMLMRIWEELNPANPLDRRCPYCAEPIGIRALFSGEADIDHIIPYSRSLDDNVGNKVVAHRSCNRAKGNKTPYEKWGPHIDPERWERISDQVARLHKSKQWRFGPDAMERIDRDGGFLARQLTDTQYLSRVAGKYLRSLYPTAQSGRVDVIPGRMTAMLRRKWGLNSLLPDHNYVENEHSNAPKNRLDHRHHAIDAAVAAVTTLSLMQQIADAAGRAEDKNLDRLFEDIPQPWPGFREELGEALRSTTVSHKADHGRKRRPSRDRDVTAARLHNDTAYGLTGDVAADGKTPIVVHRVPLASLKPADLIDPLRIPDPVLRDALYAATRDRTGKEFEQALTQFARHHPLFKGIRRVRVREPLNVIPIRDAAGRAYKAYKGDANARFDVWRLPNGKWVSDIVSMFDAHCMADKSDRRPHPAAKKVLSLRQNDMVAIERSGVTQIARVVKFSTNGSIALAADNEAGALKARDAAPNDVDPFKYIFSSGGGLKNLKARQVRVDPLGRVFDPGPRE

SEQ ID NO: 2055 - protein, 1126 aa, unidentified
  REGION 1..1126: note = Description of Unknown: Cas Enzyme sequence
MADSLSRPWRLALDVGVGSIGWAALNLKRSERSNTPGDKWVACSLLDLGVNLFDSGVEDGIPKNTARRTYKAARHRLQSVKVRKRNLRDVLVAADCLPCDSATSQRSLLKGEPRSASIALRDQMVPIDGDGSVAIPAVWAWRWKALRKPGQLTHHELGVILMALASARGQGFSEESDSRTVAPLVSELQEKISRAGCTAFGDYAAEILAKSPGATIRARNAEPNFVSRQMVLGEFRAIRNAQTRLLSPKRWDEIENIIFDQAPLAPPRPGNCPLVKEDVRLERAHPLAQRLKIVQTLRNVRLFDADGAVPEDRPTQLTPDEIRKAEKFLSTRKSATAISLFKALGIKSLRSNYHGGSRAEATDLPGNETNVAAAREDAFGAAWAAFEPSKQRDIVELALSIRGGRTADEIRAAADTWGISIDAARAFIDMLPKGRAAYGLTATNRLLAVMLEEGLSLFDARDREYPQAAQSRKFCSLPYYAIALPDHVFDGDPRADETATDEQRYGHVRNPIVHVALNQIRGLVNALVAEFGAPVEITVELAREISLSDDEKKKLLKSQKERAEMRETAAATIRECGYKPSRDLIDRYVLYCGQDRRLVQGEFAEIKCVYSGKPIESFKRLFSNDIEIDHIVPRQRSHDDSLANKVLAYRGANRNKLNRTPFEFWGHTEHWAEIWERAEFAFRKNPKKLARFRETAAQEFTGDFASRHLNDTRYISKMTRLYLERLKGTECVYATRGSITGRLRKAWELAKLLPVPAAVQSLIDISRASSRDVPIELKRHDHRHHAIDAALIGLVDHHTLQYYFEKTESQTDKRFPLPWPTFKEELAERLQGLVVRRRPEHKRGFRYQGQLVEDSRYRLRRQNEKNVLSSRTSLIGLVIDKFGNLIPGTRSAGIQFSCKEAFESSIMRIDPTGRLITLLNWETLQAIRNSYLTSRPGDGDSGPLERKKAEREATAFAWKSLCSRAATTAGGISSVRKKIVLEDPVIVGPEKSAVKSAGYAFAYVIKRNVPNTRYQLFPVAMKDAETDQGPPLKPGEVVVCKLHKGDMLSLLLESNSLSSPVYCTVQGFKSSGVLTLTTQYNAARNGGRAVNTVPEIESSDGRNAVNKVFGTWRARIVRPTVLGRLP

SEQ ID NO: 2056 - protein, 1060 aa, unidentified
  REGION 1..1060: note = Description of Unknown: Cas Enzyme sequence
MAKIRYRLGLDVGANSIGWCVYRLGTNDEPEAIVRMGARIFSDGRNPKTLASNAAERRQARQARRRRDRLLKRRQRLMQALVAGGLMPTEAAERKALELSDPYSLRARGLDHALTPFEIGRALFHLGRKRGFKSSRKERKDAEAEKELGKVSTAIAALREKITEANCRTVGEYLATQRAQRLPVRGRRSADGGYVLYLQRDMVAEEFDLLWAAQAIHHPELLTEALHAELRDILLFQRKLLPVLPGRCLFETNEHRAPLCSPLQQRFRILQELNNLRWIEGRNETALSLEQRNVLRDALLSKSKLTFAEARGLVGVPKRSAIRFNLEDGKRKELKGDFTSVQFAHPAALGERWWQLSELQREALALLVERADAAEELEEALAALPANPAPAVAAARLQPHELDAFEPLATLAQGFSRGERAGMARIQLAEGFGSLSLKALGKIVPALEASVITYDQAVLAAGYTHHSNFYTGELHRALPYYGELLGGYTSPMPRSKAETERLHGRITNPTVHIGLNQLRLLVNALIKRYGHPEGIVIELAREFGLSGERRREILKEQEEAQERNRKLDAQLEALGIRPSRENRQKLMLWDELGRSAPLTRRCIYSGRNLSMATLFTDEVEIDHILPFSRSLNDGVGNKVLCTRQANRDKGNRTPHEAFGHSPGQYRWNEIEARVAELPVRKARLFHENALETFLDGRDFLDRHLSDTAYFGRAARQYLSAICPPALIAVSTGKLTSLVRGKWSLNELLSEDRSKNRDDHRHHALDAAVIGLCSRSLIQRMATAARRAEEDGQNRLLERLELPWPSYRDDLRRMLAGIVVSHRPDHGPEAALHNDTNYTMRGAPDKRGNPLVGRRVPIDGFTKPGDVDNVADPEIREQLRACLQAPSKKEAKAAVAAYSARTGIRRVMKEERLAVIPIHDRRSGEPYRYVKGDGNYCYDIWQRADGRWEGEVVSLYAANRPGFDPTARQREDGTPLRMRLRRNDLLAIEQDGVRKIMRVAAISDGKVTMALHAEANADARDRDKESGFNYMRRSPGALREARARPVGVDVLGYVNDSGWRE

SEQ ID NO: 2057 - protein, 1315 aa, unidentified
  REGION 1..1315: note = Description of Unknown: Cas Enzyme sequence
MKHIIGIDAGTNSVGWTLIKEDNNKTELIDIGTYIFPIGTNVDDKSNKETTKNEQRRIYRGTKRNLFRYKLRRKKLKALLSTLGMLPDFTKLYKQKNKYQSAELYELRARAINEKISLDDIGRIFILLNKYRGFKSNAKKLVSEDTKESNEKKEENKKVKAGIDSLKERISESGARTIGEYFYLMHKKAKELSAQGKWHNPNELIDERAIDEDGEIILYNSRGIRRQFGRYTAREMYQKEFDLIWETQKQEYGKTNPTIFTGSKKEYEEIKKLSVEEKIKALKEFRKTNYWMIRNYCIYYQRPLKSQRKYVANCQFEKNKKVIPASSPLYQEFRIWKNLSDLRYSVEEDNIFNQQFPLEWKIILANYLETKEKIYISKPRKAKTNDDKKYIIDLLPNVKPTLKIKSEDEDGEKYIKGNLTYFVLYESLGKEKYKELKDQKKLEQLWQHIYMAKDDEWLKDILLCKWNFNESTINKLIYYGFEEEHGSYSAKVISKILPYMHEGKDEYTSLILAGNMKSPDEVKEEIVLEKKISRLRYQELRNPVVEKSVSQVIKIVNAILEKYNKEINQDELEIRIESTRELKKPRQERERMLREIRDKDKVRQEYADFLNNKREKGELIFTGRIEKFDNIINKFELWLEMGMDKNDSNFNEFKMITKKEDKEKHRLWLECNRICPYTGNIIGLTKLFSSDIEIEHIIPLSRSLDDSFNNKTITFSSINKEKGNRTAYEYMNWKNQLVDFKSRIKDTTNNFSNVKKEQFLIQEIPSEFTNNQLSNTSYIAKYVRKKMMEVSRSVQFTNGAATAELRRNDWKLNDLLDKIRFEEETGIDDIDCYLINYKQFRKDFIGWFKKRENSTDVRINFNAISPELIFEYEKQTGNNISECFEKIKAFQVFRNKAGGRKDRSDHRHHAIDAFIIACCSPSITKQLSTFNRFREEYGIPIYDEYGNLNRKMIERSFDYEHLKKNIKELLVCHNVNQKLIISRKNKHKTSNGIKEQRTYAPQGDLHKDGLYGKLKEPELQCFSKEDVYIKRAMLFDAKRKEPIDISKVYDTSLKEVLTKRIEKYGDAKKAFSKENLEKDPPYMYSINKYPNGNSISKKGNPLPVIKSVRLVNKNSRNLINLPAKDEQKRIVNEKRYAESSGNFMIVYYELEQKDKKGNPKKPLRDYKILSFFEAVKIKSKSENKKLFADEIEKDGKILGLKKECAWLKQGDSVILYKDMEDKNSIDWNSKNDISERLYIVKQIGEGVTVVKKYGEYFYGNVSLLRADKTSYNMKYPSNKFKKGIIAFSCSHVDLNAIKVRISPLGTVCLTGQECF

SEQ ID NO: 2058 - protein, 996 aa, unidentified
  REGION 1..996: note = Description of Unknown: Cas Enzyme sequence
MMMIREGNYVLGLRVGVASLGWAALVVGADNKPESILALGARKFPIGASGDVASGRESGPNERRQEARSTRTRLARRAARMRALWNLLQGAALLPAGRFKERDRVLKALDGTGDGRRPYTLRARALDQPLVPHELGRALYHLAQRRGFQSNRRARSERADEELGVVKKGIAELEEAMRAAGSRTLGEYLHCVASGPLRRRWTSRQMARAELAAIVAAQRPHHPTLTESFADRLAHVMFDQRPLKSQAGRIGRCDLEPSRRRAAIAGLDAQEFRVLCRVNDLRLVNDVGAEEVVLTVEQRRALLELLEGGDVSFAAIRKTLDLPKSVRFNAERIDDEKLIGFRTNAKLRAVLGAWWDAQPHDRRSALIDDLSTIDDDAALARRLRRHWGLDDVAVAGLLATTLEPAYAALSHKAIVRLLPRLRAGEAYATARKALYPRADTHDEKARLPLIHEAYPHLSNPLVRRALCELRVVVNAIVQKYGRPRSIRVALMRELRLGRKARERSASKMRARGKQRALAAARILKDLGVQEPPRWMVDKMLLAEECGWACPFTGRVINIRALVGGEPTFEIAHIVPLYQSLDDSFENKTLCHVSAMTGNRAVEAKALRQKSTLDRFEKLVGPFAKEKLRRIKLTSEEIISEFSEEIVASRLIDTCYTSRLAVDLLSKLYPSTRAAVQATRGAIVGLAREACGLGRIDLPDGSIRQAAREACTVALCGPAVTRQLAAAARGALPGRRRLDPEKVLPWPRFVEDVRGAVEDVVVSARVRKKVSGPLHEETFYRKEQEGYSARKHVWQLTPTDIPLVLGDGVREAIVAQLGAMKATDPRKAFVQSSNLPVFRSSAVRRVRIRRADTLFAVGEGPGRRHVAVERNHHAATLMRAGRGGQIADREIVSQFDAQARLARRMSPVVYASSAVTGMRTLSVLETLDCRKFGAGFQTIRCVSKDPSIVLTRIDDGRTLAEIASGKARIRMSVEQLRKKGARKVVVTPLGEVRTDNT

SEQ ID NO: 2059 - protein, 1397 aa, unidentified
  REGION 1..1397: note = Description of Unknown: Cas Enzyme sequence
MARKLKNINGPWYVGIDLDGTSVGFVATDEYGEVLYHKGQPVMGARCFKEALHASEARMPRTARRRLQRARGREREMERVFAPAIAPTDPDFFVRRRMSYKLMRDDIAADPAAAAWQGLLDGYPTLAHLDVDLMESDGPRDPRLVFWAIANHVVRRGHFLMEGNDVTSDNSDPSAQVEALVRELDALGEACGEAIELDGGALGGMGGSWTARELQKAVSGAVSVTGDDIDAKIARAQAKALGDLVAGYKANMDAFALKGEQIGKISVSDADALDEFLANCPDRLAPTIEAARGLYSAWRLQGLLSFAPGKTLSHNQVAQYAVYGLQLRTLKDLALKYIAHADSEDGPDEDGLALYRDFFGGPKRSGRRGYDKVLVKKLDGAKRNMGYTAYDLNVIPYEEFKKRVERLFKGTDAAKDPAYIDMVAALGEHRFLRRIHTTDNSAIPYQLHAEVVGRIIDAQGGFYPWLKDAGPHILKVLTSRIPYYVGPLDSSAAPVDAHGKARFSWSRRLPGHERAFVAPWNYEEHIDTDAAAEAFIRRMTGKCTYLVDEDVLPANSLIYERFRFLNELASIRYTEDGQDWLPLDAAMRAAVVEAASDGSVMTLSRIANILSRDFTMAHPHVKGVSDAKRMTSRLSVSAWIAGLLGVKSLTAAQKSMAEDIILWNTVFEERSILKRKVAKEYGDILDEGAIEAFCAKRLKGWGQLSERLLTGVWVDTARGDMCIMDVLEQGAPYGRFRGTSMNLMQALSDTELGFRARIDEVNATALEKAGELGIDALPGSPALRRGVSQAMKVIEDMASVAGCAPAKVYVEVTRTASNKLKGKRSRSRAQEIEAALKALDEDARRDLDAARLLRELGMFDEKEINERLYLYFRQAGKSLYSGKPIDIARDASVDYCVDRILPRSVRRDESLDNKALVLYAESLDKKDSILVPQHVQRKMAPFWMYLRRAGLMTERKINALMRTQISERMLKSIVGRQLTETSQECKLIAAVLEATYTGVKVVPVKAGVASSVRRRAGIPRSLKANRYHHAHDALIALTTGRFIETRAPMWSNNRAFYERIMRDIEAQERRGGADSELDFFSGGFFRNLVDYDTAEVLWDSDFERERLVRACSWKNLRVTFAPYEEGGAFWKQTVYSPRDSKTKLIPVKGDRDAALFGGYSAQTFAYFMIYESEGKKGNLFRFAPVPTSIASKATDSLTELYARSLCRESGERFVRVVRERILKETVYEAYGERFRVKGLKTAGPVRQLALDAADTRLLRIVERMVDGEQPSPRRDLESDAKVLCRLWARLLALAPANFPRVSKVLKLGALKTPEDVFADTEADDLAKTVRAVAESEVQVVELLSGIRGTADVRPLGGSAFAGTLSMTFDKIINDPKAGFAIVDISAAGLHERVSTLG

SEQ ID NO: 2060 - protein, 1118 aa, unidentified
  REGION 1..1118: note = Description of Unknown: Cas Enzyme sequence
MKKALHWRLGVDLGANSLGWAAILLQRDDKERDLPIGFLATGSRIFGSGANGAGRDAKSGASLAVARRDARAMRRRRDRFKQRQAALIKYLIRDGLFPADADARKALEQIDPYALRARALDEALSFPELGRALFHLNQRRGFQSNRKADRKDGEEAGKVSVGIDRLRDKIAEKDARTFGELLHILRTETNDPNKIQSVRTRLRPETGEGAKGDGYDFYPGRALVQEEFDAIWDTQAPHHPDTLTGEVHDRLYEIIFHQRPLRTPQIGMCTLVPGERRLPKAHPLFQRRRLLEELNNLKIVRPGEVAVPLTREQRDLLLLKLKDKRKVSFATLRNTLKLDSAARFNKESENRTELKGDEVAAEMGAKTRFGPRWVHLTTDQQEEIIARQQAVESDADDAAFRGWLTETYDFDPAQDKATANANLPAGYGRFGLTATTKLIAALTDELDADGKVITYDKAVLAAGLGHHSDHRTGEIFTDAEGRPALPYYGTALERHIMPGTGDPSDPDETRIGRLTNPTVHIGLNQLRRIVNRLIRAYGPPAEIAIELARDINKSEEEKREDNKRNTANRREAERRSETLRQIGQPDTGANRARLKLWEELNLGNILDRRCVYSGTQISIDMLFSASVEIDHILPYAATLDDSNANKILCTTASNRAKRKQSPFQAWGHGDLWPEIAERASRLPKNKRWRFEPDAMERYQDEESFLARHLVDTQYLSRLAREYLSTLYPERGEGSSHVWVSPGRLTEIVRRKLGLNDLLPDHNFGGGAGQPKNRLDHRHHAIDAALVAVIDRRFLKKAQTLSGIEGEAGRDKIEFPEPWEGFREDLRKTVNAITVAHRNDHGTVSKVGLKPGRDQTAGRLHNDTAYGITGEKDAKGNSIVVNRVLLTSLKSGADIDRVREPDLRRKLHDFMDGHEGKAFEARIQRFHELGDLTYRGIRRVRVVQPLKVIPIRDANGKIYKGYKGDSNYRYDVWELPDGKWITHWTDRDGIARSSIVSMFDAHQSGAAPRPHPAARKVLSFQRDDILAVERDGAPRELMRVVKYSEKQLALAPPNEAGALKARDADREDPFKYVYPSPGTLKKWRARQVRIDEIGRVMDPGFPAITSTRKARIRARAAAD

SEQ ID NO: 2061 - protein, 1337 aa, unidentified
  REGION 1..1337: note = Description of Unknown: Cas Enzyme sequence
MNNNELVVGLDVGSNSVGWAVVEMEGDRLVRIAGMGSRIIPMGPELKEYEEGKRITKNATRRQKRSMRRNHQRYKLRRAKLVALLKLIDAWPDGLAGQGEEQLPLLTGLQLYGLRAMAVDSAVTMKELGRILYHMNQRRGYKDIGDLMDEQDGAVPGEAKDDGKTVERVHISRVEMEDAKGKKVKYLVTLADGREGTSTITTMKEMEGTEQELELTTKETKRGTTIEFRLPVKTDWRKGMESLNEAIDASGLTPGQFFHQAMSNDPFYRIRERIVLRDTYKREFDRIWARQLKAHPALGDTVLRDRVVLALVPLNEVEQKKWLGKDLGTFIRDHVMYFQRPLKSQRSSKGQCRFEPQKPVMPVSSPIYQMFRIWQQVNNIRLSDRYGKDQELSAAERNLVVAHLLAHKELKADNLLRCIGRKDEPWENNLRANLPGHQTLAALRPRLKDSALWEQLEHEAARVSGLQDSLLFRIWHILYSVPMEEHRRQALAKIEGIPADELDALAKVRFERKHGAVSARAAMRLLPLLVCGEAFSVDQIPERDRKRLDMLITGEEVKGIEPEMREHLRSLGTLEHFQGLPYWKAATAIYGDHRSAMGKAYDKPDELKPLPRGFLRNPVVEQVVNEARMIVRDIWSTYGRPTSIRVELARELRQSQEERKRAFDNNKKRDKERKEVLERLRNEFNRPKPSRKDIERYELWVQQEFRCMYTGRTIERSQLFDTRDTDVDHIIPRALYYDDSIQNRVLCLREVNAAKDKQLAAVYMKAQGTGAWEAYVDRVNKLRAGRTKKKYLLAEEVPESFINRQLQETRYIGTKLTEMLQPVCSVHSTLGIITDTLKNEWGLDKVFKEVLIPRFERLERITGRTLIEHVPGRNGHGDWRIEGFDKRIDHRHHALDALTVALTRQGFIQRLSTLNQLKLTEEEKQAMKRPTWYPLPHPDLRRMVKEQLERTIPSIKNRQRLLTKAANHTRHLVDPKSGTTALRKQTKGNLRAVRGPLHNEQPLGEVREQRKWLLKDILNHLSDLRDPLAAVAPKAHGDEGYDQRFLAHAHEAQWLHAHLAKYEGSVEQLKKALKKDPLVNHRNERVEALTVLEAKYTITRNLGPMFSEKMVEKIIDKRVQRVVREHLKAHGNDPKKAFTEEALYIMNQGLKVPLRKVRCRMDDALVGEAMGRKRFLRNGDTNRKLHVEKGENHALAVFVSEQTGEREYEVVPFFDAVERRLKGLDLVDARPGYRHFLLRKNDLVYVPRPGEDVRLIDWADTDHVGERIMRMTQMSGNRIYFLKSHISSVIAFSKEEMEFGSQNAAEFEDRDEPRTKIAQVCLPTRMSRLGRVEPVPF

SEQ ID NO: 2062 - protein, 1399 aa, unidentified
  REGION 1..1399: note = Description of Unknown: Cas Enzyme sequence
MNTAVSKGSNQSEYYLGLDIGTASVGWAVTNAEYELVKKHRKHLWGVRLFDTANTAAERRLHRAARRRHQRRLQRQRLLKEIFQDKIDEVDPHFFKRLKESSYHTEDRSGSFLSILFNDESFKDTDYFTKFPTIFHLRSHLIHHPEEKPDIRILYLAIHSIMKHRGHFLFPGESLESVSSFNLLFDALLKNVEDSLQCALHVSCSPESLGAILKKKRRTDKKNELLKVLALTRTTEEEIEETPKKLITELIKALSGTPFLLSLLFENESYKESELDKIEFDKEGFEDKKDSIEVLLEPEEYALIETLEGIYNWTLLSDILNGEKFISDAKVSSYAEHKNDLKQLKLLVKKYAGSAYYKAFKDPSIQNNYAHYIGTGNKSGKKVQVVHKGKCLQEDVNKYLYNLLKPYQNDEDSILGSMLEKLEQKSALPKQRVRDNRVIPHQLHLKELQVILDNAQHYFPFLAIPDADGYTPHQKIVSMLTFRIPYYVGPLNTSHMEKGGNEGFCWMVRQQGKEDVPIFPWNWSDVVDKNASAEKFITRMTNSCTYLFNEEVLPKYSLLYNRYMVLNELNNLKINGEPISVELKQKIYNELFLKSGKKTITLKMLQKFLMTNNIINKGDTSTIEGIDNGFANSLKSYIDFAPYLETKILSGEEIEKIIEWKAYYVDDATILKEKIAQELHEKLTSEQIDDITKLVRNYKGWGRLSRAFLEDIYHVDRATGEGYSIIHMMWETNENLMELLSSKYDYLDEIQRINNETLINKKFSYESLVKPLSVSPPVKRQIWQTLLVVHELKKVMGKAPKRVFVEMAREEREKKRTTSRKESLRILYDRCKNDITFNNALLESLETKTDAELRNDRLYFYYTQMGRCPYCGGKIELDQMNNSQLYDIDHIYPQSLIKDDSLNNRVLAHKTCNGEKGNSYPINPQWQNKMIGFWKVLLDRSLISKEKYARLTRTTPLSEEELFAFINRQLVETRQSTKVVASILKNLFQDEKTEIVYVKARNVSSFRADFEIKKSRLVNDHHHAHDAYLNIVVGNAFHTKFTADARNFIKELRRGNQFYNASNIFARSIQRNGKSAWIADERYDDNRGKPKSEKQETGTIVTVRKTLQNHQVLVTRQAVEVSGALFKLQPLKKKKNLLPLKGSSQILQDTTKYGGYNAPATAYFALIEHEKKGKPVRQLVPVPILYAEQFKQDAKGLAKYCEENLDLENAKMIVPQILLHDKVQLKGFTMSLSGVTGPQIIANNEIQLVLSDEHYDYVAQTEKYLSLLKKVKDTEVEKNAEILAESLHITRQDNLQLYEQLLAKERDSIYKYRPANQAKFLEEKKSTFESLDIKAQCEVLVQIINLFTCTPESANLEKLEGGSSSGIVKFHSQITDREAKLIHQSPTGIFTKTRRIYEL

SEQ ID NO: 2063 - protein, 1073 aa, unidentified
  REGION 1..1073: note = Description of Unknown: Cas Enzyme sequence
MAYRLGLDIGTSSLGWALLDDNHIVDCGVRIFDMGNKVTQHGEESRRLDRTLARSARRRLQRYKHRRKNLLGILDRLNMLPDPNELGDSFRLYQLRAQALDQQISMPDLGRIWLYINKKRGFKSNAIVERSTKEDGAVAKGIAQLKLDMAEHGARTVGEYFFGIKAEHHQGNWERGRILGHWIDRSQYFEEFNMIWQEQSKYYPEILTADLLKEVRDRTIFYQRKLKSQKHLINNCRYETDKKVAPKSHPLFQEFRMWQQLANLRVTHGERVDEPLLPGERELLAEMLIRRGEVDLLSATVMKALKFSERDTEFNDIPDKNRLKGLDTEIKLRKALGTDFYNKQTPDFKERLWHTLYFFDDRDKLAQVAEQRMGLDKEQALAYSKVNLEPDYGSMSIKAIRKLLPFLRQGQRYDQAVISAGYEHHSFDRIKKAKDRELEDEVPPPDPKQIRNPVVLKSLHQVAGLVNSLIKEYGKPEVVRIEMARALKLPRTKRERIRLDNLIRENERRQYAEILNSHGIEVFWKDPLIDKYRLWLELGCEQTDIEDFSRFSDKYRKEHPEKYKLWLECDRISPYTGKTISLSRLFSAEIEIEHIIPYSRSFDNSFMNKSLCERSENMRKKNKMPREYMTDPEFEALKRRIKTLPQPKRDRFLETEITKDFLNSQLSDTGYISKAAVELIAQCIQKVEEVPGQATSRLRKQWRLNDLLHAPENVESAYAINKELSKNREDHRHHTLDAIVVGCTDRSMIQSLARDSQFRENGVPTNDMFIDMPYDEFKADIAECLSKVFISHENRKRLLSASFNRYRHWKKDQPKPKQRLLAPRGSMHEETHYGYILNPENGEWVYTAKKSVAGLTEKEAPRIIDPIIREEALRHLAEFGKIDPEKAPLRIEKKMYGEYRYVNVRHVRLAVRATKMVALRPKYNPELFVPTGNNFCLALYEGEVKGKTKRTYRSVPFLEAVKKSQAGERFFPEMVIEAGNEFRLWMVLKAKDCVILYDNHPDEIEWDNPRWLFDRLYYVVKWSGTQGTIILHKHNIAEDDPDKSSQPIVKRPAPNTFSGYKVKVDRLGRIVKI

SEQ ID NO: 2064 - protein, 1044 aa, unidentified
  REGION 1..1044: note = Description of Unknown: Cas Enzyme sequence
MRRLGLDIGTNSIGWCLIEDDARIVDIGVRIFADGRDPKSGASLAVDRRAARAMRRRRDRYLGRRSAFLKALVEYGLMPTDAEEAKLVAERDPYELRARALGGRLEPYEIGRALFHLNQRRGFKSNRKAERKTKDAEDGKIASGAKALDQAMAENGADTLGQFLASRETKRVRMNGENQDYDFYPQRRHIEYEFERIWVEQTKYHPALLTETARTALQRILFFQRPLKEQEVGVCTFVHSERRLAKAHPLFQERRLYEEVNQLEITTPGEANRKLTTDQRDLLVRRLKLSKAVAFDSLGKLLKLEPGQSFNKASETRTQLAGDEVFAVMSDKKRFGGKWAHLDRDRQWVIVERVMEEETPEVLHAFLTNECGLDDEQAEAAARVSLPELYGRLGPTATARILDELKKEVITYDEAVRRAGWHHSDDRTGEILPQLPYYGELLTRDIPPGTQHPDDPPEKRWGKITNPTVHIGLRQVEKLVNAIVKVHGRPDMIVVELARELKLNEKDKEVHNKRIRQDTAAAIARSKKLEEEGFPDTGANRMLLRMWEELNPREVLDRRCPYCGNPIGMRMLFEHEADIDHVIPYSRSLDDSAGNKVVAHRSCNRAKGNKTPYEKWGHDEERWKTISARVARLHKSKQWRFGPDAMARVEKGGGFLARQLTDTQYLSRLAGRYLSSLYAEKSEGSVYVVPGRMTAMLRRLWGLNSLLPDHNFVENEHSNAPKNRLDHRHHAIDAAVTAVTTRRLIQEIARAAGQAEDKDSDRLFEKLPQPWDGFRDELGERLARVTVSHKPDHGRKARPSRHRDVTAGRLHNDTAYGLTDETAADGKTPIVVHRVPLMSLKPGDFTDPIRVTDTELRDALYRATAGRTGKDYDKALADFSYKHGVRRMRVREPLNVIPIRDKSGRAYKAYKGDANARYDVWRLPEGKWVHDIVSMFDAHQRDANDRRPHPAAKKMLSLRQNDMIAIERDGGAPEIVRVVKFSTNGAVALAPGNEGGALKARDASPVDVDPFKYIYSSGGGLKKLKARQVRVDPLGRVFDPGPRE

SEQ ID NO: 2065 - protein, 1065 aa, unidentified
  REGION 1..1065: note = Description of Unknown: Cas Enzyme sequence
MAKRLGLDIGTNSIGWCLVEYSEDHPIGERIVDIGSRIFSDGRVAKTGESLAVGRRIARGMRRRRDRYIGRRSAFLKALVEHGLMPDDSEEAKLIAERDPYDLRARALDEKLTHHEIGRALFHLNQRRGFKSNRKAERKEGEDGKIYSGAKKLDAAMQQAGSRTLGEFLKARSTKRVRMGGENQDYDFYPQRYHIEQEFEAIWNKQAEYHPDLLTQEARAALHRILFFQRPLKEQEVGLCTFVGEADVPSDERRLPKAHPLFQERRLYEEVNQLEITTPGEVSRKLTQDQRNTLILYLRTRKAVSYSSLAKQLKLNPEQSFNKASETRSKMLGDEIYAAMSHKGLFHDRWAHFDMEERWAILERLIEEEDPDALHAFLRDDYGLNDEQIGQAEKAVRSLPEGYGRLGPTATARILDKLKNSLNEDGTVITYSKAVEECGWHHSDHRTGEILDKLPYYGELLTREIPPGTQNPDDGVEKRWGKITNPTVHIGLRQLEKLVNAIIKVHGRPDEIVVELARDLKLNEKQKEAHNKRIRATTKAAEARSKKLQDMSIPDTGSNRMLLRLWEQLAPDNVVNRRCPYSGEVITAEMLFNGQTDVDHILPYSRTLDDSVSNKTICLSNYNKSKGNKTPWEKWGGTAQWDVIVEQVAKLDKSKQWRFQPDAMEKFEKEEGFIQRQLTDTQYLSRMAGRYLSYLYPSKEEGSVYVIPGRMTAMLRWLWGLNSLLPDHNFVENEHSNAPKNRLDHRHHAIDAAVVAVTTRGLLNEVAKAAGRAENEDLDRMFKDLPQPWDGFREEMSEKLLRVTVSHKADHGLTKKGLADQQQTSGQLHKETAYGLTDEVNAKGDAIVRYRVPLDSLTPKDLSDERLITDADLRNALKQATQGCEGTAFKNALATFASRPGPYQGIRRVRVRKPLQVIPIKDKANKAYKGYQGGSNSRYDVWRLPDGTWKHDVISTFDIHQSDFDEMARRPHPAAKKVLSLRQNDLIAIEKDGNPRQIMRVQKYGQNGQIFLIEHHETGDMVKRDKDPGDPFKFYGPRASTLKKMKARQVRIDPLGRVFDPGPRE

SEQ ID NO: 2066 - protein, 997 aa, unidentified
  REGION 1..997: note = Description of Unknown: Cas Enzyme sequence
TTSTLAQEKGLKTFIEVLADFNADGHIGFRNVAALKGKGVPVPTRDIITQELDTLLSTQQTYHPETLTDQYCARIRAAVLYENEKIVPEPDNCPYFPDEKKLPRCHFLNEERRLWEAINNARIEVPSQAPGSSYIRYSRTPFSDEQRKTLFSIARSGKTLTVPSIRAIFPSLKQSTIILQGKEKSAQKIVGFRFTSLEEKPFWNRLTQEEQDSFFFAWTNIPDDEQLRSFLIETLHLSTAEADDALKTIQLIGDYGPIGKTATKLLMKHIEDGLTFTEAIAQAMDSGELVDHSLIETQSSLPYYGKVLTGSTQALAGKYWHSAFKERREHSGFAKPHTNADEERYGKIANPVVHQTLNELRKLVNEIMEIFGSKPEEIVVELAREIKVGAEERDRISREQGVLEREATRIWEEYCAPNNLSRKYIEHFRLYADQRFKCPYCLKAISVTDIATSNVDIDHILPKEDTGDNSYGNKVLAHVHCNREKGKRTPYAAFSASPLWGQIMHDLRDNPIMRLKRKKFEITDEQYAKYLASRGFASRFISDNSYIAKATLEYLRCLYDEGQQRFTAVRSLNGRETSILRRAWNLQGIAEQLGTKHVDKKATPTTARKNRNDNRHHALDATVALYCTRSLIKFINTQSNTRVLAQEIERDLPVPNHQRYPNLTKEEYKEIFRKEILAFMELSTFVSYKSDHALNGQLVKDTMYSVIGANPHGNELVFVVNKRVREIQVKDGSTAEVRSAIQGKYSKHHPKWYSPSLKERIEAIQARNETIIAQYEAMLTKAEDALQETNRELIASEKKPLEISRKTISKRALEMTGGAYSLLSNNSRIKTFVVKEPTDSRTGSAFDTGSHLCLDFYHDTNGKLRGEIIRKVQAMNPNFQPTYKKEGHALYVRLYQGDVCEVRAADPTPAESESNTERTTRTRLPNAKLGRTFIVINTFTERESGFQVFYSNLAKAKRGQDGSFTLGSVQSLDARKIQFSPAGLVQYVSPLLKDKEE

SEQ ID NO: 2067 - protein, 1531 aa, unidentified
  REGION 1..1531: note = Description of Unknown: Cas Enzyme sequence
MAKILGLDLGTNSIGWAVINAKMANGKVEEYLSIDDTGVRIFPEGVEPTTIGQGDKEQSKNASRREHRQMRRQFYRKKLRKVKLLETLIDLKMCPLSEEGLNQWRKWYKDKKTEGKQFPTEDAFVEWLKLNPYELRAKALTDTLSLMELGRILYHFIQRRGFLSSRKGTEDGAIFKGKDNMSGIDATRSLINGQTLGKTLYDISFKEGEKYNRKKDEEGNELRVRARYTQRDMYISEFQQIWEKQAETLGLDTKEIKIKKVRFLDGNPGNNRNRKKISGYYKTYGKENVLIEGKRITTFKYIPLKTFLAGEIEVENEQLKFKSNESLLFWQRPLRSQKGLLDNCRFENKLPVIMGNGALRMKNGKVLTRSKKPCPLSHPEFELFRAYQLVNNIKYGKGRLLTKEQKDLVLDLINSKDSSFNFDLIPKALNLTYEKFNFEGDQKIAGNTTIKKLKPLFPDDVWNADYEKIWHYFYFYDDNDKLFAKLKKDFSLKTNDPDKIAKIRLKEGYSNVSLKAIRNINPFLEKGYSYSDAVILGGIKNAFGKRWEYFEVDDFIEGLEKDVIGILHENNKEGEAIEKVKSYLSDPFNSYGFTKDDPCFTQLYHHSQEISEKELQDFVPEVENLRNPIVQQGLQEMRRLVNSLLNKYRVNNPDFKFDRIHVEMGRDLKNNKTKRRELTLKIRENEQKNDEARKRLAEFGIRPTRDNLLRYLLFDEIQRHISGPVLCPYTGKVISVSDLLGGGNTVQIEHIIPYSVSLDDSFANKTLCEAKFNSLKAEKTPYEFYLLNPDPKLWGIKKYENTEDGWSAIAERAFKLLPYPKARRFTSKKKFEKATFIERQLNDTRYISRKAVELLSAVCEDVRMLPGQVTAELRHLWGINNILNPVNGFENFKDEVRGEERLAYYVVADENNRVVDICRKTNDRPNAVNNQLVISGSADKGSFTSKYLSLKVDVPELSNGNYWALFNVSEPHSFQPVFADKPESNEEQIVLKGRVEKEIFINDSVNKRIKTPGYGNGSYWARFSIVNKEFKFAEGRGKIKATGNKIALFGEVKEGLFTCHIYHCDTNLVDGKYWVLLELDFENAEFTRTVNPKPEVDERQLLSYATVDETGAMAADPDPGYQVKTNQPTGRYYCTFDIQSVDETFFPMENEAPKFQKDQRLTEAVVWVDEATGEIKYDPKKNRDDHRHHAIDAITVALTEQGYLQRLSTYHAKNENAKRGIDSTENFPEPWEGFARDVKKAAEAMLISHKQNNKVLTKISKTVTKNGEKHRSVGFAARGQLHKETVFGKRQPPNRDEAYHIRKPINGLKDKKQIDKVVDDKIRQLILDHLRDNCGVNISNDKFSVPKDAFFKDGQPRLFLPNRKGGEPVPVKKVRMRENIGNAILLKANINQHVNPRNNHHVIIYKDHDGNLKQCVIQFWTVVERKRQGVKIYKLPEDGESVVTTLEINDMFLLGVSDEEYESSKSNSAILSRYLYRVQKISDMYYNFRFHLASTLDKKEEEIYIVSMKAWQKYNPIKVKIDPLGNIKRIN

SEQ ID NO: 2068 - protein, 1553 aa, unidentified
  REGION 1..1553: note = Description of Unknown: Cas Enzyme sequence
MKKILGLDLGTNSIGWALIEHLFSDRNGRILGMGSRIIPMDQASLGDFEKGNPVSQTADRTSFRGIRRLRERFLLRRERLNRVLYKLGFLPDHYSRQIDFDHHLGQFLDHSEPKIAYHLNSETGKYEFIFKSSFDEMIEDFQKCQPQLFENNKKIPYDWTIYYLRKKALTFPIAKAELAWLLFHFNQKRGYYQLRGDEEEENKNKLVEFYELEVIDVLDSGDKKNKDEIWYNVILENGWIYRRTSRIPLDWIGKTKEFIVTTDINYDGSIKTDKDGKEKRSFRSPGADDWTLIKKKTEAEIERSKHTVGTYIYDTLLKCPGQKIKGKLVRTIERKFYRDELRLILEKQQNFHPELQDRKNYSICLEELYRNNQDHRIAFGQKDFAHLFMNDIIFYQRPLKSKKSEISECRYESRKYMDKEGVLQTEALKCIAKSHPLFQEFRLWQFLQNLNIYQREKYVDGRLYTDVNVTTDFLKSEDDWVALFDFLNDHKEIDQKAFLKYPGFNLKKNAELYRWNYVEDKTYPANETRSQMLAKLKAANIPTEVLTKEFEELIWHILISIDDKNELEKALTTFAGNKGLPKEFIENFRKFVPFKKEYGAYSAKAIKKLLPLMRRGKYWSEESISNETKNRITAIVERLDSIEYDKIKIESVIDDDIPKQVLKSFINCRNPLTSLNTYQACYAVYGRHSEEEEVTKWELPTDIEHYLIHTFKQHSLRNPIVEQVITETLRVVADIWKQFGNGQKDFFDEIHIELGREMKNTADQRKRLTSVVSENENTNLRIKALLAELKNDNTIQNVRPYSPSQQEILKLYEEGVLSAVNDIPEEILKISKNAQPSSSELTRYKLWLDQQYCSPYTGEVIPLGKLFTSSYQIEHIIPQSRYFDDSLSNKVICESEVNKDKDNKTAYAYIKESHGKIIELDFGKKVTLFSLDAYEDFVKNHFAKNRNKMKKLLMEDIPDDFINRQMNDSRYISVLIKNLLSNIVREEGEVETTSENIAACNGSITSILKQDWGLNDVWNELITPRFERMNDLTKSNNFGQWTNKDGKRIFQTDMPLELQKGFTKKRIDHRHHAMDALVIACATRNHINYLNNEHARQKDDKIRFDLRNKLRRIEEVEIDKIEYGQKVRKKIKVAKEFYKPWDTFTQDAKHKLSTTIVSFKQNLRIINKTSNWYQRWEKQDDGSLKKLFVKQESGDHWAIRKPMHKETVTGLVQLRFKKIVQLTSALDQWEMIVEKSLKNQIRTLVIQGFDKPKLRKFFKELGDKWNGNIISKVEIYYFETEMVASRSSINESYNTNFIKSITDTASQKIMLNHLEKYNEVKDGKVIEHPELAFSPDGLDEMNRNIVQLNNGKFHQPIYKVRSFEPKGNKFNVGTTGNKNKKFVEAAKGTNLFFAIYQNSEEKRSYESIPLNIVIERQKQGLKPVPEINEKGETLVFYLSPNDLIYVPGEDEKNNLQSLNLRNFTQHQTSGIYKMLSSSGTQCFFIRNDIASPIWNKVEFSALNKTERSIEGIMIKDVCWKLRINRIGQIIAVNEKPVNIEPAKIEEFPTGVNL

SEQ ID NO: 2069 - protein, 1012 aa, unidentified
  REGION 1..1012: note = Description of Unknown: Cas Enzyme sequence
MTATSQQAATPIRAGNYVLGLQIGVASLGWTALTLDAEEKPVAVLAMGARKFPMGATGDIERGRETSRNERRREARSTRVRLARRAERLRRVWDLLVGAGFLPRAKFRNRDATIKALDADFGDRAPWMLRAKALDTRLTPYELGRAIYHIAHRRGFQSNRRGPANQNEEKELGVVKQGILSLEEAMASAQSRTLGEHLARLDNRTPLRRRWTAREMIRVELDAVLAKQREHHAALTAGYCTRLAAAILTQRPLKSQANRIGKCDLETNKRRAAVASLDAQEFRVLARVNDLRLVDDVGAEPVELTPAQRQTLLSLLKDGDATFASIRKAIKLPKTVRFNAERINDKTLIGLRTEGKMRSAIGAETWDAMPRERQSSLVGDILDIDDDAGLKRRLTDHWKLPAEAVERLLATQVEPGCAALSHKAICRLLPLLRQAVAYATARKQIYPNAGHHGEQHALLPMVQKTYKALANPLVARALSEMRVVVNALIKRYGLPAGIRVSLHRQLRVGRKAREKASFRMHAQHKIRAAAAERVLKEMGVQEPTRHMIDKVLLAEECAWTCPFTGKAISMRALVGGDPRFEVVHLVPLYQSLDDSFANKSLCHVSLQPEQKALRQKDSKAIARFEQFTGIHAKDKLRRVKMTDEEIKEYYSEQMVAGRFVDSCYASRLAVDYLAQLYPSTRTAVAAVRGAIVGYVREGCGLGRFDLPDGSYKVRAIEAAAVAMCDSTIVRRISTAAKAAPPGYRRLRPGIVLPWPRFTEDVRNAAHDIVVSARVRTKIRGPLHEETFYRRHAEDGKERFSVRKHLWQLTVQDLALIEGVHVRQAVMTKVAELGGGDPRKLFAQRDNLPTFQNTVVRRVRVMRNERCYPVGRPARYVSTERNHHAAVFLNDKGKTDRVIVNLFEAYKRKATKQPVVQYPTGVRALGTLAVGETIRLEGQLWTVRCVSLDPPVVLTPLDDGRTLAEITESNARLRASVEQLRKRGAEKIVIGPLGEIRRAGLHIGSAAAPAAAE

SEQ ID NO: 2070 - protein, 1022 aa, unidentified
  REGION 1..1022: note = Description of Unknown: Cas Enzyme sequence
MTPVVREGNYVLGLRLGVASLGWAALTLDEHGQPISILAVGVRKFPVGASGDVASGRESGPNERRQEARSTRVRLARRVSRLREVWTLLQSAGLLPPGAFKDRHRILAVLDGQDDKRPYRLRAEGLDRALLPHEFGRAVYHVAHRRGFQSGRKSPEKDDEELGVVKAAIAELSQAMQAAGARTLGEYLYHLKDRPLRRRWTARSMYQDEFDRLVAAQREHHPVMTDGYVRRLRHALFFQRPLRSQSHRIGRCELEPPRYRAQMAGLDAQEFRVLCRLNDLRLVDDVGAWEQRSLLPGERLALLELLRDGDATFPAIRKALGLPRTVRLNAENIDDERLIGFRTVAKLRKVLGAEAWEALGDERQRGLVDDLCNIDDDAGLRRRLSARFEPAAVEALMSVALESGYASLSHKAIARFLPRLRAGTAYATARKEHYPAADLHEVVAKLPLVHDAYKYLSNPLVRRALSELRVVVNAILARHGRPRAIRVTLMRELRVGRKAREIAAAKMRARTKQRAEIAARLSKDMGVQEPQRWMVDKVLLAEECGWVCPFTRKVISMRSLFGDPQFEVAHIIPLHQSLDDSFENKTLCHVSALTGNRSVEPKALRQAKTLEQFDKFKDMSVAAKKKKGKKEKRGEPRVHEKARRIRMTPEEIAKEFSEEILASRTVDTCYASKLAIDYLSRLYPPTRAAVTATRGAVTSLVREGCGLNRIDLSRGSHRRAAIDAAVVAVSGPTVVRRLTSAALGALPGKRRLDPGKVLPWETFARDVAEHCERIVVSARVRKKVSGALHEETFYRLDGKDERGKAVYSVRKHLWQLTLTDVELITGSEVRSIVAARLQELGQADPRKAFSNTENLPSYRGHRVRAVRIRRTDELFVIGEGAQARYVAVERNHHAAVFLRPARGGKLIADRVIVSQFEAQKRLSKKESVIQHPAGMQPCESFRTLAVTETLECPWLDSLCRYQTVRSVSKDISIALTASDDARTLAEINANGDKIRMSVEQLRQKGARKVVVTPLGEVRPAGD

SEQ ID NO: 2071 - protein, 1078 aa, unidentified
  REGION 1..1078: note = Description of Unknown: Cas Enzyme sequence
MSHTLGLDIGTNSIGWCLVEDGKGIVAMGSRIFPVGVKEDSYAKSGTEESRNAARRTARGIRRGYARYKLRRTELEQLLTANGMMFDKTVSLPTKQLYSLRRDALDRKLELEELGRIFFLMNQRRGFKSNRKEQAKGDEEKKLTATKQAMRDFEARMHAAGCRTAGEYLATLFDDLPENWHNENEPKERIRERQRVRRELYQQEFDLIWEKQQQYHPQVLTPELKHQLRDRVIFFQRKLKSAKHLVSKCRFEPAKHVVPRSHPLFQEFRILQALSNIRITDRDRVNDLLTMEERDALAVQLGQAEKVNVSLIKEWLDYPRSARINDLGDLRGHTTWSRIRKAVGDDWFEEQSKEARLKLWHTLYFAADEGWIEEYAQRALGMNDEQAKRFAEVNLELDYGSISHKAAQKILPFMREGYDFAGACEQAGYHHSQNELDNPARELKDKLTGADIDELRNPLVQMTVNETARLVSAVIKQHGRPDMVRVELLRDLKKPKAKRETMRRDMLAKEKQRDAYRDFLKEKGIISNPYPSDIKKFELWLELEYSESDVTRLSPDMDLKAFKKFAEAVKPADKEKYRLWLECERISPYTGKAIPLSALFTEAYHVEHILPYSRSLDDSFANKTLCEDAVNTEKGNLTPLEYYEQKRTADELKAFKQRVKNFSEGKLAKFLATEVKDDFLNSQFTNSAYIGTEVRKLLRKAFKDVRVTNGQLTGLLRNKVWNLNTLLNTADGQKNRDDHRHHALDALVIACTTQSLVNRISRESQFDFRGVQRVPDVGLPWNTFRVDAAEKLNAMLVSYKGGKRLLTTKTNKYRHSMAHEGKPEKWQRTKAVRGPLHEETLYGRITLQHKGSKEETYVVRKALTSLTKPEQLENIVDPVVRKTVQDHVAKHGSLKEALKMPVYMPVKKENESKLVPIKKVRLRTNAEELVELRPGTYVEPGNNYCIAIYEDRRGKRDFRTINFLEASKRALHKQPIYPSELDGKQLLMTLQQKDLVILYDEHQDEIQWHDPNWLANHLYMVKSFDRIGAIRMVLHKRSNANPNFPKLYPAGTTYTKKVSSFRGVPVAVDALGQITKVQ

SEQ ID NO: 2072 - protein, 1077 aa, unidentified
  REGION 1..1077: note = Description of Unknown: Cas Enzyme sequence
KERRETRSARRNADRRKRRMRKLLNALCREGFLPPYEDGSVDAYFAGLDIRLAAKNQHNLDSPDPHTLNSTLPYYLRKRAAASPVGDPHEVGRALYHLAQRRGYKSNRKSGDDKDGVVSASILEISDEMAAVGATTMGEFFSYHDAGEERIRNRYTSRAVVESEFEDICRTQSHLISPDLRKELHDIVFFQRKIKGNKGQIGLCELDPSQRRCSWSRPEAQEFRILQSVNNLVLIEDGDERELDSSEREMIIEALEGRTGELNGRHEMSYARARKIMGAPRGSKFSIESDKDKVMKGNSTVSKIVGAVGQSTWNSADMVLRESIYEALVSYEKEWALAKWAKRHLGVTDDRAEAFSHITLEEGYCNLSLDAIYHLLPYLEEGFHYSSAVKEEYPDHFDMTSGANLDFLPPVESVISDRRNPVVMRSLAEFRKIHNALVRKYGKPGSVHIETGDEIKKGKKEKEKEMERQSSGRKLNTAASDYMVKYRSGNGAAWITDKLVVDDRAILKVRLAIECNWICPYTGKSFTIEELMLTGKYDVEHIVPRCKSFDNSLENLTICCCNFNRDKGSRTPGDLYPHDSNEFIAMTERVKRFGGKMVDEKLKRFKMTSREADEMYDDFSRRNLNDTRHTCRLVKSYVGYGFENPFRQVRTVPGVVTAKIRELLGIEKDREDHRHHVVDAIIVGLADFRTTRRVIDIIGLEGLDREHSGLSFRNFSNVVDDIMEARGKVLASHKVTHRVRGPLHEATVYGREHEHMVMKKKGDTYVEDSKLYRHVPTCLDGLDIKHVGDIVDEAVKMAVCDKIFEHRSKGVGPVDKFSEESKDGALPSVMREPVRRVEIYSKGVSSWVNLWDISHAQVDSIVDAEVKYAIKMKIVGKANLSQIFNLKDNATLPVICRKDGTVENYVKKVRVKKTKNTFTVGSGKHARNCMNETNHHMEIVALLDNDGNEAKWKSVPVNMMEAYRRKASGEDIVNVNHGPGTTFKYVLYVGDTFFFREENKMGSGPFVIRSVESSGTVTFSEVHDGRKRDVIKKAGKWGSMRSDSLRRSGFEKVRVSPIGEVTARAVEAQPVISRVNS

SEQ ID NO: 2073 - protein, 1081 aa, unidentified
  REGION 1..1081: note = Description of Unknown: Cas Enzyme sequence
MARIWGFDIGTTSIGWAVIEHEIANSESGQGAGRILGMGVRIFPEARDPDGTPLNQTRRQKRMARRQLRRRRERRKALNQALADAGLLPPFSKDKDSEWSRIMALPPLPIRARVLKERVEPHELGRALYHLAKRRHFKGRDLEESDSPETEDAEEKAASNARERTIAELKATGKTLGEMLATTPAHERSRGIHALRSHVADEFERLWSAQAAHHPALTDTLKAHVADTIFAQKPVFWRKSTLGQCRLMPGEALAPKGSWLSQQRRMLEKLNNMEIASGNRRSLDAEERAAVLAILQTQASMTWGGVRRALKPLYAARGEKGMEQRIKFNLELGGEPKLLGNPLEAKLAAIFDDGWETHPHRQAIRNEAHRRLWSRDYEEVGQRVVIRAASERADRERQIVGELIDDFGISETQATALAALKLPTGWEPFSTKALEAILPELERGERFGTLMVSPERAQWREATFPNRDAPTGEILDKLPSPTKRRINGRPNHAGEAEIGRIKEIRNPTVARTQNELRKVVNNLIDAFGKPDLIRLELTRDVGLSKREREEKKAGIAKNRRRRAEARKDLEAKGILEPASRDIEKWVLWKEGQEKCPYTNDPISFDALFRRGEFEVEHIWPRSLSFDDSQGNKTLCRKDINIAKGNRTPFEFFRSRPDEWDAVKRRMDEMTASKAGPGFPRGKVRRFVAEEIPKEFTARQLVDTGYAAKQAVALLKRLWADVGEPNQAVDFGIDEELRRRKVLPVTSKVTAQLRKLWGLNNILSDDGQKTRADHRHHAVDALAVACADPGVTQRLSRYWQQKDDPRAEPPRLPPPWPSIRADAERAVEAIVVSHRVRKKVSGPLHEETIRHPIDGSGRPGSSDPLLVARKPVAKLTPSILASDEAVRDPHVRVILQEWIAEHGGDAKKAFETFPTVSPDGPPIKRVRVGERRQLKLMAPVANGYADAGLNHHISVYRNAAGKTEFEVVTLFEACRRISKRQPVVSRSKAGATFVVSFSLGETVELTADNGERTRWVVVGIEGDGRAALSPLNDARPGDAKTAKAAGFDSARVTFRPRIGGLMKREPRKISVDPIGRVRPAND

SEQ ID NO: 2074 - protein, 1209 aa, unidentified
  REGION 1..1209: note = Description of Unknown: Cas Enzyme sequence
MVKILGIDTGTNSLGWGIVQKDEEGNYTLLEHGVNIFQEGVKIEKGIESSKAAERTEHRSVRVHYWRRKVRKIRLITILSHANLCPPVSFGMLREWRTKKVYPADEAFLAWQRTDDEQNVNPYYYRYLCLTKRLDLSDLSQRYILGRALYHLNQRRGFLSNRKESTKESEEGKVKEGISRLSEDIAAAGCQYLGEYFYTLYQKGERIRAHYTARNEHYLAEFRAICAKQQLDAELVGKLEKAIFFQRPLKSQKQQVGKCTFEPKKARCSTSHPLYEEYRMYAFINNIKVKTPKDDDLRPLTPEEKEQIIPLFMRKSKPSFTFEDIAKKIAAGKKNYAYAGDKGDKPYKFNYHMDTNVSGCPVIAGLRDIFGEKWVDAVCEVYTLAGDKSRLEIVNDIWHALFFYDDDVKLKEFAQSRLQLSESDAEKFCKIKVAQDYAALSLKAIKKILPYLRDYGLIYSEAIFLANLCDVVPSYIWSTAEMRQAVIENVIEVMHSDEADVDGFTTEQRVKTFLKDTYFVEDKDLKKLYHPSMIDIYPRQRRNDKGIYQLGSPRINSVRNPMAMHSLFRLRKVVNQLLAEGKIDEETVIHIEFARDLNDANRRKAIQDYQRENEKERETCRKNIQELFAERDMVYTPTDTDVLKYQLWEEQGHVCLYTGESIGLTDFLGSNPKYDIEHTIPRSVGGDSTKMNLTLCQNRFNREIKKAYMPSQLANHEAILQRIESWKEKYEELDKRIRKLRGSSAATKEAKDAIIRTRHLLSLRRDYWRGKYQRFIMKEVPEGFSRRQGTDISVISRYARLYLRSVFHKVFIVKGIATSDFRKIWGIQEEYEKKARVNHSHHCVDAITIACIGPNEYAKLAQYYHDLEAFEKYGNERPSFEKPWPDFVNDMKHIQDDLLVAHYTQDNMMKSARRRIMTPEGKKLAKGDVARGSLHLDTYYGAIERDGEVKYVVRKSLNSIEEKDVKNIVDDVVREKVEKAISENGGLKKAVEADAIWMNKEKGVRISKVRLYAGSVTRPINMRQQRDVSVHEYKRQYHVANDRNYMMAIYVGKTDKGKEKREFELVNNLMAADYYRRSNDRRKVGDTLFPLKSKKGYDLTYLLKIGGLVLLYEESPEEVWDLTANEIQRRLYKITGFSSMVITGNAYGTISLVHHQDARPSSDVKLKNGAYVHNEEFRAGIKELHTQFKALIEGVDFEMNELGEITRLI

SEQ ID NO: 2075 - protein, 1212 aa, unidentified
  REGION 1..1212: note = Description of Unknown: Cas Enzyme sequence
  MOD_RES 13..49: note = Any amino acid
MCRVFMARICKMXXXXXXXXXXXXXXXXXXXXXXXXXXXXXXXXXXXXXQYYPEILNDELLKQLKGRNKKSTIEVFRTCGIDIADIKGKDKRKVSFSLRADALSKQLSIEEVAFVLVEINGAISGASGYLGAISDRSKELYFEHLTVGQYLMKQLAANPNYSFKNKVFYRQDYLNEFEAIWENQAKFHKELTPELKHEIRDIIIFYQRRLKSKKSLVAYCELESFDIEINDSISGKIKIKRVGSKVCPKSSPLFQEFRIWQTLQNVKVIDRESYDETVLTLEEREMLWRELSVKSKLSKKEALDLLRGKGANRRFDLNHEELTGNTTQAKLVDKFREILVMSGHDVDFSKMRGDEVRITLVTLFKALGWNIGILDFNSSLPGGELEKQDSYKLWHLLYSYDDSMSKSGIDGLKTKIAELCNFDKEYAAVLAKVTFTPDYGNLSARAIRKILPYLREGNVYSKACELAGFRHSKRSLTREEIDAKQLADRLEILPRNSLRNPVVEKILNQMVNVVNALIERYGHPDEIRVEMARELKNDAKRREIISKNNKKAETDNRNFREVLQAEFGIANPSKNDIIRYRLYKELENRGFRTLYSDVEISRQDLFSNKYDIEHIIPQALLFDDSFSNKTLELRDVNIAKGNNTAMDFVAMRYDAEQYKARVLDLFKCGAISLAKKNKLLMRRQDIPTDFLNRDLVNTQYVARKAVEMLEKITKSVVCTNGAITAVLREDWQIVDVIKELNWDKYDKLGLTEVVENRTGQKIKKIKDWTKRNDHRHHAMDAIAIAFTTRGIIKYLNDLSSMGEGKKNIRLKYQYCDSHGKWLFLPPIAPIGAFRAEVKKALQCILVSIKSKNKVMTRNINKIKTKGGVKSVVQLTPRGQLHKEYIYGRIWQYVTKEELIGSAFDEAKIMTVANAAYRTALLDRLLQYDDDPCKAFTGKNSVSKNPVYIDARHLQKVPERVKTVLLAPQFVIRKPIDPNLKINKVIDRGIRRILQARLTEYGGDAAMAFSNLDANPIYLNKEKGIIINKVRVYENVPGVAIHFKRGRNGEILITDEQPVDYVNLRNNHHSAVYCDDKGALHVNTIPFLEVVERVGQGQSAIDKEFNHDKGWKFLFSMKINEYFVFPNVETGFNPNEIDLTDPDNYMIISPNLYRVQKLSEGYYVFRHHLETTVDESKVLKDYTFKRIQSDNNLKGIVKVRLNHLGEIVAVGEY

SEQ ID NO: 2076 - protein, 1051 aa, unidentified
  REGION 1..1051: note = Description of Unknown: Cas Enzyme sequence
MKHYDYVLGLDLGVASLGWALIEIDDNAQPISLLDAGVRCWDLNNNTAEDVTRGKEVSPNKERRDARLQRRQIYRRAKRYKKTFRILQELGLFDQGPRDSLARKAYIDKIDQQAKLWLVAHVPEAANDPWLHHNYVYRLRAAALDHPLPPELLGRVFYSLAQRRGFLSNRKGTISSDEKGVVKQAITQLEKDIQQVGARTLGEFLTKLNPHEQRIRGHYTSRSMYIAEFELIYNAQRRHYPKLLTSRARKLLYEAIFYQRPLKSQRSRVGRCELEIYLKQDADGKVTVLHPFRRAPKASLEAQRLRYMQRINDLEIISPDGEIRPLTAEERQKLYDLAEHRPELKFNDIRKALGLPAGKQSEWRFNLEAGGENKLPGNTTAARIRNILGDAWDSLGEKQKKLVDDLLAFTQDDALYKHLQKVWGFDAQTADLLVNMPLEEGFAAFSRRAIRRLLPLLEQGMRLNAAIKVAYGDHNRSTEVHDLLPPVREVFREINNPFVIRTMTQLRKIVNGVIRKHGKPARIHIELARELKEPRKKRKLEYTRQRQRQQEREEAAIQIRKALDREPKSWEIEKYLLAEECNWECPYTGRTVPGASIQERIRALFSEPSDFDVEHILPFSRSLDNSFSNKTLCYHSENRSVKQNLTPYEAYSHDPVRWKEILSRVSKFKGPYAEDKLKKFQLEEIPEDFAQRHLSDTRYASRLAADYLGLLYGGRVDAEGQQRVFTVSGKLTALVRNAWKLNSVLGSDQKNRNDLRNHAIDAIVIALASPSLLYHYRELARVLARTSCNFVTLDPPWESFHQDVNRRIETMIATFSPNRRMSGALHEETFYSLSGENTVTVRKALKNMSIHEVEKIVDPAIRAKVKNKLKALGKNDPKIFTDEKNLPAIRVRKKGSKIKRFPIKSARIFVHQRVVPIGAGHRLRYVIPGNNHHAEVYAILDANGNELKYRVKAVSLLEAWERKRKGKPIICTNHGPGTRFKCVLRKGDYIKFVKDNRLLRVVSVSDNYIAGKDVNDGRKITDIKKNKELIVVCRKRMLWSAANERTGTPKA

SEQ ID NO: 2077 - protein, 1398 aa, unidentified
  REGION 1..1398: note = Description of Unknown: Cas Enzyme sequence
MKKILGLDLGTTSIGWALVNEKENDNEKSEIIRLGVRVNPLTVDEKSNFEKGKSITTNADRRMKRSMHRNLQRYKLRRKNLIECLLENHIITDETPLFEQGNNTTFQTYRARAKAVTEEISLEDFARVLLMINKKRGYKSSRKVKDGEEGELIDGMEIAKRLYEENITPGQLLLDLYNKGKRNKPTFYRSDLQAEFDKIWSVQSAFYPEILSEDFKSSIRGFNKTQTSGAFYGVYQIYTAKNSGKEGYAQALLWRTEALKRQMDIEEVAYVLADINGAINNSSKRLAMISDRSKELYFGHLTIGQYLMKRLDENPNNSLTNIIFYRQDYMDEFEAIWEKQAQCHPELTPDLKKEIRDIIIFYQRDLKSCKNLVSYCELEHTEREITIDGKKKTILTGCKVCPKSSPLFQDFKIWQILNNLQVSVVGRQRKKIKKDKNQLSMFDDVETGALNRFLTQEEKEILYNELSIKEKLSKKDVLKLLFDNHNSLDLNYKEVEGNRTMATLFKAYQDIISLTGNGEYDFSKMPTDEVMNITSEIFNGLGYKTDFLSFNPLLEGKALEQQATYRLWHLLYSYNGDKSATGNEALLNRIQELCGFEKEYAVILSNISFALDYSSLSAKAIRKILPHMMKGFEYSEACKMAGYNHSARSLTKEELAQKEYKSHLDEIKRNSLRNPVVEKILNQMINVVNEIVKTYGKPDEIRIEMARELKKSQEERELLDAAIRKNTAESEKLRKELEEEFGIQHVTRNDILRYKLYNELKLNGYKTLYSNTYIPREDLFSKRFDIEHIIPQSRLFDDSFSNKTLEVRDINIEKGNKTAYDYVSEKYDEQGLIDYENRVEELFTNKIISKTKRNNLLMKEADIPSDFLNRDLRDSQYIARKAREILEELVPFVFTTTGSVTSKLREDWQLVNIMQELNWDKYNALGLTEQYTDKNGNIVKRIKDWTKRNDHRHHAMDALTIAFTKPSIVQYLSNMNARSDKSSSIYGIEQKELHRDERDHKLVFNAPMPLDVFRAEAKKHLESILVSIKAKNKVVTKNINKSKTKDGYQQKVQLTPRGALHNETVYGKIQNYEAEYRKVDGKFTEDIILRVSSQKHREALLKRLAEFDNDPKKAFTGKNSLEKNPIWLNADHSYAVPLKVKVYKIVEIFTIKKAVDKDLKLDKVVDNKVRAILQTRLEEFNGDAAKAFSNLDENPIWLNQEKGIVIKRVKIKAKMSSDTSVPLHIKKDLFGNTIKDAKGVALPTDYVNTASNHHVAIFVDNEGNWHEHVVSFYEATTSALLGLPIVDKNYKSEEGWKFLFSMKQNEYFVFPNEKTGFVPSEIDLTDPKNFSLISPNLYRVQKFSSSFYVFRHHLETNVDESSVLRDTTWKRIQTIKYLKGIIKVRVDHIGAIVSVGEY

SEQ ID NO: 2078 - protein, 1161 aa, unidentified
  REGION 1..1161: note = Description of Unknown: Cas Enzyme sequence
MSKKILGLDLGVGSIGWALIEIENNQPSQILGMGSRIVPISNDDSDQFQRGQAITKNADRTQKRTARKGYDRYQLRRALLTQVLRDNGMLPERMDENVIDLWKMRSDAATEGHQLTLPQIGRVLYHINQKRGYKHSKADASADAKQTKYVQEVNQRYKDIQDKGLTIGQYFYAELKNSMVKAENGVYYTFRIKDKVFPRQAYLAEFDQIMAVQKAYYPDVLTEELIDTLRNRIIFYQRPLKSCKHLVSLCEFEMRPYKKANGEMVYSGPKCAPRTSPLAQLCAVWEAVNNITLTNRNNETYLITPAQRATMADFLQTHKEMKVTDLQKILGISKKDGWWGGKAIGKGIKGNQTLVQLREALGGKYDQWLKMEVKTTSAGLVDVETGEQIEMVDAAIEQEPLFRLWHMVYSVQDKDELRKALLKQFQIDDEEVLEKLFAIDFVKPGYANKSHKFMRKLLPYLMQGEMYSAACAHIGINHSNSRTKEELENRPLAERLTLLQKNALRQPVIEKILNQMINVFNALKDKYGEIDEVRVELARELKQNKEERENAFKNNSKIERENREIEERIREMGIRPSRTRIQKYRMWEESMHQCFYCGKTISAAEFLAGAEVEVEHIIPRSVLFDDSFSNKVCACRECNHTKNNQTAFDFMHAHSLEEFEAYKARVDEAFQAHRISKTKRDHLMWRMEDIPQDFIDRQLRQSQYIATKAVEILQTAVRNVYSTSGSVTDFLRHQWGYDEILQALNLPRYQQVDSMTEQVTYDHCGQEHTEERIKGWSKRLDHRHHAVDALTIALTQQGYIQRLNTLNASREAMYSEVGQSATQRDLEKRTLLENWISLQPHFAVSEVQDKVAGILVSFRAGKRVTTPAKRAVYRGGKRVNVQTGILVPRGALTEETVYGKLGDRYVVKYPLNHPSMKAEDIVDPTIRELVQARLTAFSNDAKKAFAMPLYSDKAQTMEIKSVRCYTGLQDKAMAEVKKNAQGESIGYAKMGNNHHIALYKDKNGQYQENVVSFWHAVERSRCGLPIVMDNPKTVWDELINKDLPQEFMEKLPHDDWEFVTSLQVNEMFVLGLEDADFELAMEQHDFATLNQHLYRVQKIGTKDYSFRYHTETSVDDKYNGQTNLQLSMSLNKLKRVRSFDAYWSLHPHKVKVNILGEISKL

SEQ ID NO: 2079 - protein, 1175 aa, unidentified
  REGION 1..1175: note = Description of Unknown: Cas Enzyme sequence
MTFDKSLKNLPPVDLWGLRAKAATGERLTLPEIGRVIYHINQRRGYKHSKSDVAGDDKKQSDYLSSIKSRDDEARENNQTPGQYFYQRLVESVYETSKGGAACTYRVKNQVFPRKAYEEELKQILMTQGKHYPDVLTNEVQETIFNYVFYQRPLKSCKHLVSLCEFESREIVDEKTGRVILKGPKVAPVSSPLFQLCRIWEVVNNIELHNPKNRRKKDKGPINSSFADDRKYEPTFYLNLKEKRQVVSHLLHNEKLSERDLLKILGLKKDDGFAVDKNVAKGIKGSDTYVQLRNALGDYPKALELLRFEVHIETDNVVDPETGEVTEVLHISDSYLREPLYQLWHTVYSINDKDELAHALRHKFGITDGDVLSRMFNIDFSGKGYGNKSSKFMCRILPYLMDGYHYSEACEYVGVNHSDSITKEENEARELASSLQLLKRGELRQPVVEKILNQMVHQVNAILEAYGPIDEIHIEMARTLKQSKEKRAADNLRINAREKENSIIASRIQDEYKLRPSRNRIQKYRMWLESEHCCMYCGKPIGVNEFLAGTEVEKEHVIPRSLFFDDSFSNKVCACRECNRQKGQMTGYDFMACKGQSALDTYIDRVERLYDAYKKTKGVSGISKTKHDRLLTPYEDIPTEFLNRDLVQTQYIARKAIGMLKTVCRNVYSSTGSVTDFFRHAWGYDEILHDLNLPAYKEGGQTEIVEVRHKGQTHQEERITGWTKRWDHRHHAIDALVIALVSQAHIQRLNNLNTLKDTEGSGAYERQARNLDRWAESQPHFSYADTSTVVSGIAVSFKSGKKATTPGKRVVYKKGKRVVAQEGLLIPRGALTEGYVYGIVRVLNPKRKLKEIFSNPSLIVDKMIRESVNERLVRFDQDVKRAVASCKKEPLGKDKDGNPVSEFDCWELRVVKRYGIETVQCKNIAKVVDPHIRNLISDRYETLRLTLGNPADGKLVKAYQESLTTDPLYSDEAKHHKIVTVRMFADINQDNMMVVQRNADGKGIGFSKLGSNHHIALYRTPDGDIEECVVPFAHAVMRKNLGIPVIIQDPDTAWTLIDNLKEDVDESLLMNIPLPGWKFLFSMQQNEMFLIGLSEDEVKDMNKMQLSNHLYRAQALSSKYYIFKRHTCSLSDKGPEMLANKQCINIRSFGIIQEREIWKVRIDRLGNSIILPTYD

SEQ ID NO: 2080 - protein, 1384 aa, unidentified
  REGION 1..1384: note = Description of Unknown: Cas Enzyme sequence
MRKILGLDLGTTSIGWALIEEAEHENERSRIIKAGVRVNPLTVDEQRNFEQGKSITTNADRTLKRQMRRNLQRYKLRREQLLEILKINQLVTDKSTLAEHGKNTTFQLWELRAKAAVEKIALDDFARVLLTINKKRGYKSSRKAKNEEEGTAFDGMAIAKALYDQNLTPGQYALKFMREGGKANPEFYASDLRQEFDRIWDFQKEFHAELTADLAAKLRGLNAGRSKEVLKTAKFPAYEPKNKGRLEKMVEFLELRVKALFQRLELDELSEVFIELNKGINSTSGYLGDISDRSKELYFNKQTVGQYLWANLQKDRHFRTRGQIFYRQDYLDEFETIWETQAKYHPQLTPSLKEEIRDVVIFYQRKLKSQKGLISFCEFESKTIEVKTAAGSKKVTSGPRVIPRSAPLFQEFKLFQQINGIRIKPKGTRTELSLNEDDRMALFEELNWSKGMTPEAVLKKFGYKKEDAFLNFKNLDGNRTNAALLEAYEKIMEKTGHDIDLSKLSVPKKLDAIATVFGELGINTNILKHNSALPKEEYEKQASVQLWHLLYSFEGDDSKTGNDKLKAKLRDKFGFPEEVTGIMANVTFLEDYGSLSAKAIRKLLPHLIDGKLYSEACEAEGFSHSHAETAEERDSRTLKDQIELLRKNSLRNPVVEKILNQMIHVVNAIIATYGKPDEVRIEMARELKNNAEQRKEMFEGMNKTQREHEEIKKKLQSEYGLSYVSRNDIIRYKLYEELRHRGYKTLYSNKFIPAEKLFSKEIDIEHIIPQSRQFDDSFSNKTLEYRAENIEKGNQTAHDYIAAKRDEQGLKLYESEVYDLFKAGGINYAKMNKLLRKGDALKEGFLNRELGDTRYISRKAREILHEAIRVTSTTTGSVTSRLRKDWQLENVLQELNWDKYDKLGLTYYEINKEGKRLPRIKDWTKRNDHRHHAMDAITVAFTKPSHVQYLNNLNARDLDHKDSSSILGIEKKYLDREDDGKLRFKAPILPLSQFRAEVKEVLESILVSHKAKNKVVTRNINKFKTANGIKQQLALTPRGQLHNETIYGSAKQYVTKEVKVGGNMDEATIHQVTKKRYREALLERLMAFENDPKKAFTGKNSLDKNPIWLNEAHTEQVPEKVKLVSLETIYTIRKTVAPDLNVEKVIDAQAKRVLEKRLAEFGGDPKKAFVNLDENPIYLDEKKTTKLKSVKITGIANASALRPSHDHLGNVILNEKGDVKKSNFISTGNNSIAIIYENEDGKLDDVVISFFDSVEVSLHGEVDFSNFLPPTSKVICTLKQNEMFVFPNPETGFIPAENDFTDQSELSENLFRVQKFSSLQYPERKVREYVFRHHLETQVQRKDLNGRPIDEKAAEQIIKRVFKSLNGFKDILKVRVNHLGHIVR

SEQ ID NO: 2081 - protein, 1480 aa, unidentified
  REGION 1..1480: note = Description of Unknown: Cas Enzyme sequence
MKRILGLDLGTNSIGWALVNEDERKIEGLGSRIIPMTQDILDTFSGGKPLETQTAARTHYRGMRRIRERYLLRRERLHRVLNVLGFLPLHYAQEIDFQKHYGQFVGESEPKLNYNNRNFIFADSFEEMLNEFKQLQPQLFYTRADGKETKIPYDWTIYYLRKKALTDKIGKEELAWIILNFNQKRGYYQLRGEDDADATRTVQTRMYFDTQVIESIIDTGSVYKGLKVIQIILANGDSGKYFSKEVPNWVGLQKSIIATVDLDKEGNDRFEDDGTLKRRFSIPTEEDWEKKWKLIKIKTEKEIIGANKTVGAYIYDSLLQNPSQKIRGKLVRTIERKFYKDELIAILENQIELQPELFTEDLYSDCVRELYRNNEAQQLTLGKKDFVHLFVEDIIFYQRPLRSQKSSIGKCSLEYRIYKDTESNQVKEYLKAVPQSHPLYQEFRVWQWLSNLKIYRKEDDADITTEFLKSTDDYASLFEFLMTQKEVGHTDILKQLLTPTLRVKFQGAKAVTFNKEVDKEIAKYRWNYVFDDSKDKEEDKSKKYPCNSTGYEIRRRLAKVVNVPDGFLEITDTKEVEVKKGQNNGQKITVSLGTREHQLWQIIYSVTDKKEYISALEKFAKKYFLDKESFVGNFEKFSPFPSEYGAFSEKAIKKFIPLLRLGKFWHWEAIDSKTQDRIGKIISGEYDENIKTRVREKVINLTDNIHFQGLPIWLASYIIYDRHSEAEIAGKWDSIAELEQYLEDFKQHSLRNPIVEQVVTETLRVVRDIWKKYGKGAKDFFSEIHVELGREMKNTADDRKWLASQVTNNEATNLRIKALLAELKENSDGKLPVENVRPYSPMQLYALRIYEDGVISSKVDLPEDIIKISKTAQPSKSELQRYKLWLEQKYRSPYTGQAIPLGRLFTEDYQIEHVIPKSRYFDDSFNNKVICESAVNQLKDKQLGLEFIKNHHGSKVECGMGKVVEVFTEEAYQTFVKEHYSKNKTKRQNLLLEDIPERMIARQMNDTRYISKFISALLSNIVRADKEDDGVNSKNLIPGNGKITTVLKKDWGMDAVWNDLILPRFERMNQLTNSTTFTYWNEQYQKFLPVDYSPADSKRIEKKRIDHRHHAMDALVIACMTRDHVNLLNNQSAKSETSRYDLQYKLRNRSKETWIDKKTNEQVERAVFKEFKKPWDDFTVDAKNALETVVVSFKQNLRVINKATNNYQKWVDENGVKVKEYVKQEGTNWAIRKPMHKETVSGKVILNRIKVPKEKILTATRKSVDTSFDVKTINSVTDTGIQKILSNYLTYKDNNTELAFSAEGLEEMNANIKQFNAGKSHKPIRKVRIFELGSKFPLGESGNKKDKYVEAAKGTNLFFAIYSDEDGNRSYETIPLNVVIERLKHGLSEVPKKNEKGRTLLFNLSPNDLVMVSDERGSKIEIYKMVSCTGTQCFFIPNNIATPIVQTTELGSNNKSEKTWNGVMIKQVCMKLKVDRLGNI

SEQ ID NO: 2082 - protein, 1431 aa, unidentified
  REGION 1..1431: note = Description of Unknown: Cas Enzyme sequence
MKKILGIDLGTTSIGFAQVNESDDFKSSSIVRMGVRVNPLTTDEQTNFEKGRPISINADRTLKRGARRTLDRYQDRRSNLIDAMAKANLITKDTVLAENGKNTTHSTLNLRAKSVNEKVQKEEFARILLSINKKRGYKSSRKTPNEDEGKAIDGMSIAKKLYDENLTPGQLAYQLLRDGKKYLPDFYRSDLQAEFDKVWSCQRQFYPEIFTDEFKKELAGKGQRATSAIFWKTYNFNTAENKGTREEKKLKAYEWRSKAIDQELQKDEVAYVITEINHNLNNSSGYLGAISDRSKELYFNKQTVGQYLYQQIQDKPHTKLKNQVFYRQDYFDEFETIWEAQAKFHPELTQELKKEIRDIIIFYQRKLKSQKGLISFCEFERKEIEIERGGQKVKRTIGLKVASKSSPLFQEFKIWQVLSNVLIRKKGCEIRNLEADNQMKLSDKQEVLVFDLQAKQILFEELNIKGNLKASKVIELLGYSTKDWEINYSELEGNRTNKALFNAYLKIIELEGYDTKDLLNLKSNKDEVELDDISVPALDIKDMVKRIFESLEISTDIFEFNAELDGKGFEQQSSYQLWHLLQSYEGDDSPSGNERLYGLLNQKFGFKKEHAQILASVALSDDYGNLSTKAMRKIYPYIREQTFDKAAAIAGYRHSASSLTREEIANRPLKEKLDLVKKNSLRNPVVEKILNQLVNVVNTLIEVNSEKDSNGNINNYFRFDEIRIELARDLKKNAKERAEMTTNVNAAKIQHEKIFKLLQAEFGIKNPTRNDIIRYKLYEELKNNGYTDLYTNTYIPREILFSKEVDIEHIIPQSKVFDDSFSNKTIVFRRDNLDKGNRTAFDYIDSRLGKEKLIDFEQRIEFLFEQGKKNKDEGISKAKYQKLLKREVDIGDGFIERDLRDTQYIAKKARNMLYEICRVVTPTTGAITDRLREDWDLINIMQELNFDKFKQLGLTELVEKKDGSFKERIVNWSKRNDHRHHAMDALTIAFTKHSHIQYLNYLNARKNEAHKQHDHIIAIEAKETNVVIDDLGNKKRKFNLPLSGFREEAKKHLENILVSFKAKNKVFTKNKNKTISAKGEKIKVELTPRGQLHKETVYGKYQFYVSKDERIGLKFDLQTIAKVANPTFKRLLLERLLENGGDAKKAFSGKNTLAKNPIYLDDSRLELMPEIVKLIWLEDDYSIRKDVTPENFKDIKIIDKILDDGVKRILKKRLTDYNNNPKEAFSDLEKNPIWLNEEKGIAIKRVKISGVNNAEPLHYKKDHLGNEILDEDKNLIPTDFVSTGNNHHVAVYRDEKGNLQEDVVSFYEAVARVNQGLPIIDKTLKAYLGWTFLFTMKQNEYFIFPNEKTGFNPSEIDLLDPQNNKLISPNLFRVQKFTIKDYFFRHHLETNVEDNLKLKNITWKREGSSGISKIVKVRINHTGQILKVGEY

SEQ ID NO: 2083 - protein, 1178 aa, unidentified
  REGION 1..1178: note = Description of Unknown: Cas Enzyme sequence
MKKVLGLDIGVNSVGYALIENDSEGKDLNIIKTGVRIVNEDPNFHGNFYQGNSASKNEARRTKRMIRRGNQRFKARRDALYRILRKNSMFPSDQLLNRVGERTLYRLRAIAVSERLSLDEIGRVFIHLNQRRGYKSSRKSGQRVEEGSYLTRIAELGELTKSLTIGQFWDAYINFRCNTVDNIPSALLDWFRIRAEAEPGFRIRENIFPRDSYIAEFDKIWECQATFYPTVLTGMPGKTFRENKGTLYQKIRNEIIFYQRKLKSQKHLVSDCSFEKGHKVTPKSSPFYQEFRIWQQINNLEVTDQSNNIMPIEWEGRKRLFDALHDPDQLTKRNTMPYSVVLKILGYTGRSYHLNYNLLEGNKTYHTIFNALKKAGIEQPGRYLSFDNTQKIHSPGLYDLWHITYSLDDESDVIKTLVKRYGFTNNQAEIIASEVGYTSDYGSISTRAIRKLLPQLEEGKNYYEACVEVGYQNPDHVRREELKIHMDRIFPNSLRNPVVEQVLNQVVNVVNGIIDTYGHIDEVRVELARDLKNNAKQRRELTQKNRNLRKLNDTIALRLKQEHGFNRVSGSDLLRYRLWDETEKRCLYCGQNITVSQLYNGEAEIEHLIPWSRSFNDAMTNKIIAHSKCNRDKDQMTAYDFMSSKGETELGRYVADVNRLFTEGSGRLDSDKKVKITRAKKDNLLCKGSDIKGDFLARQLKDTQYIVLETVTRLKEVFPKVTTTTGSVTDYLKESWQLKSLIDEINIDKYRAVGETEWREEKDRENGLKKVERIKNWSKRDDQRHHALDALVVALTTQGIIQRINNANQLFETTREMKEKTFGFPIPAPDLRRKTMESLGEILVSFKKPGSKVLSRKLNIINTSKGQKEQVTWAPRGSLHKDTVFGMIRWYEKIKINKRLDEETASRIVGEAVRSAVLERLAAFNGDPAKAFKKPVFQGEKEIKEVTVLRVRFTKRILLSETLTPTEVEKIVDPVAQKLVRERIDVKGGIKQAFRDYLNDPIWQNREKGIMLKHVTVFDDGNLESVRDGYVYTKGNHHSLIYLDENGRYTDRVVSFWEAVSRCLDNLNTNGSIYPVIDRNDKDGLRFLFSMQINDLFVFDVNPEDVNFFDPLNRALLGEKMYRVQTISKGDYRFRHQYETTVSKDYDFSFKRLQSADALKTAVKVRVNHLGDIISIGE

SEQ ID NO: 2084 - protein, 1381 aa, unidentified
  REGION 1..1381: note = Description of Unknown: Cas Enzyme sequence
MKKVLGLDLGTTSIGWALVNEAENTNEQSNIIKLGVRVNPLSVDELTNFEKGKSITTNAERTLKRSMRRNLQRYKLRREQLIKVLKEHKIITDDTVLSEEGNRTTFETYRLRAKSANEEITLEELGRVLLMINKKRGYKSSRKVDTQEEGQLIDGMAVAKKLYNENLTPGEYLLILLQEGKKDSPDFYRSDLQQELDRIWEKQKTFYPEILTEEFKQQIEGKGKMNTGKIFLGKYGIYTADNKGADKKLQALQWRVKALQEQLPREEMAYVIADVNGSISGSSGYLGAISDRSKELYFNKQTVGQYLMEKLNTDPHYSLRNKVFYRQDYMDEFEQIWETQAKFHKQLTPALKEELRDIIIFYQRRLKSQKGLISFCEFESKEIEVTIEGKTKKKIIGQRVSPKSSPIFQEFKIWQTLNNIKVRNKEDDTERFLEKEEMDRLALELSIKKELKSSEVLKLLFKKPKNLELNFKTLEGNRTIAALYDAFQTIIMLSGHGEHDFSKMDATKTIQLVEEVFTALSFSVEILKFDALIEGKNIEKQPLFKLWHLLYSFEGDNSRTGNQTLIDKIMGLTNFPKEYATIIANISFQDDYGSLSTKAMRKILPHLKDGFAYGGRKERPEEPSACEYAGYRHSKHSLNKEEIENKVLKDRLEILKKNSLRNPVVEKILNQLVNVVNGIIDTYGKPDEIRIELARELKKSADEREKMTAAISKTTAEHEQIRKLLKNDFGLKHVSRNDLIRYKLYKELEPRGYKTLYSDTYIPREKLFSNEFDIEHIIPQSRLFDDSFSNKTLEKREVNIKKGNDTAYDYIFNEEGQAGIDNYLLKLDDLVKDAKISRTKYKKLKMKGSEIPDDFIERDLRDSQYIARQAKGMLEAIVKNVVTTTGSITDRLREDWQLVDVMQELNWDKYDKLGLTEIIEGRQGQRIRRIKGWTKRNDHRHHAMDALTIAFTKRSHIQYLNNLNARSNKESRIYEIETKELKRDENNRLRFKAPIEIKAFRAAAKEHLSNTLISIKAKNKVVTQNINITKKKNGTNKKQQLTPRGQLHNETIYGSSLRYVTKLEKVGAAFNEEQIAKVANKKYREALLQRLKEYNNDPKKAFTGKNSLQKSPLYLDKAQNLTVPEKVKTVTTETIYTIRKAVTPDLKIEKVLDSKVRAVLAARLKEYDNDPKKAFSNIEDQPIWINEEKGICIKRVTITGVANAQALHDKRDKYGQPILDAEGKNIPVDFVNTGSNHHVAIYRDNTGNLQENVISFFEATTRATLGIPIIDKDYRKEDGWEFLFSMKQNEYFVFPNEQTGFNPKEIDLMNPENYHLISPNLFRVQKMTSKDYFFRHHLETNVENNNDLKGITWLRYGLNGIVGIVKIRLNHIGQVVAVGEE

SEQ ID NO: 2085 - protein, 1461 aa, unidentified
  REGION 1..1461: note = Description of Unknown: Cas Enzyme sequence
FKWEKKIKKKMSSKILGIDLGTNSIGIAIRDIDRGENLQDQLEYFSSDIFQAGKGGPNQQESYASERTRHRQSRRLKDTHRRKLWATLSLLIEYGMCPMKKESLKKWSTYNKSLGLKREYPIDDKDFNSWITLDFNRDGLPDYSSPFQIRREITKRQLDLDSREDREILGRALYHIAQHRGFRSSKGETLAEAEALTDRNEMEAEPDEKTADVMAGMQESETKKMKDLIAYMEAKGLDTVGQAYASMEDEGKRIRNREGYQAVRRQFMDEIRYIFEHQPGLHDAKYKDFMTRILSEKKGEGTIFYKKPLRSQKGLVGKCTLEPSKTRCPISHPDFEEFRARQIINNIKYRPSDDAQWLTLPKNLKEEIYSNLFAGKSNRSLFHFKEVREYLEKKLQLRLHNDELGRTINYKDGQTIAGCPVTYRLKMILGNDWQTASIPGTKVRLSNKGKVSHQVCYHAVDIWNVCANSEIAEKGELEAKAKSIFGFTDQQAKQFRLMYADIRQGYAMLSHKAIANINRMLRKGYIYSDAVLMAKVPDLIEMSDAEINELMVLFESIVKPKTEHQKRVRSIANRLIAKYKSYSYTNNGRFADHDYTYLLDESDIRDVEKTTVEQIGIKEWSLMSDDEQGALLKEVQELYQQFFSSRERDYFKVPHLSDGLIDLLSEKYPSLEKSVWKEKLYHPSQIDIYQFARKEQTKDGRSLLGTPNVGSIRNPTVMRTLNILRRKLNYMIEEHIIEPDDTRIVVEMTRINNDTNLRWAINRYNEERRNQNMAISNLLSEFIPQFKHKAPEEADIDKARDYFDQIGCEFYAVSHEELNEKQLTKQHEYYDMIVTKDKVSKYGFQKDVERYKLWKDQGCISIYTGKPIRFSDLFDDNLYQVEHTIPRSKSFDDSDANKTICERHYNAAVKGNKMPTELPNYDKDEVIGGVKYTAIKPRLAYWEKKVKDYEHQVELWRYKAKQSQTKDRKDFCIQRMHLWRMELDYWRNKLDRFNMTEVKPGFRNSQLVDTGIITRYATLYLKSVFRNVDVQKGTATAKYRKILGLQSVEEKKDRSNHCHHAVDAAILTVIPVAAKRERMLQLFYEIEEAESAHHDCSQKKYELSAEVADCEIGSVAGLYNFISDRILVNHITHDRTFSDTHRKEYRNGRPVRKNGKELYSGGDGVRGALSTESFYAANKYGDEIWMVKRQSIDAFKKIEELDTIVDQHLRDNIKNTIELRMKAGDSFSKAISQPIWLTDKDGKEIKHDRNGRPLAPIRHIRCRAKAGVGFLSFEKALPLKDFIQHSSKKLVRLQNREHKQHVYTMNDSMYLCLMYEGIKKGKVDRRLRLVSLYDAAQMISIAHSRNVEQVLWNEPYYASLTDKGLTYHLSAIIKVGMRLLFWDKSPEEINQFMPQEELAKRLFVVRKFNAPSTIYVYAKHHADASENKPAHYTANQLNCLIEHRDFEITPLGTVILKEQHD

SEQ ID NO: 2086 - protein, 1273 aa, unidentified
  REGION 1..1273: note = Description of Unknown: Cas Enzyme sequence
MSRTLGLDLGTNSIGWAVIDSAHGGGVVAKGVQVFPKGVGEEGGREVSVASERTGYRSARRIKQRRKLRKQNTLKELIHFQFCPEISKKDIDLWKEKKVYPAHPGFVNWLRCVEKLPDGKEGNPYAYRWWVATHHLDLSVPENRYILGRAFYHLAQRRGYKSNRISGEEKDGKVMGAISALHEKMNGRTLGQYYYEDCFGKAPVRGEGHYTSRSDYESEFSAICKKQNLSEEMTDAIRNAIFYQRPLRSQKETVGPCLLEPKKKRVPVSHPAYERFRLLQFLNNVRIRPQGDNVPRMLNMEEREKGIKWLSSLKRTEKFEKLAKKLTPRKASCSFGEKQNEMEIQTWGFNFRKDAGVPESTTTSTLIKLFGEEYPAGIRKIYRKSGGKTDAEIVSDIWHAMYSFDDDNILNEYAREKLGLLDDNQRIEFCKPLKQGYGTLSLAAIRKINPWLEKGLIYSHAVYLANLPTIFRKAGKEWNVHTEEIASDIGQIIATQRENTAIRSAANDLRRHLIQEEVKDLSMYLSEGRNIRQCQSVLGNCIQMELGRNRWANTSEQDQENVISQALEIVKSCWDSEHGTSATVPILNQTARILHYLQEEHGIPESYLEMVYHPSVIETYPDQNEKLASPRIPSIRNPVFMRTMFRLRAIINELIETGVIDSQTRIRVEMARDLNDANQRAAIERFQRMREKMRSEYSKAIEEAGFNPTPTLILKYQLWIEQERRCLYTDQQIGLTEFLGENPAYDIEHTIPRSRRFDDSQTNLTLCSREFNREIKGRKLPQELSSKEELLDRVRKLWWPEVEKYESFCAKNQMAKRSAADKAAKDKALQNLHYNRMWLRYWKDKIRNFETTEVPEGFTNNQLVDTRIICKYAVLYLKSYFDRVYSMKASALHALKEIWGLTDKSRDNHIHHCIDAVVTASIRPSFYQELAAYYHQMDRFEQDGQSRPHPPEPWPGFAQYLNHDIFEDVLVVHHSKNPLLKPTFKKEKLHGKWVIKQGDSARGSLHKETYYGVIKPPAKDGKYSQKELACVVRKKLDSTFKDFDRIVDPVVREKVKEQKDKLKTGDTIWYDESRGIPIRKVRIYDATQPGSLIKLKSHRDISKHEHKRHLGAANESNYLVALYRGKVKGKPKASWKKVSNFEAVQASKHGIWDELLPATTNEGLEVYQILKIGMQIILKKTNDEDLRNLDQPELSRRLYHVTILEGPRTIIRHHQEARPAKDLPRCISSFPWHPSENPPGLLNLASNGLWVAVEGVDFKLTQSGQMIWIDAEP

SEQ ID NO: 2087 - protein, 1508 aa, unidentified
  REGION 1..1508: note = Description of Unknown: Cas Enzyme sequence
MTTKHILGLDLGTNSIGWAVVKREENEGNVSALSGIEDAGSRIIPMDAAMQSDFAKGNTVSQTHDRTQYRGTRRLRERHLLRRERLHRVLALMGFLPQHYADALTRYGKFKDGVECLLPWCKDNEGKPMFLFHDSYNEMLQIFWQEHPELLEGGMKIPYDWTIYYLRQKAIREAISGQELAWILLNFNQKRGYYQTRGEETETDKTKEEKYYALEVVDVVDSGDKKGKDTWYNVILKNGMVYRRPAKEKPDWVGKVKEFIVTTQLNEDGTPKTDKDGNVKRSFRMPSENDWGLLKIKTEDDIRTSGLTVGEYIFGALLRNPKQKIKGQLVRTIERDFYKDELRLILEKQKQFIPELRNKELYAECISELYPQNDAYRQSIAMKDFTYLLLDNIIFYQRSLKSKKSMIDECPYEYHECIDDKGEKVKKYIKCISKSHPLYQEFRLWQFIGNLRVYESGKDSAGRPIDDKDVTSEFLPDEESRAQLFDWLNDRTEIKETDLLTKYFNIKKPKGKGVELPYRWNYVRDRAYPCNETRGNILARLSKNNVDATFLDDKQNEEHLWHILYSVSDRTELRTALTRYAQRHSLDNDFVDAMAKFPPFDADYGAYSAKAIKKLLPLMRMGRHWNIENIAPTTKERIQKILDGEVDESIRTRVREKAMHLESIEQFRGLPLWLACYVVYDRHSEASDTSKWRSPEDIDTYLKKFKQHSLRNPVVEQVITETLRTVRDIWRKHGHIDEIHVEMGREMKNPADKRAQMTERALQNENANLRVKALLTEFLNPELGIENVRPYSPSQQELLRIYEDTALNSVDEPDDYINDILKKFTDAKARPSLSDVKRYTLWLEQHYISPYTGQTIPLARLFTTDYEIEHVIPQSRYFDDSMSNKVICEAEVNKLKDNSLGYEFIKQHHGEKVTLNGGRTVTILETDNYCDLVQKTYGKKNKGKMRKLLLEDIPAEFIERQMNDSRYISRVVKGLLSNIVREEGEQEATSKNVIVCTGDVTDRLKRDWGVNDIWNHIILPRFLRMNEITGSEQFTSVSTTGHLIPAMPLELQKGFNKKRIDHRHHAMDAIVIACATRDHVNLLSNEAALPKNHSNRYQLSRKLRRYEDVIVNRGGEQKKISVAKEFLLPWTTFPGDVEQALRNIIVSFKQNLRVINKTTNHSLRIVNGKKTLVKQTSGDSWAIRKSMHKETVFGEINIQRKKTCSLKDALQRPERIVNRDLRKKITELLGKHYTEKQIKAYFADNTDVWQDVNLKKIEMYYYTKETSDRFFATRKPIDTSFDKKSIEEKVADTAIQKIMLRHLERYDGKADLAFSPDGIDEMNRTIKELNDGKYHQPIYKVRVYEKADKFAVGQTGNKNCKFVEAAKGTNLFFAVYEEEVIDKKTGEVTKKRSYRTIPLNEAIDKMKQGLPLDERAAFILSPNDLVYVPTEEERKSGKVSMPLDKERIYKMVSATGNRAFFIPERIATIIENGIEFGSMNKIECMIGGETIRSLCIPIKVDRLGNIIK

SEQ ID NO: 2088 - protein, 1444 aa, unidentified
  REGION 1..1444: note = Description of Unknown: Cas Enzyme sequence
MKKIIGLDLGTTTVGWSYMKVPENENETLEVVDSDPRIIPTALNKTEFDAYQQGNAVTINADRRKYRSSRTVKKRYKERRRDLTNLCIECGFIKDRSELTSCESTKFFQTLKARAAAVTEKVSLQELARILVQINKKRGYKSNRKLNKADTESAGSVDVAMKIRTGGMNPSQYTYSRMQAGNFAVPSYFKSDLVNELDRIWNFQKRFYPDILTDELWKELAGKKQRDTISILKKHGIEQDDCKEASANEKKMNIAKWGVDAICEQIPLSRLATVIAVLKSKIGATSEMLDTLGDHTIILTINNWSIGQYLMEIVKKNSNARISNIRFYRNDYANEFSMIWNKQAEFYPELTDELKKKFHDIIFFQRPRPSMKHLVNYCELESREIEVVKNGKKTKVTTGSRVCPKSSPLFQEFRIWQTLNNIQVKDAHTKDSRRLSVDEMNTLASELETREKLDKSEVLKILDMNPNCFDINYKKIPGNKTQAALLNAYLSVIESVENEPFDVENASGSRLMDYVKNSFEKNGFNTSVLHFNSGADDISKDGMYMLWHLLYSYAGDNSRLGFESLITKVREMFNFDNDDQAKAVVGVMLEEDYGNLSAKAMKKILPFMKTGLEYDRACEQAGYNFSKTSIQKSEYGNQVLLEHLELLRKNSLRNPIAEKIINQMINIVNMLIDKYGKPDGFCVELARELKNSIKRRKEIYERNQKAEEYNNRIKDIISKPPFNCPYPSEQKNIDRYKLYEELEPNGFRTLYSGTLIKPEELFSKKFNREHIIPQARTTDNSLSNLTLELETSNSDKSSMTAYDYVRSIGKTEEYEQNVKRIFENYSPALIKKRGLPENYGKTKAKNLMTTSEEIPSGFIERDLKLTQFITKKCAEILQQLVGIENVRFTTGQVTSQLREDWGLNDMLKELNMDRLEASGNVYEVKDANGNTVKKVNNFTKRNDHRNHALDAIIIACTTQDHIEYMNNKSSKSKKNGQIYKIIKTKMHRDDKGKLRFNPPVPYDVFHSIVKNAMENMIVSHNKKLSPVTTGKSVSKDGTVTKNVVPRGPLHDDTLYGQRTVNSISYVMVSDGKDGLSNSIIDCIANQSYRDAIKQRLADFSTLKKAFGKDNNVIDNPIWLDKIHSAKVPPFVKIVETEKIFTIRKKLDKNMFKLHTFKINGTELVEGKNKKHISDAFCEPYASHIKCLMLSGTCKTLKCAIERSGADFIYWLDEDTFVSFKSVRELVIDKACADAIIRRIVDSKCDLKAAFENIDNNPIWIDGKHTRFVNRVTTKAFITDNSSVQIRNGKTSVKTNNNHTAALYMKPDGTVEMVVVSFFDSVNKSVRKKPVIDKEFNKELGWKFIMSFVKNDIVILKNDETGFDPKQIDLTDRSNNSLIVPNAYRIQKFSDNMCMLRHINDTTTEIGPAGNFKYLTGKKNLRILADAAKVKVDSIGHIRLETECM

SEQ ID NO: 2089 - protein, 1400 aa, unidentified
  REGION 1..1400: note = Description of Unknown: Cas Enzyme sequence
MKKILGLDLGTNSIGWAVVNEAEQENEKSSIIKLGVRVNPLTVEEQQNFEKGKSITTNADRTLKRSMRRNLQRYKLRRENLIAVLKENGFIDDNAILAEKGNHTTFETYKLRAKAATEEISLSEFARVLLAINKKRGYKSSRKAKTSEDGVLIDGMDIAKKMYEENLTPGQYCLKILQQGKKNLPDFYRSDLMSEFDKIIDKQILFHSNFLSNELKEELRNKKSEAVWAICAKRFKDNGFELVGVKRQGKTIEQKFENYQWRVKALNEKIELEQFVLVIQEINKQINSSSGYLGALSDRSKELHFKKQTVGQYQIKKLLENPNYSLKNQVFYRQDYLDEFEIIWETQSKYHKELTQELKKELRDMVIFYQRPLKSQKGLISFCEFEHKKIKVEIEGKKKIKTIGLRVCPRSSPLFQEFKIWQIINNIQVSGKDTHNKRFLFQEEKEKLFTELSSKEKLKKADVLKLLFENHKDLNLNYENIEGNRTQAELFKVYEKIVLLSGHGEYDFSKMTTVKVLEIVEPVFGMLGINTEILFFDSSLESPDFEKQAHYRLWHLLYSFEGDDSKTGNEKLIDKLTELFGFEKEYARLLANVAFQPDYGSLSAKAIRKILPHLKDGLDYSVACAEAGYRHSQKSLTKEELASKTLVDKLEILPRNSLRNPVVEKILNQMIHVVNSVVDSYGKPDEIRIELARELKKSANERAELTTAISKSTKEHEEYRTILQNEFGLIHVSRNDIIRYRLYLELKENGFKTLYSNTYIPQEKLFSKEFDIEHIIPQAKLFDDSFSNKTIELKSVNIEKSNATAYDYVLGKYGEHGVEVYQTRIEELYKLGVINQTKRKKLLMKEADIPSGFIERDLRDSQYIAKKAREILEDMVKFVVPTTGSITDRLREDWQLVDVMQELNWDKYDKLGLTEIIEDKDGRKIKRIKDWTKRNDHRHHAMDALTIAFTKRQYIQYINNLNARLQKSADDYVYSGDYELTKLHKNEVAKVVAYIEKKELYRDKHGKLKFLPPMPIDDFRAEAKKHLESTLVSIKAKNKVVTQNINIANNKNGKLKKVQLTPRGQLHNETIYGCIKRYTTKLEKVGASFDYEKIQTVANKKHREALLNRLSQFDNDPKKAFTGTNSLDKKSIFLNAAQTEKVPGKVKTVGFENIYTIRKEITPDLKIEKVVDVKIRQILQNRLDEFGGNAKKAFSNLEENPIWLNKNNGIAIKRVSITGVSNATALHDKRDYAGKIITDENGKPQPADFVSTSNNHHVAIYRDADGNLQENVVSFFEATMRANQGLPIIDKNYRQEDGWTFLFSMKQNEYFVFPNEKNGFNPKDIDLLNPENYNLVSQNLFRVQKLANKDYFFRHHLETSVLDVSCLKGLTWIRCGLYGIGDIIKVRINHIGQIVSIGEY

SEQ ID NO: 2090 - protein, 1044 aa, unidentified
  REGION 1..1044: note = Description of Unknown: Cas Enzyme sequence
YLDEFNTIWEIQAKFHKELTDELKAEIRDVIIFYQRRLKSQKGLVSICEFENRQIEVTIEGKKKIKTIGNKVCPKSSPLFQEFKIWQILNNIQLIEKANNAKRELVQEEKEILFKELNIKEKLSKGEALKLLFENHKDLDFNFKDLEGNRTNASLFRAYQSIIELSGHGEYDFSKLNADKVFEITASVFDGLGYNTSILSFDTNLEGDAFEKQPAYQLWHLLYSFEGDNTATGIGNLIEKLITNYGFEKEYASILANVSFQPDYGSLSTKAIRKILPHLKEGNEFSVACTHAGYKHSKDSLTKDEKEKKILKNKLDILPKNSLRNPVVEKILNQMINVVNTAIDTYGKPDEIRIELARELKKSAKEREELTSVVAKNTLEHEKYRAILHKEFGLNHISRNDIIRYKLYLELEHTGFHTLYSNTYIEPHKLFSKEFDIEHIIPQSRLFDDSFSNKTLESRSVNIEKGNETAYDYVKQKNDEKALVDFLKRIEDLYKAGKISKTKYNKLKMTGKDIPDNFIARDLRDTQYIAKKAKSILEELVKDVISTSGMVTDRLREDWQLIDVMQELNWDKYNKLGLTEVIENREGHKIKRIKDWTKRNDHRHHAMDALTIAFTKRSHIQYLNNLNARSDKSGSIYGIETKELYRDDRNKLRFKPPIALVDFRSEAKKHLENTLISIKAKNKVTTININTTKKQGGLNKKKQLTPRGQLHLETVYGSIKQYVTKEEKVGANLDEQTILTVANKKCREALLKRLKEFDNDPKKAFAGKNSLEKNPLYFDTLQTYKVPAKVKTVSLETIYTIRKDITPDLKIDKVVDPQIKIVLENRLKEFGGDSKKAFINLDENPIWLNKEKGIAIKRVAITGINNAQSLHSKKDKEGNLILDKNGNTIPVDFVNTGNNHHVAVYKDENGDLQENVISFFEATTRVNLGLPIIDKAYKEKEAWQFLFSMKQNEYFVFPNKQTGFDPKEIDLLNPENYLLISPNLYRVQKIATKDYTFRHHLETNVETDNKLKGVTWIRTGLSNINNIMKIRINHLGQIVSVGEY

SEQ ID NO: 2091 - protein, 1388 aa, unidentified
  REGION 1..1388: note = Description of Unknown: Cas Enzyme sequence
MKKILGLDLGTNSIGWAFVNEAEQDNEKSAIIKLGVRVNPLTVDEQQNFEKGKSITTNADRTLKRSMRRNLQRFKLRKENLIEILKEHHFISNTTLLSEHGNKSTFETYRLRSKAASEKISLEEFARVLLMINKKRGYKSSRKAKSQDEGQLIDGMEIAKKLYNENSTPGEFVLQLLKEGKKYIPDFYRSDLQNEFDKIFDKQLSFHPNYLSNELKEELRGKKRDAVWAICAKAFKDKGFELVGAKRQGNATAQKIENYEWRVTGLTEKLGLEQLVIVLQQINIQLNSSSGYLGAISDRSKELYFNKETVGQYLMRQLDKDPHTRLKNQVFYRQDYLDEYNCIWETQSKFHKQLTEMLKTEIRDVIIFYQRRLKSQKGLVSICEFENRTIEVLVDGKKKTKTIGNKVCPKSSPLFQEFKIWQILNNLQVIEKSTGYKRELNQEEKDILFKELNFKDKISKNDALKLLFENHKELDLNYKDIEGNRTNASLFKAYQTIIEVSGHGEFDFSKMNADEILETTQSVFDGLGFNTAILKFDTQLDGNAFEKQASYQLWHLLYSFEGDNTTTGIGNLIQKIESKYGFSKEFANIIANVSFQADYGSLSTKAIRKIIPHLKEGNEFSVACSLADYRHSKDSLTKEEKEKKILKDKLDILPKNSLRNPVVEKILNQMINVVNTAIDTYGKPDEIRIELARELKKSAKEREELTAAISKSTAEHEKYRATLQKEFGLTQVSRNDIIRYKLYLELEHVGFHTLYSNTYIPREKLFSKEFDIEHIIPQSRLFDDSFSNKTIESRSYNIEKANETALDYIKVKFGDKGLENYLKRIEDLYKTAKISKTKYNKLKMSNKDIPDNFIARDLRDTQYIAKKAKSILEELVKDVVSTSGMVTDRLRQDWQLIDVMQELNWDKYNKLGLTEVIENREGHKINRIKDWTKRNDHRHHAMDALTIAFTKRSHIQYLNNLNAKSDKSGSIYGIEQKELYKDNNNKLKFKPPIPLNDFRAEAKKHLENTLVSIKAKNKVTTININTTKKQGGLNKKKQLTPRGQLHLETVYGSIKQYVTKEEKVGANFNEDLIKTVANKKYREALLKRLTEFDNNPKKAFTAKNSLDKNPLYFDALQTYKVPVKVKTVALETIYTIRKDITPDLKIEKVVDPKIREVLNNRLKEHNNDSKKAFSNLDENPIWLNKDKGIAIKRVAITGINNAQALHSKKDKEGNLILDNNGNGIPVDFVNTGNNHHVAIYKDENGDLQENVVSFFDASTRINLGLPIIDKSYKEKDGWQFLFSMKQNEYFVFPNEQTGFKPDEIDLFKPENYHLISPNLFVVQTMSKVMYGNAIIRDYKFRHHLETTKNDQKELKGTTFKQYKTLNEFDKITKVRINHIGQIVSAYEY

SEQ ID NO: 2092 - protein, 1446 aa, unidentified
  REGION 1..1446: note = Description of Unknown: Cas Enzyme sequence
MKRILGLDLGTNSIGWALIDGEKNTIIKAGSRIIPMDAKAMSEYETGNLQSATSVRTDFRGTRRLYERAVLRRERLLRVLNVLGFLPEHFKNQIDFEKHLGQFINHGEPLLPYRRTEDNKNVFIFADSFYEMIADFSLHHPELTENGKRVPYDWTIFYLRKKALSKPIKKEELAWLILNFNTKRGYYQLRGMENETKTNDGEEYKILKVIDVEKTNEDKKRKGIFWYEITYENGAKQRKSGPVAPRKIGDMVEVIVTTSYDKDGNIKTDKEGNPKISISTPSADEWKLLKKKSENAIKESGKTVGEYIYDELLVNPNIKVKGKLIRVIDRPFYKDELKRIIDKQSEFIPELRDRSLYEKCIRELYHQNEAHVQSIMDKSFTDLFVEDIIFYQRPLKSKKSEIANCPFENYHYIDKESGEIVNKPIKCIPKSHPLFQEFRLLQFTQNLKIFKREKVVNGKLKTDVDVTSDFLSTLEDYAALFEWLNNKKDINEKELLRYPSFNIGKNVSEYRWNYVEDKSYPCNETHYLINRQLDDVGTSLTPDQECALWHILYSVDDIILLRKALKSFAKKYDINTELFVKAFEHIEPFDNDYGAYSEKAIKKLLPFMRKGMRLHDACYEVYGRFSETADTDKWTTPEDIDRYLEFEFKQHSLRNPVVESILGETMRVVRDIWKTYGEISEVHVEMGRDLKKSNQERRDTTDRIRKNEQTNLRIRLLLQEFLNPEYKIDGVRPHSPSQQEIFKIFEENALANINEDAESDDIQMIADNLGNPSKHVSQSEIMRYRLWLEQKYKSPYTGQTIPLSKLFTTAYEIEHVIPQSRYFDDSLSNKVICESEVNKLKDRMLGYEFITKHGGEIIQGNFGTQIKILDKIQYEEFVKQHYASNKGKMKKLLMEDIPDNFIERQLNDSRYIARKTISILSKLVREENETEATSKNVIVTTGNITDRLKKEWGVNAVWNDIIAPRFIRLNTITGTHNYGEMINREGKQYFQINVPLEISRGFSKKRIDHRHHAMDAIVIACTTRNHVNYLNNKAALSSEKDLRYDLQHKLCTKVKTDDRGNYTWQFNKPWESFTQDVRRELASIIVSFKQNLRVINKMTNFYWHYENGKKVLTRQTKGDGWAIRKSLHKAGVSGTVRLQTKKTVKLSDALNCVSMIVDKEIRKEIKDVISTYGKLYEKKTILKYFKDRNYKVGKKDVSRVEIYYTPEIAELSAKRVLLDTSFDEKTIKSITDTGIQNILLKHLANNGNDPKIAFTPEGIANMNDHLKELNDGKEHKPILRVRKTESFGLKFPVGEVGNKSKKYVEADKGTNLFFAIYIDEDGNRSYESIPFNVAVERLKIGAQVAQEINEEGKKLLFVLSPGDLVYIPDEGEHVDDITNNNRIYKMVSASGRQCFFVPYYIASPITCPLELGANNKAEKNWDDIMIKSTCVKLQVDRLGIVTKIFQ

SEQ ID NO: 2093 - protein, 1448 aa, unidentified
  REGION 1..1448: note = Description of Unknown: Cas Enzyme sequence
MSNKILGIDLGTNSIGLSLRNTEIVGGIKEQLEYFSSIIFPSGVGKNKTGEFSYAAERTKNRSTRKIYKVRRYRKWETLKLLIENDCCPLSMEDLQKWSKYDKIKGLKRQYPIHATHFEQWIRLDFDGDGKADYASPFELRAILMERQFDFSEMTDRYKLGRALYHIAQRRGFKSSKGETLKEQEQNEKGELQEVDITDALKKSEEKKSGKLTEYMKVHNLPTVGCAFNHLLKNGIRVRNSEYQAVRSQYKEEISCIFEFQKGLDKESDFYKRLVSEKKGEGTIFYKRPLRSQKGAVGKCTLEPNKPRCPISHPEFEKFRAWSFINNIKFGEDLSEELTLKQKKDLYKEKFLLSRKSFKFEVIREWICRRTGMTLNYKNKTINFKDSTSVSGCPISGRLKRLLGDDWECWKLESTEKKINKKTGEVRKITYDVYDLWHVCFSFDEAEYVDDFAKSKLKFDDNQAKQLVAIFNDIQQGYSQLSLKAIRNINMFLQEGLLYNDAVLLAKLPDIFGCRWEEAKEYVVSQIDSIIKENRKEKLLYSIANQLIGNYKCLSYDERFADHNFDYILDDSDYNDIKNAILNVIGEKKWSKKDTSEQSEILNDVAQLYQGFFASPKRDYYKTRKVADALAEFLSGKYDFLPKKELNKIYHPSMIEFYSPAKEQRLDDGRWLKLLGSPVIGAMKNPMAMRVLHTLRKRINAMLMESMIDADDTRIVVETARELNDANMRWAIEAYQREREKENKEYEKILKEYYPGRSISDKEIDQVRLMCDQHDIPGDDNNTDMGRRKTAKNKKEVPPVYKKDVTRYRLWLEQGCRCLYTGKIINITKLFDENAFDIEHTIPRSISFDDSLKNLTICDAHYNRSVKKNQMPTQMANYKEDANGYTAILPRLQPWIEKVERLKDNVAFWKAQSKLSQDKERKDYCIRQHHLWVMELDYWKGKVERFTMTDVTSGFRNNQLNDTRIITKYAYHYLKTVFDRVSVQKGSVTANFRKILRIQSVNEKKSREKHSHHAIDATVLTLIPNAEMRDKIIKTFYSIKERERFNEDASALKKELAKELKNCQLPSNISEIVPFIEDNILVNHISKDQTLTPAHRRKRIRGKIVPKRDEHGIILYETNADGTTRKNKHGHPIPQAKEWISGDSIRGQLHKDSFFGAITQWLKDNNGEKVLDKKGNIISDTKIYYVIRRILKYKSSDTDSGFKNWEELKSVIVDKDLFMIMKNQFPENTSFKDACEHGIYMYKNNKSGILDFSDECKLTKIRHIRCFTSVKNPLAIKSQTYLSTKPYKQKYYADMGDLYAMCRYESVDKKEREYQLFSLFDISKNRKLGLEDIPTTIESKKNHRLFLIHMLKKGNMLLVYNDSEEALKEKDNKALLQHLYVVRGFENDGNRIILQKHVNAQQDKDLGKGESVKGSHQMPEKIRCGINTIKYLLCGIDFKITPKGVVFV

SEQ ID NO: 2094 - protein, 1434 aa, unidentified
  REGION 1..1434: note = Description of Unknown: Cas Enzyme sequence
MKILGIDLGTNSIGWSIRNTEFQENQIEKYGVTTFEKGVGEGKSGEYSFAAERTKKRAGRRLNQARKYRLWATLEVLITNDYCPMTIEQLDKWRKYNKETKRQYPIIEDFEQWIRMDFDCDGKPDYTSPYQLRAELVNQKLDLTQRINRYKVGRAFYHIAQRRGFKSSRKDAVANENGNLKDIKSEVKKGSEFEKGIQKQFNKSLSDFKTIGAALAYIELQGQRIRLDWIQHTFRKQYKDEIKTIFEFQEINVDSDFYKALVEKTTNRFNGAIFYQRPLRSQRGLVGKCTLEPDKARCPISHPEFEEFRALSLLNNVQYKSSDIWRRLDKNIKEEIYHTLFFRKSKPNFHFEEIRKKIEKELNLKLDYKLKTINYHDKTNISACPLSAYLKDIFGENWKEYKRESSIIRTVINNKSGETKCHPISYSYQDIWHVLFSFDEEEIINDFAKEKLGFDEDNTKKLLSAWKALPDGYSMISINAIKKINFFLNQDFNYSESVLLANMPEILGKTLWKENKELLMSNITSLIEQNKNEKRIRNIVNVLISHYKSLPDYQQFAVRNPQYILDEKDKRDITKSIIESFGEKSWEKEAPNNKETITNQVTTLYQSFFNSSKREFYILPRVYDTIMNHLKERFSQISIKKLEKLYHPSMIEIYPESRRSDDGNIYLKSPKTDVFKNPMAMRTLHELRKLINYLIETNQINEETRIVVETARQLNDANKRWAIDAYQRQREAENNEFKSALQELYNNGIATEPESNNDIDKMRLWYEQLYHNDKANQGKSEYAQNKWENNSTKLMVESLAKKTDLEKYRLWREQQCICMYTGKFISLSDLFDENKIDFEHTIPRSISFDNSLANLTVCYAQYNRQIKKNQIPTQLPNYENEWQGYTAIRSRLKVWEEKVDQLKNNIEFWKGKSKSASDKDYKNDAIRQRHLWQMEHEYWQNKLNRFTMNEVTTGFKNSQLVDTQIISKYAFHYLKTAFNKVDVQKGSITAAFRKILGIQNMYEKKSREKHSHHAIDATVLTLIPFAAKRDELLQLFYEAQESKKMGRKDLADHIMDQVRDKLSTLNIPNIEAILRAIEENILINNIAIDQSLTPGKKIIRKRGQIVYSEDKVGNRTPKIAKGDCIRGQLHLDTFYGKIKVVKRDNNLKLMKDDSGNWIYLDKNEGFKFVIRKPITGITKIEQIVSVELQEMIKRQLNNRSLETTLKEGVYMLDKKLNPVGNQIRHIRCFADDVTNPISVKKQSYLSKHDYKNDYYSKNGENILYAFYWDGIGKTRGFQCRSLMDLASMSKINSMHSLEQFFEPFKNLGRGKSKISLPLFAVLKPDLRVLFYKGNREELFELSNSEKLKRLYKINRIFDPNDGRLQFQYHLESRDDNTLSKAYPENVFGKRGKNGFSEFNYENSLPKLLLSPGKFDFLIEHKDFEIKPDGVIQFL

SEQ ID NO: 2095 - protein, 1403 aa, unidentified
  REGION 1..1403: note = Description of Unknown: Cas Enzyme sequence
MKKILGLDLGTNSIGWAVVNEAESESEKSSIIKLGVRVNPLTVDEQQNFEKGKSITTNADRTLKRSMRRNLQRYKLRRENLIEILKENGFINDTTILSENGNRTTFETYRLRAKAATEEITLEQFARVLLMINKKRGYKSSRKAKGTEDGNLIDGMEVAKRLYNENLTPGQLCLQLIKAGKKSLPDFYRSDLQAEFDKIFDKQLMFHPDYLTNELKEELRGKKRDAIWAICAKYFKEKGVELTGIKRQGNTAEQKTENYIWRTLGLFEKLSLEQLVIVLQQISIQINASSGYLGAISDRSKELFFTKQTVGQYQIAVLNENRNASLRNMVFYRQDYLDEFNTIWEKQAEFHKELTEDLKHEIRDIVIFYQRRLKSQKGLISFCEFENRKEEVEFEGKKMTKTVGSRVIPRSSPLFQEFKIWQVLNNVEVFGKGKKNKKNNEVHLFNEKQDPLEFGGKRELYQEEKELLATELSIKKELKKSDILKLLFNNAKELDMNFPSIQGNLTQATLFNAYRQIIELSGHEIDFEKKSASDIITSVEEVFSILKIDTKILHFNSDKEQGAQPMYKLWHLLYSFEGDNSRTGNENLINKICELYGFEKEYACILANVSFQDDYASLSAKAIGKILPYLKEGNKYDIACEYAGYRHSASSLTKEEIDSKYYKDRLDILPKNSLRNPVVEKILNQMIHIINSISDNYGKPDEIRIELARELKKNANERNELTKSIAETTKLHDEYKEILSKSPFNLSYISRNDIVRYKLYEELKGNGYKTLYSNTYISPSSVFSGDFDIEHIIPQSRLFDDSFSNKTLELRSINIEKGDKTALDFIKEKYGETENENSLDNFLVRIEDLYNADIISRAKYNKLKMQCKDIPDGFIDRDIRDTQYIAKYAKTMLGDYVKHVVSTTGSITDRLREDWQLIDVMKELNWTKYQNLGLTEEFTNKEGHKIRRIKDWTKRNDHRHHAMDALTVAFTKPSFIQYLNNLNARSDKSSSIYGIEQKELYRNEKSKLLFKPPFNLDDFRSEAKHHLENTLISIKTKNKVTTQNINITKKAGGVNKKVQLTPRGQLHNETIYGSQKQYVVKEETVNASFDFEKIAEVSKKTYRDALLKRLQQFNNDPQKAFSGLNAPTKNPIWLDELHTKKIPAKVKTVRFETLYTIRKDISADLKLDKVIDKHVKSILETRLKEFNGNAKQAFSNLTENPIWLNKDKGIAIKRVTISGVSNAEPLHDKRNKEGKLIFDENGKKQPVDFVSTANNHHVAIYRDADGNLQENVVSFYEAVARRNLGQPIIDKGYKSSEGWRFLFSMKQNEYFVFPNEHTGFNPTEIDLLNPDNYHLISPNLFRVQKFGSLSSGFWFRHHLETNVNTIKELKEITYKVIQSANNLNDILKVRVNHIGQIVSVGEY

SEQ ID NO: 2096 - protein, 1429 aa, unidentified
  REGION 1..1429: note = Description of Unknown: Cas Enzyme sequence
MEGKILGIDLGTNSIGLAVRNTDNGNNIVDQLEYYTSIIFKSGVGNGDKGEFSYAAERTRFRSTRRLYQSRKYRIWATLRLLIEHGCCPLTNDELDQWSRYDKSKGLKRQYPINATEFEQWVRLDFNCDGMPEYNSPYQLRAELMERLIDWNDKTDRYKFGRAMYHIAQRRGFKSSKGETLKDANENEDSSTLDISEAMKKSEEKKSKVLEKYMESQNLQTVGCAFARLEREGKRVRNSEYQAVQKQYREEVDAICKRQNIHLKDPELYTHLISTKKGEGTIFYRRPLRSQRGNVGECTLEKGRRRCPISHPDYEEYRALTFINNTKFRLEEDGKWLKLSNEQRNRLFEKLFTRANATFKFEEIKNWIAKEYPGHDFNYKNHTINYPDYTTVAGCPVINRLSKIMGNEWRTAVIESDKCRTNYKTGEVHTIRYNYEDIWHLCYNSDDYEELADLAKERIGLNEEQIGNIKRLWSVLQEGYAPLSLKAIRNIIPFLREGMIYSEAVAVAKIPDIIGKEKWTEYKETIIEEIKRISAKTTKLRTEYNIANALIANYKSLSIENQKAYRDYQYKLDSRDKEDVLRCIIDSIGLKVWNTLQPEERHSIQETVESLYQQFFSSTKRDYFKLPHQSDALKEYLSQTFPEITPKEKWDALYHHSQISLFPHQKASTGDIDGCIRSYYQLGTPNIGSIKNPVAMRALHTLRHAVNELLKQGMIDEDTRVVVETARDMNDANWRKAIERYQNERKKENDLITNIIKDFRPNYSDDDIEKGRLLFEQIESGDFKEPNIDKYAKASRIQKEKAEKFALDLQKYKLWKEQRFRCLYTGDAISITKLFDENAVDIEHTIPRSISFNDSLTNRTVCSTHFNRAVKGNLIPTQLSNYEEIKERIKPWEEKVEHCKSQIELWKKNARTATTVDRKDECIQQKHLWELELDYWQTKVKTFTIQKDEVDLGFRNRQLVDTRIITKYAFHYLKSVFTRVDVQKGRITADFRKILGVQSADEKKDRAKHSHHAVDATILTMIPVAAKRDRIIELFYQVQEAPDAEKASLNSKLSDEIKSCRLGNISNLVETIETNILVNHVSKDQTLTPAKRKLRIHGKIQYKDMQHKEPYYVQGDCIRGSLHKDTFYGAINNGDNMLRLVVRKKLTSLGIKNNKPIKEYNEKYLEPIVDIGLRKAISIQVQQFMKEKGLTFSKALEETYYLLDKDGTSIKTDKCQHPISPIRHVRCYVKAGVGYLKTDTALHIKEQTYASKNKYKRTYYAQNNGNYICLFYEGIVNGQEKRKIRPLNLFEVSQLHLTNTEVLFHEPEFALYKHKKEMPLKAIIKKGTRILFYVNRKEELMDMDNCKLSSRLYTVYKSNINSGTPYIYLRHHLEAREEKDCNKQEFATSYDSHRYIAYLSVTADNFKALIEHTDFEIDPLGNITFKNNQ

SEQ ID NO: 2097 - protein, 1489 aa, unidentified
  REGION 1..1489: note = Description of Unknown: Cas Enzyme sequence
MAKVLGLDLGSNSIGWAVVDNERHCIESAGSRIIPMDAGRLGDFEKGNSVSFTKERTQYRGARRLRERYLLRRERLLRVLRIMGFLPEHFASQLSRYGKLPEDKEPQLAWREGKDGKPDFIFKSSFEEMVEDFRQAGSDNKIPYDWTIYYLRQKALTHPISKEELAWVLMQFNQKRGYYQLRGKADEGAADAESKNEIRSYHELTVTSVAKTEEHDKKGLTRYDITLENGWIYRQAFSVKPDWEGKTRGFIATFKLDKDGNPKEETPRLSSPSDDDWGLRKIKTENDIHESGLTIGAYIYQSLLHHPDRKIIGDFVQTIDRELYKKELRQILETQKQFIPELNDEQLYANCIEELYPSNDAYRTSIAKRDFTYLLVEDILFYQRPLKSKLSLIDDCPFEKRNNKPVKCVAKSHPIYQEYRLWQFLSNLHILLDDADITPNLLPDGDAYADLYDYLSTIKEIDQSAMLRYFKIGKKEMPRYRWKYVPDRKYPAGETRATLLGGLSKAGIDKGFLSPERELQLWHILYSVDDQQQYRKALRTFAHKQGWDDSQTDRFAKAFDRLTVYKEKDYGAYSAKAIGKLLPLMRRGRYWNPQDIDCQTQLRINHIITGEEDDTLTSSVREKFEGLESIEQCQGLAPWQACYLVYNRHSEAIDAQRWTKPEDIDNYLGQFRHNSLNNPVVEQVVTESLRVVRDIWKQTGRIDEIHIELGRELKKTQSERQSLSQSILEGETTNQRIRLLLTELMNPEMEVENVRPQSPSQQEILRIYEEGAMQKADEIPDYIKDIQKRFSDAKKQPTPAEVKKYRIWLDQRYISPYTGRPIPLAKLFTPAYEIEHIIPQSRWFDDSMSNKVICEAEVNKLKGRELGHEFIVHHHGESVSLSLGGEVKILEVEAYEKLIKNNITNSKKRQKLMMDDIPDDFTSRQLNDSRYISRLMMHLLSNIVRSSDEDGNLEDTATSKNVIVCNGSITDRLKRDWGIGDVWNRIILPRFVRMNQITETTDYTATTDSGHLIPQVPLHMRQGFNKKRIDHRHHAMDAIIIACATRNHVNLLNNENAKSQQRYDLQHTLRSKETSVDGQGNTRTRPGDFIKPWPTFTEDVYHVLESIIVSFKQNQRIINKTSNRYTIIRNGKHTGCSQTKGDSWAIRKPLHEATVYGEVNLQLKKRVKLKEAIDTPNQIVDRELKEKIKHFKSQRHKAKQIVDYFDTHKEIWPEAADGKVEVYYYTKDTKDRYFATRKSLINLFKDTTTHPAATKIIESITDSGIRSILYAHLANEGNNPAEAFSADGLERMNRNIRNLNGGHDHLPIKKVRIYEQANKYSVGTHGQKATKYVEAAKDTNLYFVIFTNAKGLRGYATVPLYISIELQKKYEKHWKDHLAKRLQQNDLALMPSDSTILYILSPGDIVYVPSEEERKNGITSLDLKRVYKCVSATGKDCFFIPYSVASLILTGKEFEAKNKLGRALTKEMIKEVCIPIQIDRLGNIIKIGQ

SEQ ID NO: 2098 - protein, 1214 aa, unidentified
  REGION 1..1214: note = Description of Unknown: Cas Enzyme sequence
MERILGIDTGTNSLGWAIVDNEDGVKKLIAKGSNIFSEGVKIEKGIESSKAAERTDHRSVRKHYWRRKIRKIRLLTILSANHLCPPLEQSSLRQWRLKKLYPDNELFMEWQRTEDKRSINPYKFRYICLTQKLDLTDITQRYILGRALYHLNQRRGFLSNRKETTKESEGSVKDGINALTKQMEDAGCKYLGEYFYQLYQKGLKIRNHYTARKDHYLKEFLAICEKQELNATLVEKLEKAIFDQRPLKSQKGQVGTCTFEKGKSRCSSSHPLYEDFRMYAFLNNIKVQIHTLYEDADRYLTKEEKEQIIPLFKRKSKRTFPFEDIAKKLAGKNNYCYYKSNEEKPYRFNYQMDTSVSGSVVNAQLEEVFGENWLDNACEVYTLAKEKTRFQIMNDIWHVLFFYDDEEKLKEFAVNRLQLDDEQAEKFSKISLPNDYASLSLKAIRKILPYMRDYGLIYSEATFLANLVEVFPRHVWGIKEMREAVIENVIDVMHSYDKNNIDGVTLESCVKSFLKERYNITDEDLNKLYHPSMLEHYPRQRPNDEDIYQLGSPRINSVKNPMAMHSLFRLRKVVNLLLKEGQINPETKIHIEFSRDLNDANKRKALQTLQRQNEKDREECRKKIAEHIVNPSADDILKYQLWEEQNHKCIYTGEEIRITDFLGDNPKYDIEHTIPRSAGGDSSKMNLTLCSNRYNRDVKKTKLPSQLPNHEEILDRIQSWKEKYEEKDRLIRKNIGRSRHNTSKDEKDKLIQDRHQLEVERDYWKGKYERFLMTEVPEGFSRRQDVGIGLISRYARMYLKSVFKQVYIVKGRATSEFRQKWGLQEEYTKKERVNHVHHCIDAITIACIDKAAYDKLAEYHHKYDEYRYNEGEKPSFELPWPSFVSDVKSVQDELLIAHYSKDIVGKETKKNIRGNDGRIVRDSHGRKMKMKGDTARASLHNETYYGAIEVDGEIKYVVRKSLDSLDEKDVKNIVDGEVRAKVEHAILLYGSLKKALEEKIWMNEEKQIPINKVRIFTGSVTRPINIRQQRDQSKHEYKRQYHVQNDRNYMMAIYVGQDKKGKEKREFELVNNITAANFYRRSNDKVPTDNQLVPLYSKSGYALRYKLKIGTMVILYENGPEEVWELDKKNLQKRLYKVTGMSSMLLRQKDNYGTIELVHHQDARPSTEIKKKNGSFCDGEDFRPGIKMLHTQFRALVQGVDFEINDLGEIRRLI

SEQ ID NO: 2099 - protein, 1540 aa, unidentified
  REGION 1..1540: note = Description of Unknown: Cas Enzyme sequence
MKHILGLDLGTNSIGWAIVNAEQIVREDETNYLKPVSISSAGSRIIPMSADILGDFDKGNSISQTAERTRLRMARRLRERNLLRRERMLRTLKLMGFLPSHFAKEIDIFGKLFSNKEPKLAWKKNEEGKNLFIFQDSFNEMLEDFACHQPQLVAEGRKVPYDWTIYYLRKKALTQRITKEELAWILLQFNQKRGYYQLRGEDEEDDNTKRVEYLALKVERVEATDEKRGDEVWYNVYLENDMVYRRTSRYPLDWVGKVKEFIVTTDLEKDGSPKKDKEGNIKRSFRAPKEDDWTLLKKKTENDIENSQKTIGCYIYDTLLQKPNQKIIGKLVRTVERKYYKDELLRILRRQQELIPELQDTELYKKCIEELYPNNEGHRSNLAKSDFVNLFVNDILFYQRPLKSKKSQIENCPYEFHKGIDGNLYPVKCIAQSNPLFQEFRLWQFIQNLRIYQRERIITDGQLALFGSTHTGKLQTDVDVTAEFLKSEEDYVKLFDWLNNRNAIKQDTLLNSFFKIKKERGKDKYPYRWNYVEDKEYRCNETRAAMLTGLEKSGIRTDVLTHEMEMALWHILYSVEDKTEIGKALKTFAKKNNLGEMFADVFCKMKPYKKEYRSYSEKAIRKFLPLMRMGKYWNKENIDDKTLSRIEKIITGEYDKTIKNRVREKAINLTDIDHFKGLPVWLACYIVYNRHSEAREIEKWDKPEDIDRYLNSFKQHSLRNPIVEQVITETLRTVRDIWKQEGDIDEIHVELGREMKNPADKRRLMTERIQQNENTNLRIKALLMEFLNPELGIENVRPHSPSQQDILRIYEENALDNLTKEDAEYEFVTKISKMAQPSKSDIIRYKCWLEQKYRSPYTGKMIPLSKLFTPAYEIEHIIPQSRYFDDSFSNKVICEAEVNKLKDRLLGYEFIKEHAGEIVQLSQGDTVKILSVEEYEKFVKDYYGSNRTKMKKLLMDDIPDGFIERQLNDSRYISKVIKTLLSNIVREKLENGEYEQEAVSRNLISCNGSITDRLKKDWGMNDVWNHIILPRFQRLNELTGTNLFTTQNHEGHEIPAMPFELQKGFNKKRIDHRHHAMDAIVIACATRDHVNLLNNEAAHSKHNANRYQLQRKLRRFAKITIDGKEREIAQEFLKPWPTFTSDALRTIQSIIVSFKQNLRVINKTTNSYLHYDEYGKKIYHKQTQGESWAIRKSMHKDTVFGEVNLRKKKSVSIKEAIVKPEAIVNKEFKEKVKELIAQGHDAKYIKKYVEDNKDIWSDINPSKIDVYYYTRDEKKQNGEPKERYFATRKPLDTSFDQKKIKESITDTGIQKILLAHLESKGNDPEQAFSPDGIDEMNRNIVTLNKDKFHQPIIKVRVYEKADKFCIGQKGNKKKKFVEAADGTNLFFAVYETADKKRVFATISLGLSIDCQKEGSQYWIKLLDERLRDKTPTEELQPYQKMDIPTDAHLLFILSPNDLVYVPYDGKPTDLTQVDRDRIYRAVSFNKKQCFCIKCNVATPIVNKVEYTTSNKMERATTGEMIKEVCVPIKVDRLGNITKIG

SEQ ID NO: 2100 - protein, 1386 aa, unidentified
  REGION 1..1386: note = Description of Unknown: Cas Enzyme sequence
MKRVLGLDLGTTSIGWALVNEADNSNEQSSITRLGVRVIPLTVDEQTNFEKGKSITTNADRTLKRSMRRNLQRFKQRRTNLIDCLREANIIQDETALAESGPRTTFATLHARAKAATEEVSLTEFARILLMINKKRGYKSSRKAQATEEGTLIDGMEIAKQLHDQHLTPGQYTYDLLLAGKKYIPDFYRSDLVAELDAVWNYQKHFHNDILTDDFYHQLQGKSKTNTTKIFLGKYGIYTADNKGSDRRLQQYRWRAEALQRQLTPEELAFVIADINGAINNSSGYLGAISDRSKELYFNHQTIGQYIVKKLEADPHYSLKNATFYRQDYLDEFEQIWNTQARFHKELTPELKKKIRDEIIFYQRPLKSKKAMLDICTFERRQVEVQEDGKTRNKTIGIKVCPKSSPLFQEFKVWQVLNNLQVEFEDAGEDLFSPTEKRRFLDLEEKELLARELQYKEKLSKREVLNILFGKAAKKYDLNYKEVEGNRTLSALYQAFFSIIALSGHEEYDIKKLKAIEIEEVTGSVFKAIGINTDILHFDAELEGHAFDQQPLYQLWHLLYSYEGDNSKTGTDALIAKLQSLCHCDREYAQVLANVTFQEDYGSLSAKAMRKILPFMKAGNDYSMACEYAGYRHSERSRTKEELASRKYLDRLELLPRNALRNPVVEKILNQMINVVNAVVEEYGKPDEIRIELARDLKQSAKEREKTTSDINAANLLNEKYRKELESEFGIQHVSRNDIIRYKLYMELKDNGFKTLYSDTYIPRDQLFSKNFDIEHIIPQARLFDDSFSNKTLEARDINTEKSNATAYDYILGKWGEEKAAEYKTKIDNLYKQGIIGKAKHDKLLMREADIPDGFIDRDLRNSQYIAKKAREILEDMVPQVIPTIGSITDRLREDWQLVDVMQELNWDKYNRLGLTETYKDKDGREIRRIKDWTKRNDHRHHAMDALTIAFTQPAFIQYLNNLNARSDKGSSIYGIEQKYLYRDSHGKLRFRAPMPLDVFRAEAKHQLEDILISIKAKNKVMTQNVNKSKTKGGVNKKIQLTPRGQLHNETIYGHTLHRISEEVKVDGKMTPDRATLIAKKMYRDAVIARLAEYSNDPKKAFTGKNSPEKNPIWLNEQHAEQVPPRVKLVYFEDYYPIRKPVSPDLKLDKVIDTGVRRILQARLDEFGGDPKKAFANLEENPIYLNKEKGITIKSVRIRGVLSAIPLHEAKDHFGKVITDSEGKRRPVDFVQTASTHHIAVYRDAEGNLQDVAVSFLEATTRKALGIPVVDTEFHSAEGWKFLFSMKQNEYFIFPDIEHGFDPNAIDLFDPKNKAEISKHLYRVQKMSKTEGGRDYFFRHHLETTVDDIKELMGITFKRLRTVEALEGIVKVRVNHLGDILPSKEN

SEQ ID NO: 2101 - protein, 1390 aa, unidentified
  REGION 1..1390: note = Description of Unknown: Cas Enzyme sequence
MKRILGLDLGTTSIGWALVNEAENSEEQSSITRLGVRVVPLTVDEQTNFEKGKSITTNADRTLKRSMRRGLQRYKLRRTALIGRLKEAGIINDDTILTENGPRTTFSTLRARAKSATEEVCLEEFARILLMINKKRGYKSSRKAQSTEDGAQIDGMEVAKKLHDEQLTPGQYVYSLLLAGKKYVPDFYRSDLQAELDAVWAFQKTFYPEILTDDFYHQLQGKSKTKTSSIFLAKYGIYTADNKGADRRLQQYRWRTEALSRELTKEELAFVIADICGAINNSSGLLGAISDRSKELFFNRQTIGQYILQRIDVDPHYSLKNQTFYRQDYLDEFERIWETQAQFHPELTPELKKDVRDIIIFYQRPLKSKKAMLDICTFENRKVEVTEDGKTRTKTVGLKVCPKSSPLFQEFKIWQILNNLEVEYEAPGEDLFDETEHRRLLSFEEMERLAHELLYKDKLNKREALAILFGKAAKKYDLNYKEIEGNRTIAALYRAFFNIFVLSGHEEYDINKLTADRIEEIASSLFRLLGFNEGILQFDASAEGHTFDQQPLYQLWHLLYSYEGDNSKTGNEALVSKLQSLCHCDREYAQVLVNVTFQEDYGSLSAKAMRKILPFMKQGLTYDKACEKAGYRHSERSRTKEELANREYLDRLELLPRNALRNPVVEKILNQMINVVNAVCEEYGKPDEIRIELARELKKNAKEREAMTQAINEANTQNEKYRKELEKEFDIKHVSRNDILRYRLYIELKDNGFKTLYSDTYISKEKLFSKDFDIEHIIPQARLFDDSFSNKTLEARDINIEKSNATAFDYVLNKWGEEKAAAYKVKIDDLYRRNVISKTKHDKLLMHETDIPEGFIDRDLRNSQYIAKKAREILEDLVPTVTPTIGSITDRLREDWQLIDVMQELNWDKYDRLGLTERYEDKDGRELRRIKDWTKRNDHRHHAMDALTIAFTHPAFIQYLNNLNARSDKGSSIYGIEQKYLYRDSHGKLRFSAPLPLDIFRAEAKRQLEDILVSIKAKNKVMTQNVNKSKVKGGTRKKVQLTPRGQLHNETIYGHTLHRVTEEVKVDGKMTLERAQQVAKKMYREAILARLAEFGGDPKKAFTGKNSPEKNPIWLNEQHAEQVPLRVKLVYYEDYYPIRKPVSPDLKIDKVIDARVRRILEERLKAFDGDAKKAFSNLDENPIYLNKEKGITIKSVRIRGVLSAISLHEAKDHFGRVITDSRGKHREVDFVQTASTHHIAIYRDADGNLQDVGVSFLEATTRKALGLPVVDTDYNAALGWKFLFSMKQNEYFIFPDVEHGFDPSAIDLYDPNNKAEISKRLYRVQKLSRVDYGKQVVREYVFRHHLETTVEETKELKKITFKNIKSLAPLEGIIKVRVNHLGDILPSKEN

SEQ ID NO: 2102 - protein, 1250 aa, unidentified
  REGION 1..1250: note = Description of Unknown: Cas Enzyme sequence
MKRILGLDLGTTSVGWALITVDESNNPIDIQDIGVRIVPLAENEGDKFTKGQDITVNADRTLARGIRRNYDRYQMRRRALTEKMRQLNMLPDEHLIKLPVLDLWQLRANAAKQKISLCELGRVLYHLNQRRGYKHARTDSNDSKQKDYVQKINNRYSLLQQLGLTIGQYFAQKLAETAITHNGKTFYVFRIKEQIYPRRAYEEEFDTIMTCQQLFYPTILTDEVINEIRNNIIYYQRDLRSCKHLVSICEFEKRSFYDENGEVKRNKKGEIVYSGPKVAPRTSPLFQVFKNWQSINNLHFHNRRNEDLFITLEQKTHIASIMDNKELLKLKDVHEVLGINNKSGWYCDKAIKAGIKGNTTKTAIIACLSTLPLSIINEIARFNLKTEKTNIVDEESGEIFVRISNNYQDEPLYRLWHIIYSIKDDEERFNAISKFLKDFGIEDDSITNALKDIDFVTPGYANLSAKAISKILPYMMEGLDYSDACEYVGYNHSDSLTKEENASRDLVDKIPLLKKNELRQPTVEKILNQTINIFNQINADLIQKGERIDEVRVELARELKQSKTEREEASAGIRKQQALNDNYANILKSESIRPTRNKILKYRLWTESNKTCFYCDQPVNFKEYLQTTEFEREHVIPKRLIFDDSFANQVCSCSKCNKEKGGLTALDFMRTKANLRNYLDKVDSMYQKHEISGKKRSHLLASYDDYLERKKEGKETKEDIMIWETPIDRQLRLSQYISRKAMEILRMGCREVVATSGSITELIRHTWGYDTILHELNCPDYKEAGLTEIIIDEKTKRQREVISDWTKRLDHRHHAIDALAVACTTHSIVQHINTLHASRKIMRDEIKTSRKEWKDNYLLQQWIKEKMPFDRHYVLHKIASILVSMKAGKKATVPGKRKIYKNGKPQIIQTGIKIPRGQLHEKTIYGAIKQWSGGEEHRKIVTRYKLGIGAAGYVFNGKESCDVIFDKKKKQYVMDDGIDKAIKYIVDKHIQDVIRGRLNEAFPANETYRSEAEKALAEGKTYDGKDRSKKALEQLRTLSEKPLYADKGKTIIIKSVRCFTGLSAVQPLRYNSQNEPIAFVLTKNNHHVAIYSDEKGEYKECVYTFWQAVERSKYRLPLIIKEPHELWREIMKRENDGEHFPDSIIEALPSPNWTFIESLQLNDMFVMDLDDETFEEYITNKNYEKLGKKLYRVQSLSTGDYCFRHHTDTTTDRTNAKLTKKFLRKSLMSFISSNPRKVQISLLGKINRDC

SEQ ID NO: 2103 - protein, 1511 aa, unidentified
  REGION 1..1511: note = Description of Unknown: Cas Enzyme sequence
MAKILGLDLGTNSIGWSLIERTDNDGRIIQSGSRIIPMDASEMSDFANGNTKSKTSDRTAKRKVRRLRERFLLRRERLHRLLKHIGFLPKHYECQIGWDLENDKKHFGTFLEGEEPKINWFKNSEGKYEFLFMKSFAEMLKDFKEKQPNITHVPYDWTLYYLRVKALTQRIEKEELAWIILNFNQKRGYNQLRDEVLDVQEDKKSEYKRLVVKSVTPDEEPKAGKDTWYNIAFEDSDIIYRRKSKYPLEWVGKERDLIITTKLDENGAPKLKKDGSIDYSIKSPNENDWGLLKIKTEQDLREKGMTVGQYIYDSLLNKPSQKIRGGLVRVVERSFYKDELKRILEKQSEYHAELRDRDLYESCVYDLYKNNESHRNNIINNDFTFLILEDVLFYQRPLKSKKSLIDNCPYESHQGIDKETGEIKTYPNKCIAKSNPYFQEYRVWRFLCDLRIIANTKEVDGHLSSDVDVTDTFIQNAEDRYNLFEWLNDRGDIEQKTLLSHLGIKRNELSNYRWNYVEDKKYPLNTTHHAISSKLAADESISTGTEYLLWNLLYSTQSKSEIDKSLSSSNTKSGGIYQTLISEGISEASIEKLKSLKLPDEGYGAYSEKAIKKLLSLMRMGKRWKEENICPSTRARIEAFLAGNNIDNFSDRVWDRIKGMSEIESYQGVPEWLACYIVYGRHSEASEVVKWKTPNDINNFLNNFKQHSLRNPVVESVVLETLRVVRDILEKYGTIDEIHIELGRELKNPSDKRAQMTQRILENENTNLRIKALISEFINEEFEIPNVRPFSPSQQELLKLYEEGVLSSHQPDDEISDIIKELSNPTKQPSRNKVLKYKCWLDQKYISPYTGRTIPLSRLFTTDYEIEHIIPQSRYFDDSFSNKVICESEVNKLKDNMLGYEFIKKHHGQIVGNGIKIFEVDEYEKHVKSIYSSSSVSAKRRKLLMDEIPTEFIERQLNDSRYISKVVKTLLSNVVRAEYEDGNLEPEAISKNVITCNGSITTILKRDWGIGEVWNKIILHRFQRLNTLTGQNCFTSVNHDGKEIPAMPLELQKGFNIKRIDHRHHAMDAIVIACTTRDHVNLLNNEASLPQNKSMKYALSHKLRQYEEVIIKGEKRSVPKNFIMPWPSFKTDCFNSLNEIVVSFKQNLRVVNKATNKYTAYDDSGKKVIMEQHGENHYAIRKSLHKETVSGHVNLRQIKQVSLKEAIKNPNRIVHKDLKKKVKSLFAQKYTDKQVLAYFKNFKYEWKGFDFQKIDVYYFTDEKEKMVASRFGNEIESLFSGKKKKEDIEKIIEKITDSGIQKIFRNYLEENENNIEYAFSPEGLEKMNENIAAYNGGKPHKPIYKVRMFETMGQKFPVGIYGNKKTKYVEANKGTNLFFAIYINEDNERSFSSIPLNEVIERQKQGLSPVPETDEDGNQLAFYLSPGDLVYVPEEGETSDNIETLKTNRIYKLVSCTGNEAHCIPAHIASPIIQTIELGSNNKSQRAWDKMMIKDICIPITINRLGEIKLR

SEQ ID NO: 2104 - protein, 1152 aa, unidentified
  REGION 1..1152: note = Description of Unknown: Cas Enzyme sequence
MKQILGLDLGSTSIGWAVVSEDDQALRLERLGCRIIPLSTDDATEFLSGNAISKNEKRTQRRTQRKGYNRYQQRRALLQQFLQQHAMLPDESLKGLDKLSLWGLRARAVSEQLSLPELGRVLYHLNQKRGYKAIKADYDADGDKKQGEYVKAVMGRHRMIAERGITIGQLFFEKLSEDPSYRTKEQVFPRRAYEEEFDRIVACQRQFYPTLFTEENIDTLRNRIIYYQRGLKSCKHLVSLCDFEKRAYLNAAGKTVFNGPKVAPKSSPLAQVCKIWESVNNLTLKNRRGETLEIAPEERRALFEHLNTHDKLTLTDLYRILGIRKTDGWWAGKAIGKGLQGNTTRNALRKALAGQYDELLRFNLTTVETNQVDAETGEIIQMVSESYLDEPLYRLWHAVYSIPDKEDLSKTLQKQFGITDLEVVENLFAIDFVKAGYANKSAKAMRRILPYLELGLKYAEACEAAGFRHSESLTVQERETKTLLPKLRQIEKNELRQPVVEKILNQMVNVVNALMDRYGHFDEIRVELARELKQSRDERNETTKRITKNERENRAVAERIATDYQLTPTRNRIRKYKLWEESGHVCIYCKRVINVGEFLQGVDSEKEHIIPRSLFFDDSFSNLACSCRQCNATKGNQTAYDFMKQKSEAEFADYLDRVEKLYKEKRISKTKYERLLTPESKIPTDFIDRQLRESQYIARKAREILSGVCRQVTATSGSVTDFLRRTWGWDHVLHDLNFDRYRAAGLTEIKDLEQNGRHWQEEGIRNWNKRLDHRHHAIDALVIACTKQGYIQRLNTLSQWKDVSFAPAEAQGEVYRTKRSKLERYIVAQPHFSVREVQQAARSVLISFKAGKKVASTGKRYSYRQGKRVLMQQHILIPRGALHEDSVYGVVNRYAKNRRGETVIEQKSVLRYPLASIKRSQINSIVDSGMRKLVQQRFDRHPGSDKKDVLKDLQNDPLLFNGVPVRSVRRMPRLDVSSLIHLHRGGYVVPGNNHHVAIYRDRAGKLYEHCVTFWQAFDRKRYGLPVVITHPEEVWNRLPEGVPDTVMEQLPLPEYSFVVSLQQNEMFVIGMAPELVEEAMRNQDYALLGQYLYRVQCLSSNDYWFRLHVETGTERGESDGLAKKFYRFSLKSFLTSNPVKVRISLLGEISKV

SEQ ID NO: 2105 - protein, 1288 aa, unidentified
  REGION 1..1288: note = Description of Unknown: Cas Enzyme sequence
MRTLGLDLGTNSIGWAVLETQGRKVALLDKGVYLFPKGVGEEKKEYSLAAERTTYRASRRLKMRRRWRKQATLATLMKHDLCPGLTEEALGEWKQKRYQYPGNETFRQWLNTKAVTKDGKPAGPYYCRWRAATEQLDLEKPEDRYCLGRAFYHLAQRRGYKSNRISGEEKDGAVHGEIAKLDEKRHGRTLGQYFYEECLGKEPVRGSGHYTSRPQYEEEFRTICEKQALKPELVNELGKNIFMQRPLRSQKGTVGKCIYEPSKARASDSHPLTERFRLLQIVNNIRVADPGSTDMRPLNDTERKQAISWLETQSRIITFDKLAKKLVPRNMKPVCGQNKYSDEADTKCWRFNYRGDSGLPASPFTARMIKLFGADWRAALHSCYRKAGNKSIEQVVDDVWHVIFSFDDAEKLKAFGIEQLGLDQEQAKEFANPLPIGYGSLSLAAMRRILPFLEKGLIYSHSVFLAKLPDLLAAKGIEWAGEESSLTYSIRELLDTHTQAAWSEKAANSLISKFREDHVDPSSFLMTEATRLRFRDQVEDAIKEEAGGARWNEVTPVLRAELLDRAMTDIVHWTGQRDGFMPVKRLDERVKCLLAERYKLDEKVLDALYHPSEVEAYRSATRNNEGILQLGSPRIDSIRNPVFMRAMFQLRRLINSMLKEGLIDGETRIRIEMARDLNTFNMRAAIERDQREHQKERDRIHTEIAGLPCAPSVISDRDVLKYMLWEEQDRKCLYTGVTIEISAFLGDNPAYDIEHTIPRSRRLDNSQSNLTLCDRHFNRTIKRNRLPAELPQAEEIQQRVGLLWDDKIEELQKLVEKRRASSRSAADKATKDTIRQSLHYEQIRLRHYKAKRDSFFRADAPEGFTNSQLVDTRLICKYAMQYLKTAFPKVYSIKAGAVSAVKEIWGLDDKNRGDHAHHAIDAIVTACMNPGWYSELAEFYHQYERYLFNEAGRPATPQPWPGFDRDLNENVAKNILVVHYSPDNLFKQTRKVVRLRGKIVKDSGTPLYAQGDSVRGALHQDTIYAKIQDPAEQKNGETGSLKAVVRRLLDKTFKDFDKIVDPQIRQKVMDQKEALKAGEQVWFDQEQQIPIKKVRCYATNNKAENLITLNAHRDKSRQAHKQHRYAANDGNYITALYRGEINGKAKADWKVINNFEAVQAAKRKSWESIIPQTDENGLSIRHLLKKNTLVLFKQSSDEDLKKFNQEELSRRLFRITVMEGNRIKAIHHRCGLAVGDIPSWPSKIDFVAQTPSASVYLSVNGIHIAVEGDEFRLNPMGHIHWLEAGDDA

SEQ ID NO: 2106 - protein, 1223 aa, unidentified
  REGION 1..1223: note = Description of Unknown: Cas Enzyme sequence
MIIEENLTLGIDFGSESVGTGTIDVANQTVTPFTSIWKSNTSKERNAIRRIRRSILHRKERNTRLIRLLNICGCLPSDFTEHFNWTQCDEDRGIGTLKKSESKYTDYPNLIESNVYRESILRMREWYNENRPDIKPANTWLPIWLSVYGQYQELTDYELALTLIYMSKRRGADYMLNDDNNELVAQIKSNNEQIVQSCSTSFELELNQLNNIDKVHLGTISREFYVSAINDLLKKQEEYKSWLTSREKLTEVVTDLYRNNKVHREKRLSKNMTLREFIISDVIMYQRRGNQKSKIKKCPYEKKILSNGKIYSERAICKSHPLYRQFVAWQTVNNLMFTDKGTGEIVDFDRNAAYNYLFKTEKPLISELTKLLKVSNCYSKYNSKDAKLPENKSVGRMITVLQNAGMSEEKSEKYETLEELWNIIYSAEDSDELKKGIRRFSKKNRLNWDVFKEEITTVQITSVGYGQLSKKALQKIMPYICDGNSYQAAITTVYDKVKRTPAYNLDELRDIFEEDCKNGTVSPTIITEARRAFNQIETTFETVGRIPGHIVIEGSKDVPMTDEEIKSYNAHLKQQTKAKRLKKTILTTLNKKYSVSNMDRLSIYIEYCYNNDKDIKDLIDSIYKIKEEDTVKYINEVKNLVKEIDGKYKCPYTGKQITLSQLFSKYIEIEHILAHSKTFENSIENYALTFIAINKLKADLPPAEFIKRYGGTNDIKVWKDYEKDVKRDYKNIKSKKERLLAKDFAIGFKKFQLQKTMALESYFQNLLSSLYPNVTEPKQERVICVSPQTVRFVKMTLTNLNKSFLDTFVKPRLRKVDEFNESQPIDSKDYNTPRYIRKTDNGDAIENIDNPKRMDNRHHALDAICCALITPKFRQVLNESIKHGFELKISVLASLLNSWTGFENDIIDALKNVEVKFYSKRRRSRTTCGIYKSYDANGNVVYNKTKRTQSVSRQIHKETIFGYKDGLYTVRKQISKSIDVSAIDSILAKFRKQGELSAEQKQCIKDALKDYFSANFKMNSVTLNIIVQWACVNIDHSDTDLKWVYSEEGITAMNNYMSSLCAHFKYKQHSHINKLKSISGGDKKFSLDKRNVSGKYVVAEKGMNDYAIVLKNPTTCRNEIFIGDGDKNLFEQDKYNSCINNGYEFVAEMNVGDTIRIDNILWRILSFDAGSKVYCVPNNWGDVKENEIQFHKKKSYTVSDTPILQLINKNNVITRSKLNSWIE

SEQ ID NO: 2107 - protein, 1390 aa, unidentified
  REGION 1..1390: note = Description of Unknown: Cas Enzyme sequence
MKKILGLDLGTNSIGWALVNEKEHDGEQSSIIKLGVRVNPLTVDEQNNFEKGKPITTNADRTLKRCMRRNLQRYKQRREHLITILKENGLITENTILAEQGNRSTFETYRLRAYAATEPISLEQFARVLLMINKKRGYKSSRKINADENGKIIDSMDMAKLLYEEGLTPGQFMLRHIDNGKRYTPDFYRSDLIDEFNRIWERQKGFYPEILTDPLRQELKNKNEKQTWAICSKPFGIVGLKRTTKGDAQKRENYEWRSKSLNEQVDLETLAVVLQKINGQISGSSGYLGEISDRSKELYFKKQTVGQYLMERLDKNPNYSLKNKVFYRQDYLDEFETLWEIQAQSHSELTTDLKNEIRDVIIFYQRPLKSQKDKVSFCEFENKQVETESDGKKKSMTIGLHVCPKSSPLFQEFKIWQILNNLQVSGKIMTKSATDLFGYSIHTEKGRRFLEQEEKERLFHELSIKEKMSKAEVLKLLFKNHKELDLNYSEVEGNRTQAALFNAYQTIIDMSGHGSHDFSKMRADEVYGIVESVFNGLGFNTDILRFDSSLNGKELERQPSYRLWHILYSFTGDDSKSGTDRLIDKISESYGFDREYAAIIAGISFMPDYGSLSAKAIRKILPHMRDGLKYSDACKYAGYRHSKNSLTKEEIDNKVLCDKLTLLPRNSLRNPVVEKILNQMINVVNSVADKYGKPDEIHIEMARELKSSAKEREETTKAISNVTAEHARYRETLQKEFGIANASRNDIIRYKLYMELKDNGFKTLYSNTYIPQEKLFSKEFDIEHIIPQAKLFDDSFSNKTIEVRSINIEKSNATAYDFVCNKYDAKQVKDYEARVEDLFNKKIISKTKRDKLIMREADIPSGFVDRDLRDSQYIARKAREILENMVKVVVPTTGSITSRLREDWQLVDVMKELNWDKYDSLGLTETIYDKDGRRIRHIKDWTKRNDHRHHAMDALTIAFTKYSHIQFLNNMNARSDKAGSIYAIEKKELYRDNGKLKFLPPMPLDVFRTEAMRHLSEILVSIKTKNKVVTRNINTYKVKGGKKSRIQLTPRGQLHNETIYGCIKQYTVKEEKVNGAFDEQKISTVADKRYRMALSERLKQYGNNAKKAFTGSNSLQKHPLFIDEMHTLTVPEKVKTVKFENVYTIRKEVSPDLKIDKVVDAHIRKILETRLKQYGNDPKKAFTNLDENPIWLNEEKGISIKRVTITGVSNVVALHDKHDHNGMPILDKNGNKQPADFVCTGNNHHVAIYRDADGNLQDEIVSFYKATILANQGLPIIAKNKNDGWQFLFTMKQNEYFVFPNEKTGFNPKEIDLLDPKNYNEISKNLFRVQKISKTAGRVYMFRHHLETTVDDKKELQEITWKRINSLDKLKNIVKVRINHIGQIVSVGEY

SEQ ID NO: 2108 - protein, 1288 aa, unidentified
  REGION 1..1288: note = Description of Unknown: Cas Enzyme sequence
MRVLGLDLGTNSIGWAIIDEVGQRTTLVDKGSIIFEKGVGEEKNVEFSRATERTKYRSARRIKFRRKLRKLETLNVLSKHGLCPALSEADLNNWRYKKQYPSSTEFRSWLSCVKLDEDPNNRSPYYCRYFAITKKMDLDLAGDREILGRALYHIAQRRGYKSNRVSGEDKEGAVDGAIKELQEKMNGRTLGQYYYEECIGSEPVRGVGHYTSRKDYADEFARICEFQGFSAELREELNRAIFFQRPLKSQKGGVGKCLLEPRKARAPVSHPLFERFRMLQFVNNIKVREPICSTDEPRLLNDRERKIAISWLSTREENEKFERLAKHILPKRTQIEYGGKWRESDNNSWVFNYRNDMTAPGSSVSALLIEIFGENWRDALFERYEKRAGKTKDQVVDDIWHAMFSFIDDSKLMEFFISNLHVSNEESKKLCKPLPRGYGNLSLKAIRNILAWLEKGMIYPQAVFLAKLPEIFLKKGLAWDVNEASAEEIIECVMNSHSLDSAIENSVNGVIKNLRSGEYNEGNDVLFQVPENISLFRDQMTAVIQSEYGERRWLKMSELEQGAAINRAVELLKSNAVKNKGQGQFIKNKTLDLRIKSALSDKFGFSFSQDEEDKDGDLDVLYHPSANDCYPAAEGDRLGSPRIESIKNPVFMRAMTILRELINALIEDDVIDRNTRVRVEMARDLNNFNDRAAWYRYQRERESARKGYADRIKECGYEVNPSNLLKYQLWNEQGEMCLYTGKSIGLHDFLSENPVYEIEHTIPRSRRLDNSQENLTLCEMHYNHSIKRNFIPQELGDANAIYQRALHTYQPKIDALESQIERSRSASRSAQEKDVKDAARQKFLKAKMERNYWYGKLKRFELTEPPNGFTNNQLVDTRIISKYAFLYLKSYFERVETLKAGVVSEVKDIWGLKDKSRDNHVHHAIDAVVVACFNKGFYDQLAHYYEKFERFNKHGEPVPDAPLPWEGFDCYLNSQIQNEILVPHLHKDNTLKQTFKKLRKRGKIVCDEKGKAQMLKGDSARGQLHQEKVYGVIQVPPEEGKGGAETGQRSVIRKFVQELKNTDIENIVDPAVRDVIRQNFNKVGKETIWLNQEKGVPIKRVRVFAHPKVKSLISIRKHRDVSKQGHKSHQMVANGSNYITALYRGVVKGKMKADWKIVSAFEAVKAEREGTWAQLLPDVDEKGLLLKHRLKSGSHVLFWENSADELKTMNSAELSQRLYYVSVMEGARVKFNHHQTALTSNKLGDGESKINFGPLFHNRVYVSVNGINILVQGADFELDVRGRITWRE

SEQ ID NO: 2109 - protein, 1066 aa, unidentified
  REGION 1..1066: note = Description of Unknown: Cas Enzyme sequence
MENNNSNKIFGLDLGTSSIGWSVIANDESKIYDCGVIKFKPPVDENNAETPNQIRAKTRMVRKQLFRKNLRKKKVLDFLYKNGVLNKEMNLNDFFLLNPYELRLKALRESITEKEFARICYHMAQRRGYNEGVSVFNDSDGEDEQNKIFKGYGDIVGINQTEKEIFESGSLTAGEYFYELNKKGDKNKKRFLTRRMYVDELNLIISHQKKNINILKDEKLINELCHPKTGLLFFQRPLKSQKDKIGKCTFEGKKTRIKKGHPTFERFIAFQFINNLSWIEENGNLNYPNKDQRDNLINLFQSKESFTFKSIIECLGFNSKQAKNIDFKGHDMKSKIYGSKTYIKLSKLSGEEKYKHFSIDRQIEIWNLFNFMTLDDRIGYFKNVLHFNEEQLTDLKKIKFNDDYGSLSKNFIDKILPFLEQGYNYYNSVLLAGIVKAFGEKRWSVIKESDKERLFFDILDLKNKNTDDSILYERIQSFLCNEYGLSDDDVNKIYNSNSPNKKVKTYFLEVSEKTANPAVNKSLSLIRKLVNELIKKYGNPFEIRIEMAREFGQSFNQIKEEASRQREQNFKNDKIKKELFKLNIKDFYKNIKKYKLWEECGGVCVFTGRKISISDLFSGEVDVEHIVPRSVSPNSSLFNLTLCYREENQLKNDKTPFQFYHENSQVWKDIKCRAKSSFSSEKYSHFISSEIPSFEKFVSSQLNDTRYIMTEAKKYLISVCKKITTTNGKTTFKLRQVWGLDSILGGDEKSGKNKSDNRNHAIDAIVVAFTNDKLKHFVLNEIRKNNYSLSESKKDAPVPYNLKEFQRDVTKNTLNSIVVHDNKVKLITNRTLHVKKNGSTHIQKTKSIRGKMHDEMPFGKIMVNGVVKFAKRKPITSFETFGSIEKIVDSQIKKSVIKHLDDYVLKNFQDKDFGNKKIDDLSDAEFKKLCKKAFSDKDNPVYLLNSKGEKTQIIKKIRFAEKSDVVQVKKSENKYFSPNNNVYWVAEWNELKQKYDIKTISFLELIRLKKEKIDLNSKPTKRICLKKNDLVIASSDIPLSLDLNSIDKEILSESVYRVQKMSGKTI

SEQ ID NO: 2110 - protein, 1397 aa, unidentified
  REGION 1..1397: note = Description of Unknown: Cas Enzyme sequence
MDKNEEYYIGLDCGTSSVGWAVTDRDYKILRAKGKSLWGSRLFEEAKTAADRRVARSARRRNRRARARLKLLQDIFSEEMLKVDPDFYIRLRESFFLEEDKEGLARNSKNTLFNDGDYTDKEFHDEYPTIWHLRKAIIDSVNNDSKHFDIRLYFLAIQHILKNRGHFLYEGEMKGGGNFSDIWDEFCDTASNFNLNITDTVVDEVEKIVTDKKKTKTDKKKELGELIFIEDGEDDDVVSAAKTALAGLIVGSKVKIREIFETEAGKEVKSFSLADGNFEEKMSEWEEELGDIGRMDLVVVAKKIYDFGILNNLLDGHEQISDAMVANYEKHQKELKKLKEALKPFKEDYDEFFKTLKSDGKTVCYNAYIGKAYTEDSNGRRKTFSVDQEAINKKIAELLDKHNITGALRDKAEKRELLPKQKGQAKGTIPRQLHGNELKVILEKLCKDFPSFAKEVPGEDKEYNTKAKKIEKIHSFRIPYYCGPLVKRKFDEKGNLVEGGKSAFSWADEEIKELVYPWNFDKLVNKGERANNFIRRMTNQCTYLLDQDVLPKQSLLYQKYMVLNELNNLKIDGKRVEDVTWKQEVFKRVFESGEIKAGNMTLKTLKKILVENGLIRTEQDLGGTAELKNLPKLGTHRDFAKILGEDYGRKYKQEDLEYIVELITILGDERGILEEKIRERLKCTGEEAKKFSKLSYKDWGNFSAKFLMGIYADVDGVSMNILDALYNTNRNLMELLGGEFKFREKIEDYNKPLKPETGKVKYSDVKKLYCSPAVKRTIWQTIKIVNELIQVKGYAPSKIFLEVTRGEDVEKKGKEGLSRRAQLLELYKNMKNSSDYKELYDQLEGTEDRDLQSKKLYLYFTQMGRCAYSGERINLEEINNTSLYDIDHIYPRSKTKDDSITRNLVLVKAELNREKTNVYPISGDIRERMRGTWYAWANAGLITKEKLARLTRGNELTADELAGFISRQIVETSQAVKAIRDLLQTAYPESRVVMVKGGQVSGFRNWFGKEQFYKEQDGLGITHEKKLHDAKLEFVKVRAINDLHHAKDAYLNIVVGNVMSETFTDNPYKWLKRDDNNWKYSMNERVLWRAKPGNGPQIKGWNYQATIDRVSEQMKRNDILWTRMTTVQGGALFDLMPVGKSKKVDGILPLKKQKGEKYNPEKYGGYNSIKGSFFLLIEIEAKGEKHRKIIQVPQTAVNNVNEYVSENYPGARVLISKIPFKSLIKLDKTPLELYGRTGNSLIFHHAFQMVFSPEISANIKKVIKIIDKNKQKNGKYEIDIEWDGVSIKRNKEIFIALIEKLEILRDVPELSAKINDIKGSSDNFSNLSLKEQCLFIGEMIKIFTCNAESAKLAPFINGNIGVARLNNDITSKDVRLIQKSPTGLFEKEIDLKTYEPE

SEQ ID NO: 2111 - protein, 1046 aa, unidentified
  REGION 1..1046: note = Description of Unknown: Cas Enzyme sequence
MASELVFGFDIGTTSIGSAVVRMDSNAETGSILHLGVRIFPEARDPEGIPLNQERRKRRMMRRQLRRRRVRRRDLNSLLTDSGLMPPFTKEMGSPWSTAMAQDPWVLRAQALDRALSPTELGRVLYHLAQRRHFRGRDLEGPEVALADSKEAPTADEQKAASQRERDRNTLKASGLTLGAFMAGIPDLTERRRGHHFAREDVSAEFRAIISAQSPHHSQLRDQDFGAALEQTIFDQKPVFWRKATLGACRFMPDAELAASASWVAQEKRMLEKLNNLRIEEGNGRPLDDQERAAILNLLRKQETVSWAGIHRHLKLYWRKHDLSEKPTFNLQRGGEKGLVGNRLENRLATIMGTRWETDPVLQGRMRREIHARLYAADYGQIGGRIVIRREAESLQERTRERERLKADFALSEQQADEIAKLSFAPGWEPFSEAALWQFLPRLQQGAVFGSLLASPEEEVWRAITFPQRAQPTGAWVDRLPTPGNSLEEVERQKSVRNPTVLRVQNELRKVVNNLIAVYGRPDRIRVEVAREVGKSARERTEDLARNRDREKERKKAAEELQKCNITEPSREDIEKWLLWQECKHQCPYTGQMIDFAALFHRGEFQVEHIWPRWRSLDDSFANKTLCHRDFNLRKSNRTPFEVFEHDQKSWEEALRRVQAFLGPPGRVAIKARRFAASAIPEDFAARQLTDTGYAARQAVGFLKMLFPDLGQAGEVRVATLSGRVTSRLRHNWGLNNILSDSGGKSRADHRHHAIDALVAALAHPGYTQRLSRWFQARDSATPQPEPELRPPLPDVRHQAEKKVAETIVSHRVRRKVSGPLHKDTTYGDAGPAGGTGGIAYRWFVTRKSVGDLSKSLLAEDEAWSDPHVRDRVRAWVAANGGDPKKAFANGYPTVSEGGAPIRKVRIKFKQQQKLMAKLKNGYADLGNNHHMAVFRRADGRVENEVVSLFEAANRLRRKQPVISRPETGLSFVMSLAQGDTLMFPGGELKGLWIVQSVWSSGVIVLCRAEDAAGTTVFRPTVASALKSGGRKVAVDPIGRIRTARD

SEQ ID NO: 2112 - protein, 1277 aa, unidentified
  REGION 1..1277: note = Description of Unknown: Cas Enzyme sequence
MSKTLGLDLGVASIGWALFDNDFDDNPSRIIDLGSFVFNQIENGKTGKLDNVNRRLKRGQRRLRRRKNYRLKETRYLFKNELGISDEDFFAICKNNRTDVLELKVKGISSQLTKEELCIVLYNYMKYRGFKSSRKNQDKETEGALLNKISSFKKELCSSGCDYASQLLLKNYSSKDIKDKRYHNHDKDYLLTIDRGLYLEEINAILDKQIEFGSINNKFKEEYLFIYNKQRLFSQGPDGRFSEYGSDWTKESLINKMRGKCSFKGYDNEYCSPKDSFSATSFVLLSSLNNIYMKIKGSIENDYLFNISENQNKTNTYRLNKKGIQLCYDKAITSDSFNYSQVIKLLSINPEIVSFKGLFLSKKEYNSILNKFLNNHEELKNKKSYDWPIKETESFNLLCEKKKLENNIFKQPSSKLVKVTYELFNDVEREEKINDISEILMDNKSDDLIIKTLKEHKFSDTVIKTIIDNVGDVKDTINLSTRLCSELNKLLINGMTYDKAMNNLGLNHSERNLRDSIHGGRIPDIDTALKENSIQLRNPVVRNTLIQLRKLLNSIVDVYGDIDFFSIEVLRDLKRNFQDRMSLRNEQFENMENNIEIKSEIMINFNSIFSSVSMIKRDDVIKYRLYKEQKGRSAYTNKPIEIKYLFNNGYYEIDHIWPYSRTFDDGFNNKVLVETKQNRDKGNKIPWEYFHNDSIIREFLNQANISKSKADRLLAHELPENSEFKLRDKNDSSYIAKLAKKLILFYLVKGNDENCQTQSGVITDKLKTFWKLKGKTHSYLSSYEKNYSADYCYIFNDVIISDDKLVFSFTSNRNGFIDEKIDFEYNKYKKKKEIKDNGDNDENKEKGLSYYQQQSNEYLSEISNNKELVYSVLSKYFSKKPEDIVGSLVENHLLNEDLRESVIYFFNKNIAACQKNHLTKDRSNDLHHALDACIIACCTPANVAKITKWYKNEEINDVFYNKTTGEVNKIPYPYECFYKEVLLRVYERDEIKLRNELFKLSNYINVNSKEKEFIHVLWPTRLPDKISKDGISLDTIYGEKIGNATSKISVHKLSLKNGKIDKKILNINHGQDKIIEIIRKRLSLDKKDRTPYPILVKKDKDGKDVSNYIKTVKIDLGNVNNYYKLGEKRYASNNNFVITRIYKKGDGSELQYYCSMNYGTLYKERKDPNNIYYDLRFGQSKKFIKVDNKTLNNDYLLLSQFNRYSLLEIKLKGSTTSVFVYAGCASSGMLEVYSVLGDQSDLIVNDVSKTFRERIQLTVSCIEYIKIHNISVLGRVN

SEQ ID NO: 2113 - protein, 1372 aa, unidentified
  REGION 1..1372: note = Description of Unknown: Cas Enzyme sequence
MNLRNVESYQIGLDIGTGSVGWAVLDENGDLCRFKGKPTWGSRIFPSAQTAADTRMHRGQRRRYDRRRQRLDWLQEIFAPEMAKVDPEFFVRMNQARLHPEDRAEGHRDYRWPLFNDAGFTEADYYKRFPTIYHLRAWLTEADEKADIRLIYLAFHNIVKHRGNFLHEDNPALSARNANMKEAVKRLREALEDWCEEHDIECAFDEDALVRALSDASLRAAEKRERAEAALGVEKAYKKLAKAVSSAVVGYAAEFSHVFFVEAEGSKFALSNDEKVEAYACPDEGRDLFEAMQKVYSSYVLMGILSEAQGKTLSFCKVGEYERYARDLETLKGLVRAYGPERYDEFFRGPFYEGTHDYNPDKAKGYTKYNLGTSKLSHEDFLKEVRKLLADIGAQEDERYAAVERAIEAGTFLRRLKTSDNGSIPYQLHLEELEAIIERQARHYPFLAQEKGKLKSLVSFRIPYYVGPLTTKNAAVDGKGEARFAWSSRKQGMENERVYPWNWEDVIDKDQSAEDFIRRMTGTCTYLKGEPVLPRCSLAYEMFCVLNELNGAKWTQDGDKSYRFDAADRLGIVEELFKKRKRVTYEAVEKWLAKRHGPEGGKSVGGAYHVSGGQGEDAFESQLSSHYDFCKILEVDELSEADAAMAEDVVLWNTVFEDRSILKRKIKLAYGDRLSDAQTGRLCKRRYTGWGRLSSELLCGLRSATDNGPKTIMDILLEGDPNHARRMGAAMNLMEILHDDLLEFQAKIDERNLERAHEAGGMSVDEVTGSPALRRGINQALRIVEEVARIAGKPPAHIYVEVTRDEDSRNKGRRTTSRYRALDAALSSLKSQHADVYAELKERDSHALDDERLTLYFMQCGKCMYSGKPLDINKLQTYHVDHILPQSYTKDDSFENKVLVYADENERKLDSLLLDQKLIARMQGFWRTLRDAGLIGDKKFNNLTRTGVGDELMRKFVSRQLVETSQIVKQVQQLLQARYPESDVRPVKAGVSHQLREQCGLVKSREINDFHHAHDAYLACQVGRFIQYRHSAVYDEPVKMAAVVRQFIKKQADDYRRTREMPGSAGFIVSSFLTPGFDVETGEVFRDAWDADFEVDRIKRCFDYRDCFISRMPEETRGAFWNQQPLPAHGKEKKLPLKKGLSPKKYGGYSGEQFSYFMLYRALDAKGKPCAKFVGVPLPVAREIACGKLTVEQYAMSVADAEGLRFERILRGRILKYSKVYYGGDEFYLSALDVVYSARQLALTGELLKVAADVCDKRIDAERLDEAAMGRLFDELRDKALYLCSRFKTVRDVLDKGCDSFLALTKSEKRLLLVGLIEFYAGKKQRVSLSLIGGSPNAGKITNSFLHAKIEDVVFADTSVTGMFERRETIGL

SEQ ID NO: 2114 - protein, 1047 aa, unidentified
  REGION 1..1047: note = Description of Unknown: Cas Enzyme sequence
VDESQGSIIAAGVRVFPEGLENFDTKKEVSLNEQRRTKRGARRQTARRSRRKARLRDALVESGLFPADPAEQNRLYGLDPYELRARALDAPITPHELGRALLHLNQRRGFKSNRKKDRDDKEAKGMLAEISDLAADMEKTGAHTIGEYLHRKARLLDHTDRVDDDHVRARHTRRDMFEAEFKAIWHAQQAHYPDLLTDDLCHGQLGPQDYPHKPLAKHDPRRKGLSDLEAFGIHGLIFFQRPMYWPKSAIGPCELEPKEKRCPRAHRLAQRFALLQNVNNLRYLDPDTNTECKLEDGYREMLLEYLATRKEATFDAIRKKLGFDTSVRFNLERGKNPKMKGAVTDWTIANAIGKQWHDRAEAEKSAIVELLLDIEANEDVALDRLVDEYGLSVEHAEALLTLDLPAGHVALSKVALEKLLPHMERGLLYMAEDETNSAMHAAGYFRPDELQRRIFDKLPDPRRTRDCPIGDIGNPVVKRTLVELRKVVNSIIREYGKPDAIHVEMARSIQMGSVSRGKYNKRNRERQALRDAAADRIREHKVKVTRDAITLYLLWEEQDRECIYCGQTISPTQLFGGEIDVDHILPQSLWPDNSHTNKVACHRRCNADKGQRTPYEWLSEDAYERLCTHAKSLLRKGKMSYRKCQRLAQKHVDPSTFTARQLVDTGYIARLAVEYLQCLYPEKHTVLGLKGQYTAELRHQWGLHTILAELPDSPAWQESSTLRPGEKNRADHRHHAVDAIILALTNRSRIYQLGKVAQTGRVDRETGQWLGLDEPWDDFRSSVRRHAEHIKVSHRVRRKVTGALHEDTFYSPVTDRNGRVIEGKYAVRKPLEELSASEIPLIRDPAIRDIVEARLNEVGIETGRGKKFSRTEFKRAVSDLRMPSGVPIKKVRVIKSDLTIRPIRQGKAGQVHVKPGSTHHLCIFQWQENGKTKRGATFVALLEAAGRLKRKEPIIQKTPPKDDPVIPADAEFIMSLSKGEMVLANWKGQERLLVFKTAASTQGQLYFVDHTDARRSSAQSKLVANANTLDARKVTVTPLGYIRWASD

SEQ ID NO: 2115 - protein, 1371 aa, unidentified
  REGION 1..1371: note = Description of Unknown: Cas Enzyme sequence
MKNKNDYYIGLDISTHSNGWAVTDENYNIIKRNGKSLWGTRLFDEAKTAKERKTLRAARRRLERRSWRIKLLQELFAQEICKKDPGFYVRMKESGFHKEDKTIHQPNSLFNDINFNDKAYHSAYPTIYHLRYALMTEDKAFDVRLVYLAIHHIMKHRGHFLFANLKTDEKGIALFEESFNAYCNVVERIFGDSLKTDKVENIKDLFKNKDLSKAKKEKALLECLDKVGDKRYKAMVTLAVGGTAQLSTVFNDENLKEKESSTTSVCFAKEDYESKEPEIMDKLGERFDLIAALHDLYNWSLMAQIMKGHKFISEAKIENYDNHKSDLAVLKRVFKQNPEAYAHMFKEPGGKKEKANYSAYVGLCKVKRSKTPITKCSYEEFITELKKRLEQFPSSEDKEYIKQRIKNGEFLRKAVNKENSIIPYQLHLQELKNILTKAERYLPFLKEKDEYGTISDKIISLFTYRIPYYVGPMNEHANHCWIVKKDKNGRVLPWNFNEKIDTENTAEKFIRSLTNKCTYLVGEDVLPKNSLLYTKFTVLNELNSVKIGRNLQKLDEELKAKVLKNLFMVYKHVTKREFVTYLLTEGYNRDEIEPVNGIENGFNSNLGPWIDLKKIMGESFNYKDGEQIIRDITIFGNDKNMLKSRIHRMYPSLSSKQVENLSSLSYQGWGKLSKELLLNVIAEPGEKHEMLVDKATGKALNIISAMEKYPLNFMELLSDRYGYTKAIEEKNKGRWGEGEITYEDVEALHVSPAVRRPLWQAMKIIREIVKIMGREPTRIFIEMTRGDGVNGKATVSRKDKLLELYKKCKDDTRDWVKELGTQENEDFRSDKLYLYYTQMGRSMYTGKPIDINELFNKNMYDIDHIYPQSFTGDDSLDNRVLVEKAVNSKKDAVYPLGDALNGCHIPWQNIHIEDVQKEMKPFWEMLCDKGFISKEKYKRLIRTTPLTNEEKAAFIGRQLVETSQSTKTCAELLSRAYPNTKIVYSKASNVSRFRQYGDFIKVSTMNDFHYAKEAYLNIVVGNVFYTKFTSSPLNFLKEKNSVYTLNTRSLYSRKISRGGVDAWIPPQKDKEGNIIPGHEGTMSTVRKWMSKNNILITRMTFEGKGGLFNQTIMKKGEGKLPLKGKLPLSDMSKYGGYTGVSLAHISLVRAKKGKKTVYMFESVPVYCAKTLKTKEDYVAYFKKVWKEENKDYEDLEILIPIIPLQSLIEVNGFKMHISGKNGNGYSVKNAQELCADNSFVAVLKKALKYNLLEQGEISDEEVLYLYDFFIDKLQNTIYSKKFDGIAKKLSSKRSKFSSLKLKDKCKVLKEVLQLFQCNSSSANLTALGCADRTGLLTIGKNISEKDHVYLIEQSITGFYEKRILLNPYEGK

SEQ ID NO: 2116 - protein, 1219 aa, unidentified
  REGION 1..1219: note = Description of Unknown: Cas Enzyme sequence
MSERILGIDTGTNSLGWAVVDYDERAQGDKYHLIDKGVNIFSEGVKIEEDRESSRAAERTEHRRHRLNYYRRKIRKIALLKLLSENGLCPPLSSEELKAWRLKKVYPCSKEFMEWQRTDDKENKNPYYYRNLCLTETLDLNNRSNRYIVGRALYHLNQRRGFLGNRKEETKESDGAVNKGINALTENMQKSGCQYLGEYFYLRYKNGEKIRKEYTDRLGHYREELLAICKKQGLGESLTERLLKVIILQRPLKSQKHSVGKCVFEPQKPRCPISHPLFEQYRMYSFINGIRLQGPDDAEMRPLTSEEKKAIVPLFLRKSKKDFQFKEIASKLSGTKNNFCYYKDKSDKAYKFNYHEDNNVSGCPVTAQLSAVFETGKDVDEWLGAACEVYTQGEGKTRLQIMNDIWHALFFFSDSDKLKEFAQNKLQLDGEHAEAFSKIKVSSDYASLSLKAVRKILPYMKHYGMKYSHAVFLANIPAVTGRSVGEDAMLPKEDVEDLMQRIAEYNPEITGIRTLEEYLKGYITWKYKIPDGGEKVLDKLYHPSMIETFPEVLRPTEGGYFQLSSPRTSSLRNPMAMHSLFRLRHVVNTLLREGKIDKETTIRIEFARELNDANKRVALRAWQRERENENKEYAKKIKEHFGEDYEPTDEDILRYRLWEEQDHICLYTGEKIALSDLFDGNKYDIEHTVPRSAGGDSTEMNLTICQSRFNREIKRAIFPIKDLPSYELIMERIERWKKEYEDIAKQIRKLNTRGLSDKDAKDRIIQKRHLLKLKYDYWWGKYTRFTMESVPEGFSRSQGVGIGVISKYARLFLKTVFPKVYVVKGLATSDFRKIWGLQEEYDKKQRANHCHHAIDAITIACIGKAEYDYLAQYYGNEEKRRWGLDSRRAFFPKPWATFTEDVKNIGDSLLISHYKADNIAKHTRKKVRKAGKFTGEYMQGDTARGVLHLDTYYGAIKRDDCVRYVVRRPLDSLGEKAVESIVDDAVREKVKAAVSEHGSLKEAVKAGIWMNRDKNVKINKVRVYANDVKHPLTIRKGKQRDLSKKEYKQGTFVKNDTVYSVAIYEGLGENGKISRKAIFHNTLDVAALLKQSGENHGQPIIPKYYPESDLELKHVLKIGTLVLMYENSEEEVYEDDRQGLRKRLYKVYGLASTNDKIKLIHHQEARRSKDLDKLTYYGAYRNEGIIAPRIWVSTKMFRALVQGWDFEINDIGEIKFLRR

SEQ ID NO: 2117 - protein, 1096 aa, unidentified
  REGION 1..1096: note = Description of Unknown: Cas Enzyme sequence
MDMAQPRDGGKWGLGLDIGIASVGWCALGETRIIDLGVYCFDRAETADGEALNSVRRTARLARNRLRSRALRLRKLARAMKRHGLITDAKFFLEQSPFRTSLWQLRREALDRRLGAEEWARVIYHICKHRGFHFPRKSEAESSEGGRVKQGLERTRELLRANSYRSLAEMMLEEYPVHQRNKRGDYGQSLPRELLADELKLLFSRQREFGNPHAGEDFEDEVLDPRNGLLWQQKPALTGEAMLNLLGKCTFERDQHRAAKHTWSAERFIWLGKLNNLRISIDGDTQALSEAMRDTVVDLPYRRVKVRYKDIKDVLVKNGLVAETMRFAGVRYPNQQADKPAKNPEETTLVEMKGWHTLRKALEKQALDDEWKHLSVDHDKLDRIVSILTICKSDEEIRVALSGVGLAGQAIEALLPVSFTAFVRLSLKALSKILLPMERGERYDEACESAGYQHSQPLPEQGKTRLLPSFYKGRDSNGKLLFDENLDLPRNPVVMRALNQARKVVNELIRQYGPPERVHIELARDLSRPLDERRKIEKEQKAYAERNQYLRDQYESEIGSTPKSREFEKWRLYHEQNGKCAYSLEPLDLAKVVDDPGYAEVDHALPYSRSYDDSKLNKVLVLKRENQAKGNRTPYEYLDGAGSSERWQKFEVVVKANPQYRQAKRDRLLRKHFGAEQAAEFKARNLNDTRYICRFFKNFVERHLQLAGDDRRCVVLNGQLTAFLRARWGLIKVRDESDRHHALDAAVVAACSHAMVKRLSDYSRTRELREVTSGFVDVDTGEVIDLVALRRLEAKFPQPWSHFREELEARLHIVDANALRDRVARLGTYDETAVLASRPLFVARAVKRRNGGAAHKETIYSQPEAFKPTSSATKKIALSALKAGDFAQLVDPQRNEKLYAALRKRFDEYGGKADRAFPPGYEFRKPDKQGNPTGPVVRTVTLRIDKITGVPVRGGIAENDSMLRVDVFAKAGKFFLVPVYVRDRATKVLPNRAIVQGRNEGDWTSIDGSFDWCFSLYPNDLLKVTLKDKVWFGYYAGCDRSTGALSLWAHDRNAQVGTDGLIRGIGVKTAVTLERFHVDVLGRIYRAKPEPRRELA

SEQ ID NO: 2118 - protein, 1490 aa, unidentified
  REGION 1..1490: note = Description of Unknown: Cas Enzyme sequence
MNKKILGLDLGTNSIGWALIEQDFENKKGKILGMGSRIIPMDAGEMGKFAGGEPTKTGTSERTSFRSVRRLRERHLLRRERLHRVLNVLGFLPEHYAVEIDFEKRLGKFLEETEPKLAWKMGIGGKFSFLFQSSFNEMLADFKANGQDIKIPYDWTIYYLRKKALTQKITKEELAWLILNFNQKRGYYQLRGEEEEETTNKLVEFHSLKIVDVFADETPNKKGELWYSLKLENGWEYRRSSKTPLFDWKDKVRDFIVTSELNDNGTVKIDKEGKEKRSFRAPSEDDWTLLKKKTEHEIEQSKKTVGKYIYEALLQNPTQKIRGKLVRTIERKFYKEELRVILEKQIELQPNLFTDEFFNDCVRELYRSNEAHQLQLSKRDFVHLFLDDIIFYQRPLRSQKSSIGNCSLEYRTYKVNGEEKKEYLKVIPKSNPYYQEFRVWQWLYNLKIYANTDDIDVTETFLKSTEDLENLFEFLMSKKEVDHKDILKYFFKDLKGKVQTAEIAKYRWNYVYDSEKDESKTYPMNETGYEIRRILEKVENVPTNFLNGEIEQHLWHIIFSVTDKKEYEAALETFAKKHSLYFVPKSERDDKNPNKKCFVYNFKNMVWKENNYGSYSEKAIKKLLPLMRLGKYWKWENVDSKTQTRIDKILTGEFDEEMQIRVREKAITLREQNHFQGLQLWLASYVVYDRHSEAGNISKWNSSEDLKTFLNEFKQHSLRNPIVEQVITETLRVVKDIWIKYGNGAKDFFDEIHIELGREMKNTAEDRKRITNQISESENTNLRIKALIMELKENSDGKLPVDDVRPYSPMQQEALKIYEDGVLNSNIEVPDDIVKISKSAQPTKAELMRYKLWLEQKYRSPYTGKAIPLSKLFTTAYEIEHVIPQSLYFDDSFSNKVICEAEVNSLKNKQLALEFIKNHHGQKVSTSIGLVEIFSEEAYTSFVKEHYEKNRSKKTKLLLEEIPEKMIERQMNDTRYISKYISSVLSNIVREEKDDDGVNSKNILPGNGKITAQLKQDWGLNDVWNELILPRFERMNELTKTSAFTSKNTNNKIIPTVPLELSKGFQKKRIDHRHHAMDALIIACATRNHVNLLNNQSAKSDTKRYDLQYKLRNTEKWTDKNGKERDKFTEFKKPWETFTQDTRNELDKIVVSFKQNLRVINKATNTYERIENGKKTDKKQEGVNWAIRKPMHKDTVSGKVELKRIKVPKGKILTATRKSIDMSFDLKTIESITDTGIQKILKNYLGSKNNLPELAFSPEGIEDMNKNIAQYNDGKPHQPIYKARIFVETATQFQVGQKGNKKHKYVTAADGTNLFFIFYENKDTKARMFETVPLNEVIEHQKLQVSLNVEKSKRTDVPIKNVLEHNNKEIEVNYLFHLSPNDLVYVPSNDENLSMIDFTNLSKEQRNRIYKFTDGSGTIANFISVNIANVLFNMNKEKQKKAFGREMFAIQNEIGIGSQGSKNQNAITGEQIKSVCIKLKVDRLGKISKA

SEQ ID NO: 2119 - protein, 1222 aa, unidentified
  REGION 1..1222: note = Description of Unknown: Cas Enzyme sequence
MKKVLGLDLGVGSIGWCLIEKDDNNVPKRILRIGSRIVPISSDEETGYTKGNAISKNADRTAKRTARKCYDRYQLRRQALVNLLKRLGMEPNKNLMLEQTPMELWQKRADAASKEISLEELGRVLLHINQKRGYKHSRLSNSDSKETAYVQEVNSRYDDLKAEELTVGQHFAAKLKENEQISADGKKYYNYRIKEQVYPRHAYEEETKKILEVQSRYHSDVLTPDVCKEMMDIIFYQRDLKSCKNLVSFCEFESYAITKDGKQITIGPKVAPRTSPLAQLSSILETANNITIRNKRNDELYISPEQRKAIADFLDNHEVMKLADLYKILNIGRKDGWWAGKAIGKGLKGNITKCQIREALSALPKEQVDSLIAFQLEFDEYVDEETGEVRKRINNTLAEQQPLYKLWHMLYSIKDNTELSGALHHLGIEDNESIEKLCNLDFRTAGYANKSAKAIGRILPYLMEGVMYSEACERAGLDHSRRIDPNRPLLKHLPQIQKNELRQPVVEKILNQLVNIVNALLEKEGAIDEIRVELARELKQSKDERNETFKRNNQNERQNKEYAERIKEYGLTPTRNRIMKMKMWEESEYTCIYCGQPVNVTEFLKGADVEREHIIPRGLLFDNSFTNQVCSCRRCNSKKGMRTAYDFIADDKGQEGLNAYIEHINDLFDKKKISRSKLNRLLVSHKAYISRKAQGKDTEEDKELWENFIDRQLRQSQYIAKKSVEMLQQVCKNVYTTSGSVTDFVRHQWGYDELLHDLNFERFKKAGLTAMVKQLHSGEEVEVERIANWTKRLDNRHHAVDALAIACTTQSMIQRLNTLNASRDEMLEELNSKDQRLVDPERSMLEKWVFIQPHISYAEAKNKINKIVISQRPNTRITVPGKRYVAKNGKRTLAQTGIIVPRGALHAEFVYGRIMKQDTDGVTMTPQYVRKYKLGIGAQGFLFNGKEFYKEELKKDSKTGLSKIIVTDKIKDVLEKIVDGGIRQRILERLNRGFEEGTDYRANVAQALANLKNLDEDPIYSDDAKTRPIRTVRKYVSSSTMVAVRKDDNGNPIAFVEPDGNHHVAFYKDDHGVISETIVTKWQAVQRKLYHIPIIIDNPSQTWNEVLERKDIPEELLQSLPKDSSTFLLSLQIGEAFIMGMEDADYQRALEGKDVQSLAEHLYFVQSISSCDYRFRRHVEAQYDTNDINKEDLRFLRIRNLQALFEYNPQKVKVTVLGDLIH

SEQ ID NO: 2120 - protein, 1041 aa, unidentified
  REGION 1..1041: note = Description of Unknown: Cas Enzyme sequence
MSKLILGLDLGSNSLGWALLHANDIGGIDGIADVGVRIFPKAVEEKTPTPKNQKRRNSRLARRVIQRRARRKRHLLNYLVSLGLLPRELLETGSPEGILNSLGDPYQLRATALDQALTSHQLGRVLLHLVQRRGFLSNKKVLLGTDMLDDPDVMAILSELDDENSSKEIERKTDAEETAFKADISKLRKEINQANCRTLGEFLAKKSPHECKRNRHDQHLRTDRQMYREELAQIFEKQVAYHPVLTEEVREKIEQIIFYQRPLKLKRDRVGKCSLEPQKKRSAVARLEYQKFRYLQDINHLRYFDLYTEQWVSLTEEDKQKLRDLFETTAAVTFPKIRKILGLDKKSEFNLESGVKKLRGNTTAVAIRDVYFDWELLSAEQQLSMVEDLLSIKKKSALKKRLMEYWQLDGETSVRLCMLELEPDYGSYSLKAIRGLLPHLEQGAIFSDARIAAGYGYEKQDVTIRDKLGKPPELPNPIVNKGLIELKRVVNAIIAEYGKPDVIRIEMARDLEMNTQKYKNFLAQQLKNTKANDKAIDTFQEIGREHPKLGLSRYPSRDQKIRYRLWQDQGHCCAYSGETINLATLFSAAIEIDHILPYSQSLDDSYMNKVVCFARENQIKGQKTPIDAFGNNSDKWEQITQAIGRWPREFSSKRDRFYRSAADLLERDFIGSQLTDTRYISKEAGEYLKPLGADITFTRGIMTGWLRKQWQLNDLIGSTAEKERTDHRHHAIDALVTACIDRPLYNLLKSQAKDLERSSSKWTMNDLYLDPPLADIKEQLAEKLDQVIVSHVPQRKITGALHEETGVGFIEGIGTVYRQRLDGQFNEKKVANIIDEHVRDIVQAHLDKYNGDPKAAFAEGFQLFHKDGKTPIKRVRVVQSETTLVKLEKSKFAVKDSDGNPFKWHSFGNTHHVEIFKHKARANKYASQFVTAMEAARRARGVKSDKEPVVHTQCGADWEFITALHINDLVQVRIDGKTQIHRIQKLNMVNSKIATRLHTAATISNKTEGLEASPSSMVGIYHLTPISVNVIGKLRSDQADY

SEQ ID NO: 2121 - protein, 1030 aa, unidentified
  REGION 1..1030: note = Description of Unknown: Cas Enzyme sequence
MSKLILGLDLGSNSLGWALYSEDEQQQKNLVDIGSRIFSKAVEEKVPTPKNVKRRNMRLGRRVLQRRARRKQRMMNYLISLNLLPTNLKDSQQPEIILNELGDPYQLRAKALDQQLTAYEFGRILLHFVARRGFLSSKKQVAGDLIDDPDTIAYLQLNDESESADKEEGQFKTDIAEVKKAISEAGSRTLGEYLYNLERGKCKRNRSHEGGHLRTDRQMYREELALIWQQQQAFFTDLPTDFMEDKKGVKRIIFYQRPLKLKADRVGKCSLELAKNRSLVARLEVQQFRYLQDINNLTYFERHSEKDIPASAEQKALLIAHFENNTKITSTKLRKILGVDKSTKLNLEAKSFKGNLTGCAIKKIISDIWQNYSAEQQINLVEDLLTIKKKSVLKNRLMNHWNFTSQQAIELCLLEFEPGHSNHSLKAINKMLPHLKNGLIYSDARIQAGYQYETKADLTTFNELLDKPPETANPIVNKGMHEIKRVVNAIIKEHGKLFAIRIEMARDLEMNTKRYKENEAQQKRNQKANEIAEKAYQSLGLGQYPKHTDKLKYRLWKDQYKRCAYSNKSITLNQVFSASVEIDHIIPYKKSLDDSYMNKVVCFTAENRYKGDRTPKDTWGEQEDKWNQITQSIAKWKGLDNKKARFYKTEKDLQDRDFISNQLNDTRYISKLAISYLKTLGCDVSTSKGVTTAWLRHQWGLNSLIGETDKKERTDHRHHAIDAAVVACVDRSLYKKILHWTQTNEKKLKITPPTSHFREQLAEHLKHMIVSHDVQRKLSGGLHEETGAGYIEKHGGLVYRKTLTGDFTVKNANSIVDKTIKNQVLAHLKSFDNDSKKAFSPEVTVYHQDGKTPIKRVRVLQSKTSLKKLEQNKLPVKDTNGKIFKWMAFGNNHHVEIIKNTETDKIKGVFINMFEAHRRAMTGTKSAKKRGIVQEPIIQTKHDGNEFIMALHINDLVSVEIENGERVFYRVQKLGGGYDLTLRLHTVTTTKREKEFIENKTMLENSFSNFIKINNMKLHKINCIGTLLDD

SEQ ID NO: 2122 - protein, 1489 aa, unidentified
  REGION 1..1489: note = Description of Unknown: Cas Enzyme sequence
MKKLGLDLGSSSIGWLIREDDKIGEKGVITFQSGMSKGATGGYTSLTADRRTARSKRRLIQARKYRKLELLKVLLNEFVPLDKSELENWSKYKKGQIQKFPENEKFIKWLACDFAYEGGIKYNNPYELRVKAIDDKLSKHEFGRALYHIIQRRGYKNIGEADEETKKQIERRGESGFKDAIANNRTIAEALTNTFLNVGERARNQYPYREEYQNELELICKGQGYDISKNEKGEYKNDFVKKLYNAIIWQRPLRSQKGNIGKCTLEPTKPRCPVSHPVFEIFRAWSFINTIKYYDDKSEKQNISPEFRKLLFEYFLKQDKNFKFEKIREFLDKLFKAKKKYNYPINKDGKYDTSVSGMPACNGLLKVIGDKAKDAIINIDKYNVLDSNVIINKVGKTIEIISKKKNIDDKTKKDLEKTIVKDIINNSPKIINNYSLYDLWHVLFEFDEKHLESFAIEKLKIENEKNKKGVEYNPFAKLKNAILTGYADLSIKAMVKIIPFLKKRFLYNEAAVLAKIPELLGEKWEQEKDKIFENIRLSNETYNWYKTTIGITNNLIDQYKGLDDNIYAYKDYTYELGKMHDSEILKTCIGYFGEKSWENRTDKDDVFKEVKKHYQIFFKDTKRAYREVPLLTDIFKEQLKKSNIEINEKLYHHSNKENIYLKRCINNRTGEIKLPTDKKTGMEILPQPRIDSIKNPMFNKSLSILRKLINELIINGTIDNDTEVVVEVASELNDNNKRAAIERYQNERKNKREKYREFLNEFKEKENHSINVDESINTFELWTEQTFEKTENEKKEKISNKNNSEIHKEKDALKRYELWMEQKGQCMYTGKMISITQLFSNEIDIEHTIPRSLLPDNTMANQTVCYAWYNRDKKRKRLPTYCDNYYEDKEGWGTRIEPRLDNWIQIRDSYKERYEERIKPKGNEDEAKKNKRIQEKHYFKMHYDYWQDKVSRFTAEEVKDSWARRQLVDTQMVSKYAREFLKTYFKKVAVQKGSVTADFRKIYSFQEQDKIKSRNRHTHHAIDAAVLTLIPTNSSHRDKILNKMYETYENEKKQFTTTPYSGFNSQKLIQDIDNNTLIVNYENDKILKKTSKNVRKRGRFQYLKDKKGNFILDSDESKILLKAKGDTIRSELFAATYLGKIKDVERYEDEQPKRENGDWKYKTGKDEFIFVKRENIDKVKASDKLIAVIVDPVIKKAVIDQKSKAIVKDYQENIIRHVRIKTSAGKEVKQRVNYRSKHDYKNKFYSEAGSVPYAVLLQKSNNGKVEREMIPIASFEVAKQHKKSGSFDVKNYILKNYPEFKDYTDKKLLKVGQKVIVLKNDEEFEKRFDLDFQTKRLYSIKQFSDVDNSIYLQYHLEAREDGEIDDYVKNEKDKLLRNYEIKHGIPEVVEDTSKENKKERKDKYKKDKYSFKSFEDYRFKRLISTVGKDEVKKMKDELGNFKKHSSRIEIEGQTPLLKMSKENWNFLYEGNKDKGYDFEISLLGKITIH

SEQ ID NO: 2123 - protein, 988 aa, unidentified
  REGION 1..988: note = Description of Unknown: Cas Enzyme sequence
MNSRTLGIDLGTNSIGWSLVEFNDNQQPIGLKDCGVRIFQEAVDVKTRIPKNQERRAARSARKLQSRRKMRRKTLLNLLINYSLLPKENKEREALLLDDKLYNPYVLRARGLDEKLTLFQFGRAIYHLNQRRGFMSNRKTGKKKDEGPVKQDILEINEEIEKTGCRSLGEFLASKKSQRKRYTSREMYKDEFEQLWEAQRKYYPETYLPELKVKIFKTIFFQRPLKLQKNLIGKCTFEPSRKRAAKAWLPAQKFRILQDLNNLKIKDPTGREMRSLEGDERKILFTILQKQKTLTWKKARRLLGLHDGEIFNLEQGQKKELIGNRTACDMRNILKSRWDKMNNSQQDSLVTDILTIDNENGFLRRMKEHWGFGEKEAEKLATTELEKGFILLSLKAIRNILPYMEEWQTYDKACLSAGYDHSAPGKGGAATKRLGEPKDIRNPVVQKALWETRKVVNALINKFGKPDTIRIEMARDMKMSKKQREEIQKRQKKQENENEKVRNILREELGFQQPSRADVQKYQMWEECNMRCPYTGKTISRQMLFSPEVDVEHILPYSRSLDDSYMNKTLCNARENREVKRNQTPYEAYHANEKKYQEILSRIKNVGMPWPKRRKFEQQEINTDEFIERQLNDTRYICVEVKNYLKQLGIKVEVSKGAATYDLRKKWNLNTILALPGESGKNREDHRHHAIDATVVALTSISLFQKLSKISAATPYGIGLSGNKLKVSEPWDNFASDVRGKILGFIISHAPSRKISGALHEDTAYGMSSRKHHQKGKIYLVRRVPLEKITNNQINQIRDDELKKIVLDRVDEYSGDLKKAFVETLYHKDGKTPVHSVRIETVAKESSVHGIIEDRKKPYKYYQYGSNHHVEILENVKTGKRKGIFVTTMEAARRARIDKIPIVQKNHGEEWKFVMSLSTNDMVEVVGNDEIKIYRVQKMDGSNKRINLRLHNAATLEYNGQELIKSPMALRCKKISVDPICNVSFCND

SEQ ID NO: 2124 - protein, 1220 aa, unidentified
  REGION 1..1220: note = Description of Unknown: Cas Enzyme sequence
MKKILGLDLGVGSVGWSVVSCDDEHKPVEILGMGSRIVPLTPDESNEFSSGNAASKNQSRTQKRTARKGYDRYQLRRQALTVKLRELGMLPDEALIKLPVLDLWTLRARAATPGEKLSLAEIGRVLYHLNQKRGYRHSKEDDSADKTQRDYVQAVNKRFQEIKDEGLTIGQHFAVKLKESEVITDKGAFYNYRIKEQVLPRAAYVEEFDRIIQCQREFYPEVLTAADVNEIRNEIIYYQRPLKSCKHLVSSCEFMQRELFDAEHNPIRNRKGEIVVAGPKCAPKSSPLAQVCKIWEEINNIRVTNKENDEYFVSIDNKHEIFDFLNTHEKMKADDLFKILGLAKNSGWSADRAMSKGMAGNTTRVSLMKALKGRRDIDEILRFDLREVESNQVNADTGEVLMEIGAECESEPLYRLWHIIYSISDKNEQKAALEKQFGITDESMLESLCRIDFVKQGYSSRSFKFMRKILPSLMDGAKYSEACDVIGINHSDSITKAENQTRKLLTKLPQLQKNELRQPVVEKILNQMINVVNAVIDKYGAIDEIRVEMARELKLSKAGRESAAKNIRTREKANGEIAKRIEELGLVPSKNKILKYRLWEESGKRCFYCGQPVSATEFLNGLDVEIEHVVPKSLLFDDSFSNKVCACRKCNAEKGNATAFDYMKGRGENAFEDYLKRVETAFKENKISQTKKNRLLTPADKIPKDFISRQLVQTQYISRKAMEILNQVCRNVYGSSGDVTAYLRRIWGYDEILHSLDLPRYREGNLTGDVTYVHRGQTHTEERIKDWSKRLDHRHHAIDALTIACTRQSIIQRLNTLNAKTAIGEEQMTLDKWTLAQAHFSVADVADHVADILVSFKSGKKVTTPGKRYVYKSGRRIVAQKNILVPRGALSKESVYGRIKSIEEKVPVKKLFERVDDIVKPRIRHLVRERLESCGGDCSKAVSSLKKSPLYLDEENTIMLEYGSCFKPEYVIKYSLNSIKAKDAASIVDKHIRGVVTARLAAFGDDPKKAFAEPLYADEAGKIQIKTVRCYTGLSQVVPVKKDAAGNDIGFVKPDNNHHIAIYKDADGKYQESIVTFRDAVERKKYGIPVVVRNPAAVLDTIIDKNVPEDLAGGLPSPEWTFVMSMQQNEMFVLGMGDDEFNDALAGRDYKSLGEHLYRVQKLASLDYFFRSQFETKLDDSKGASAMKKFYRTASFKALFALNPRKVSISLLGEISLKDD

SEQ ID NO: 2125 - protein, 1076 aa, unidentified
  REGION 1..1076: note = Description of Unknown: Cas Enzyme sequence
MTWRLGIDLGTNSLGWGALKLEQTDGAWSAAGLIDSGVRIFSDGRNPKDKQSNAVKRREPRGARKNRDRYLRRRARLMRELIEFGLMPKDEAARKALEGGKSVPLVDTDPWILRARALNEEISLHQLGRAIFHLHQRRGFKSNRKTDRADSESGKVYEAIQRTKEGLKTENARTVGELFGRRRLKAALHNQTAKKGERQAQPLARVRKSGEGAKWQYDYYPTRELILDEFYAIWDMQKTHHPKELTDAACTRLRDPIEWQHPLKSPPVGKCTLIPTEERAAKALPSSQRSRIFQEVNALRISYPGEAQKPLTKEQRDKVTDRLLHPTNKTGKLSFKRIRKLLELSDRAIFNTESAKRPDLQGDATAAQMKEDDRWGKSWFDLDLQKQDEIIDRLINEEKEDVLVAYLRDVHKLDADQAFRVADCPLVSGYGSLSRLALEKIQPHLEADVTVYSDAVTLAGFPSHSNFETGEVFDKALPYYGYILERHVAFGSGEPKDLDEKRYGKIANPTVHVALNQIRSVVNDLLKRFGPPEQIVIELARDLPLSAKGKGELESRQKKNQEANDKRREQLEKEFKQQDNYDNRMRLRLYEDLEALGKRCVFTGEQIGAHNLFTDKVEVEHILPFARTFDDSYSNKTLSMRQANRDKKNQTPYEAFGHSPDGYNWEEISKRAAELPDNKTWRFGPDAMERYEKEEGGFLARQLTDTQYISRLAKGYLSAIYPGGKASNVWVIPGRLTADLRWQWGLDSVLHGHNEEISEAQKKNRHDHRHHAIDAIVVACTDISMLQRAAKQAKQNEEKYDERLMAGVAEPWEGFREDVANSVRDIIVSHKPDHGIQDAMHNDTAYGIPKGDEGAPDKKGVRTVVTRKPLDSDSFKASKDLEKIRDEIIKKALLEATQGLSGKDFKAALLMEAKAMMPPIYKVRIEEKLSVIPFKDESGKEYKAYKGDGNYCYDIWLNEKGKWAGEVISTYEAYQLKKARKNVAWWRRPIGREGQTLVMRLRKNDYVQIDHEGDTKIVQVYKFSTGMILMSEHFEANASARIREKALKAIQMAPGSLQKANARRVTVSPSGVLKVY

SEQ ID NO: 2126 - protein, 1176 aa, unidentified
  REGION 1..1176: note = Description of Unknown: Cas Enzyme sequence
LKNLSINQKSNIILGLDIGKTSVGFALVDKEQNYKILNAGVRIFDAPETPKEQTSLQKVRGEFRRARNSNENEFYRTKQIVKCMLKYGILDIETIRNYDKSPKVKNIPKSKKKHLFYIKTAEYLFYKKSNHNNILNLRVKALYHKLSNLEFARLLYSMNKHRGVTYDDIRDVKEGSNSSLTPDQKELKSGFERYNKEYKENESKYLTVGEYLQINHSDKFRNTNPKKNGKKTKTKDYMFSIPRDDIKSELEIIFEKQRVLGNTIATKEFQDEYLENFLWEKESPKYDSLVAPCIYNSNEKSANKHHFSSALYIALEKLHNIRYKQKDDKKYQSFTQDQILEVLKNSFEKLKGISYKDMRDILSLKNIEFKGVVDESFIVINFETFIRIKKELNISINPLEDFTNSDGFINNNLIKIINILAYETKKSLKEEELKKLNYSDEVIEKLINNVKIRGHLSYSLGVVDKLCTYMLNGIIPHDAKQKIEDEYGVTYIEKELYLPPILDTDFPLKNNHTVMRALSQVRTVVNDILKYYRRETNNPLWTFDTVTVELAREMNSKKHISSINKEIAKHTKANQEAKEFCEKYNILNPTHTQILKVKLWNMQDGIDPYIWILNDENTNVDSYTLGKIKAENLFDEGYCEIEHTLPYGRSLDDSQSNKVLVLAKTNQNKGNKTPYEWLSKDEFEKFEKYLREKKNYLAYGDARVRKLLNKDFKGIDGFKQRDIVDTQIISKYAGLYIGNHLKFWDNPNFNDKRRVYANNGKITSILRRAWAIGKKNRDTHLHHAEDAILIACSTPTLIKNISTFIAIQTQLTSGKLTIKKFDYILRNHKSLKEYILNALEEEKIDITKIDTKNYNEQKEFVSILFKILANKNYPYDGFRDDFKDIIDKAPVTHFVKHKTNGSIHKDTISKITQKVQKGVEIRGGIAGNDEYVRCDVFKITNSKNKVHYEFVVLTAKYKGKMLDELPTPLLKENEKSEFIFSVFKNELLSYSLKDKTQIVANFVKIASSIIVREPKNIETAYFRKQIKSIFSSFNKTDDVEEIKTIMEDKDIQKALKIPLDNVAKLSSQVEKVKNLCQNVSSIIKSKYNLNTIFIMDKMNSIQTKELRDILIEENIVKDSINIDNSIIKTIFITLSESGYIASSRADGQKKLIDLKKLEINSMGEYKIVTIEERKTL

SEQ ID NO: 2127 - protein, 1395 aa, unidentified
  REGION 1..1395: note = Description of Unknown: Cas Enzyme sequence
MEKNYFVGLDMGTSSVGWAVTDENYNLIRKKGKDLWGIREFEPANTAQERRANRISRRRRQRELIRLGLVKDYFADAIATVDSSFYQRLENSKYYLEDKDEDVRTSNGIFNDKEYKDKDYYKEYPTIYHLRKELIENKNKPYDVRLVYLAISNLFKRRGHFLNNSLNVDNGKFDVNIKEAYEELLNSISRAFSDDESESLTMPVINEDCVYKELEKILGNRDYSRKYKAEKIRDLLNIDKKAKKQNEVINGIVGLKIDCCKAFGITDSEEKIEAKFSEFGYSEKEPGILELLGDVLGEVLVNIKRIYDAGTLTELLKGYNYLSFARCSDYEKHKEDLRLLKMLVKKYQPEQFDSMFRDTHDGSYSAYVNSSNSEKYNYSENGIKKPNRRNMDKRSKADFYSTVKKMLSPFANEDERVQTILDEMENGTFMPKQLNGDNGVIPNQLHAIELKVILQNASEYLPFLNEIDGSGLSVAERIYKLFTFTLPYYIGPTTEKSKTGWVVRNKGYENTHVLPWNMNDVIDQEKTHKEFIERMVRRCTYMNNEQVLPKNSLLYEKFCVLNEINNIRIDNVRIDNNLKKTIYNELYKKGKKPTLKKLHDCLILNGISESAQITGIDREINNSLASYGKFAPIMGELLDTDDGRKVVEDIIYTFTIFGDDRKYLKEYLLNTYPENEYPYMTLSNIKRILGFKFSDWGRFSKELLMLEGYNRETGEIYTLLDALWEENYNFMELINSPVFSFKESMDKLEKNTLSSLAELDVEVLDRYYFSAPVKRMILQTNGVLKEIVKVMGGAPRKIFIEMTRSDEQKGDAGRTSSRKKQLLDLYKNVKQEVADRKYWSDLIEHESETGRIKSKKMYLYIKQMGCDMYTGEPIDLDELFTNRYDIDHIYPRHYVTDNNIENNLVLTNKASNEHIKKDYYPIPEKIRNNPATIELWDRLHANGMINDIKYARLRCKEEFSDEQKANFIARQLVETSQGTKGISDLLRQMLPTSELVFVKANNVSRFRQNKGRRHKNGDDSPVEGFSKSRLINDFHHANDAYLNIVVGNVYHTKFTSNPLNYIKKDYRQNKENFEYNLGRMFETKVVRNGYVAWIPEGNKENLEPTINTVNKVMSRNTPLYTRKAFVKPGIVNKVTIYGKRKATPERYMPLKSGDPKIADVTKYGGMTSISICYYFLVEHEVKGKRIRTIEGLPGYMHTRVENNPDELEKYCRDVLKLVNFSIRYRKIRIQSLLKVNGYRANLSGKTGDALILRNAEPLYLPDRYQDYIAYLEKHSEEEYHDKLDKEVNIQIYDILMEKFKDGIYRNRAKTVGNIMSNGRGQFIELSVEKQYFVINEILKLTTIGTLTAALGDIGGRSNNGKFTVGKKISDLDSCQLINTSYTGIFNSAPIDLKTV

SEQ ID NO: 2128 - protein, 1165 aa, unidentified
  REGION 1..1165: note = Description of Unknown: Cas Enzyme sequence
MINQGAPDLHFAFDVGHSSIGWSVLSAPQGVGNNRLPQILGTGVVTFGADDCLAVKRRKNRQARRHARATRQRIGNIEKLLAHLGVLSADQLAQRHRQAGGDSFSWQRAAEILAATRTAGPMPAIGWAELWEILRWYAHNRGYFAPPWANRGEEVPESDDEVSDTEKVRLAHAKMVELGTRTMAETIAAYTGWYESEAARWQQRLRSEKPPHFKGLNAAFPREDVVWPEVRALLIALKGRLPMLDDMLIRTLLGNQVDPLRDRDAWRAIPCPSILLPKRYHGGLLFGQNIPRFDNRIIGVCPILFARLEALYRQEGLEPDEARHRAEKESKLPAKASSEFLRFRWAMQLANIFGSALGDRGTRPLSGEERRRLTEQAQQLGSFTKGEFKKAVRQMTGWMGGRDNLDNLLIHPDAEKALVLDPVQSEIRKSKLTDALSQMPARYAKRLRGKLRSGKVVALSEVRAWLEPVDGASFDAAVSRVIEAENTRKGRLQAATNLNEVLAERLSAEFPAGRAPYARTILRQAHDEVMSGRDPRAEKSDQQPRGCLCQTAELKEAQLNRSLEKQTNNHLIRHRLLILERLLRDLIEAPEFARGEPRRVASLTIEVNRDLKDQSGKTRKEQEQDLGLRLGDFKRVAGKVEERCRQRGVPVTAGLIRKARIAEDLGWKCPYTGKNFEFDDLLGGAMDKDHIIPHSERQSDSLDSLAITWSDVNKWKGKRTAMEFVRAEGGRQVPGRPELTLMPLAAFQKHVDGLDTRKGHPDDRARKKRRIRKLLTENYEEKEFTPRDLTVTSHLVRLGAQVLQRAFPLDSRPRVVSLPGSVTGEVRKAWRLIGCLGAANSAIFEADGKTPKRKEEIRGITHLHHALDACVLGLASLFFPRNGAVWGAMVKAGADREATDERRLWLAMTRRRPSAEEAALLRATGIYKADASGRMHLDELPDELRQQIRQRLAEKRVVQHVPADMSGVKVEENTRGIVGEKDGRVLLRQRSGRDAKTGLQTVKPTDEAPGKLLGLLPPGGDGKLKLQNGVRVITDNFGVAILDNAIEEDERFVVIPWHRVWHRLEELKVKNSGKPLQILRMGDLVHVPNRSGRSDYRGVWAIRGIKNNQKQGVLIDLSGPDVITYRVPGREDCKQNVRLASLVEGGLKLLKPCLIGLIAPEPTSS

SEQ ID NO: 2129 - protein, 1346 aa, unidentified
  REGION 1..1346: note = Description of Unknown: Cas Enzyme sequence
MVQKKFGDYYLGLDIGTDSVGWAVADKEYNILNFNGKAMWGVHLFDSGKTAEERRINRIARRRLERRKQRIEFLKEIFSDEINKVEPEFFERLAESRLIFEDRKHQSRNTLFNDAGFKDKDLFKKYPTIYHLRSGLMEQKEKTDIRLFYLACHHIIKYRGHFLFEGLSEGPIPKFEIVFEELITTLNLECGTNLNSKETDRSVQEVLLDKNLGISEKTKKLQSILVDEDFSGLIKELCKLLSGGTATLDNMFPGNDDDSGLGSLTFKNTDFDEILSKLELQIPEKLGILNRAKTIYDWALLSDYLKGQNSISKAKIETYNQHKSDLKLLKSILKSDSEKYSQVFKSEDIGSNYPSYSGMHRKNTEKTDVCSQSDFCKYLRISIFKKEFEDPVFCEKYADLVARIKDDTFMPKQTVKENSMFPNALHKYELEQILKNMELYYPFLNEKYEDGWTAKDKILKLCTFRIPYYVGPLNKNSDRSWLKREDGKITPWNFEKKVDLDKSAENFMANLIGNCTYLKKEPVVPKCSLMYQRYELYNELNTLKIDGERLFKIDIKLKEELVKDLFENQSKKVTEKTIETWLRKKCQYHKDNVVEISGIDSEIKSSLKSEKQLKEILGSPLNYEMSEDIVQIITVFGGDKSRMKSKLKKDYSGILKDEQIERLSKLTFKDWGRLSKRLLTEIYVIVDGEEMNLLTALEKTRYNLMELISIREFAKKIDEINGPVVANCRITYDLVEDLYVSPSVRRGIWRSLKIIEDILSITKHPPSKIFIETTRENQESKRTVSRKKDLIKKYEACKKESENINNQLNLLNETDEGRLRSKDLYAYYIQQGKCMYCGKKIDLNDLRNNNMYDLDHIHPRSLKADDSIHNNLVLVCKKHNQEKGKDYPLNSDWQKNMSSFWKSLKEKGFITKEKYERLIRNSSFEDDELSGFINRQLVETSQSVKAVAETLKRVFGEQADIVYVKANTVSDFRNGNNGFKSNETDESLKFVKCRSVNDYHHAKDAYLNIVVGNVYDTKFTKDYKNFIRTERNNYNLRRMFDSDVERNGVRAWTAGKNGTIETVQKYMRRNNILFTRFTSQKQGALFKVNPLKKGKGQLSLKKELPIEKYGGYDKVSGAYFLLVEHTKGKKTVRTIYPVLSYLIKNDTDNNELIRYMEEVDKLTNPKILIRKIPFSSTFEINGYRLHISGRTDDQCLYNSAEQLILSENDYVYCKKIENYVLKSKEMKESISAENYGITFEKNLSFYQTLSEKYGNSKYRVFFETVSKSLSEKSEIFETLSLNDQTKVLEQMLCGFRCNASVSNLEQIGLKIGRIRKSNNIGNFDSIKLIHQSPSGLFEYEIDFKNL

SEQ ID NO: 2130 - protein, 1364 aa, unidentified
  REGION 1..1364: note = Description of Unknown: Cas Enzyme sequence
MEKQEYYLGLDMGISSVGWAVTNDKYELLRKKGKDMWGIREFEEADSSAERRTYRVNRRRRQRQVARMGLLKEYFSDAIEKVDSNFFIRMENSKYFFEDKDGRLSSKNGIFDDADYKDVDYYKDYPTIFHLRKALLDIEDTGKEYDVRLVYLALVNMFKHRGHFLLNTEGDALSSEQVNTTYQELLEVLENNYEISLESRDIKDIIDIISNQDNGRKKKHEQILELFGVKKSDKRAKELLKCLCGLSVNAKLIFDENYEEKVDLCFHDFSYTDKIPDLMEKLSEEEYSVVEQLKSIYDYSVLVGTLKGYDYLSCARVELYEKHFEDLKLLKALYRRYKTKEEYNDMFKSDKEGTYSVYVNSFNSSDSSVKIKKYRRNMKGRTIDNLYGTIKKAFKDNTDDKDVQSMMESIDKEQFLPKQLTGANGVIPNQVHKKEMERILKKAQNYLPFLKEKDESELTVSERILRLFTFQIPYYVGPLGENSKTGWVVRREGGRVLPWNIDEKIDMSATSEAFIGNLIRKCTYLSDEKVMPKASLSYERYCVLNEINNICIDGERLDTELKQKIYTECFMKGKRVTRKQICNYLVAQGCIKSDEQVTGIDINVNSSLSSYGKMFAIFGEHLKEDAIRKVAEEIIYWGTIFSDSKKMFRKHLTKYVEQGILGESQVKRILGYKFKDWGRFSKALLTLQGIDKSTGELLSLENAMWEYSLNFMELINSDDFTFKDELANRRTSAIKSLSEFTYEDLEDTYFSVPVKRMIWQTILVVREIEQIMGYAPKKIFVEMARSEEEKGDKGRKDSRGDKLLELYKNIKNTENHDWEKEISEANESGKLRSKKLYLYYTQMGRDMYTGEEINIDMLYDDSMYDIDHIYPRHYVKDDSIVNNLVLVNRRANQDIKKDLYPIPDKIISNLKVQGLWKMLHKQNLITDEKYKRLMSRSPFTEKQLGYFIARQLVETRQGTKGIAELLGQLFKDTEIVYAKATNVSDFRRDNGFVKSRLVNDFHHAQDAYLNIVVGNVYYTKFTKNPWNFIKKDFDKDRNKNGYNLAKMFDRDVVRGDDIAWIASKKDNQGTIETVRKMMRKNTPLMTRMSFEQHGGIAKGIMYSAKVVKEKNYIPVKSSDKKLSDVTKYGGFTAVTVAYYFIVSHKEGKKENTTIEALPLYCKNKVENEENGLLKYCEEVLGYGDVKILFNKLKIQSLLEINGYQVHLSGKTEGRLILRNAMNLCLPEKWISYIKKLEKLVAGNVKEQAITSEANIELYDLLTDKHLNSVYAKRPNAYGQKLVDDRSNFVNLKPESQCEAILQILQLTKIGNNETNLKLIGESEHSGKMRISKNLKDTDKPAIICQSVTGLYERKIYIFGEQLDK

SEQ ID NO: 2131 - protein, 1096 aa, unidentified
  REGION 1..1096: note = Description of Unknown: Cas Enzyme sequence
LPTLKNNKINRKKMALPKWAEAKSLQNNLYSELLSPQIYDKLLNVMKKILGIDLGTNSLGWALIEENTKLIDGGVIIFPRGNQQDPKSGKETSFAQNRTIFRGARRLLFRRKLRRQRLLELAKKYFNLSPEDIYTDTDPNTIYRLRSEGLERLLTEKELFRICLYFAKKRGFLSNRKDEARSSEADKGKVNQSIAELNSSIIENGCTTLGQYYYKLISDHRNGLRLDERILERYTSRKMYLDELDFIINFQINNKSTFLTPEIAAELKKQVFYQRPLKSAKHLIGKCRLESTKRCMPKSHPIYQEFRAWTIINNLRWTNHDTGESEGLTLDQKNKAFTYFNTELKLTETKLKKILGISNRAKFNDVELKPCRTIIEMQTIFSESKIEISENQFKSIYHSLLFTQDSQFENFKNYLLSKYKISNEIADKLWKVHLEPDYGNISHKAALKLLHYMRQGMRYDEACLEAGYHHSFENKFKNYDKVRELKTNELRNPVVQKAIATCINLVNKIIDNYGKPDEVRIELARELKKPKSVRENIRFKNLNKQKQRDKYREILEKHFNRTIANSESLLTKYELWLELGCEELGLGGFDEFVKNSRKVDLEKYNLWLEADRISPYTGKVISLSRLMSPEIQIEHILPYSRTLDNSFMNKTLCESHFNANLKGKYTPMEYFSKRPQEEQNDFLKRIYLFSNPAKRDVFLADSLPDSFTNNQLTDTAYIAKLAIQRISQCIEKVYPTKGGATSIIRRELGLNSILHYGDDINVANDIKNRGDHRHHFIDAVVIAATTTAQLQQLSRANTINGKIDVDITAPWNSFRSDIEEKANSLLVVHKVNHKLTRKSINTYKHGSKATKNQELTAIRGSLHEDSLYGKIINSKTGEENYVIRKDLKSLDEKQLEKIIDEGIKRFLKAEIEKLGSWANVIKSPIIYNGKPIRKVRWQNTAKSLNLLREETKTYTEPGNNYVLAIYEDVNGKRDYESVSFYDAINKVISGKLVYPKSKQNKNLKYTVKILDKFIIYSESPEEINWTDFTSLNSRLYHLKKFTGSTVYISKSTIANEDSKVYKMPASKQSSVNTFSAIKIKLNLLGQIIWRSDIGKV

SEQ ID NO: 2132 - protein, 1332 aa, unidentified
  REGION 1..1332: note = Description of Unknown: Cas Enzyme sequence
MQKNYTIGLDIGTNSVGWAVMKDDYTLIRKRMKVLGNTDIKKIKKNFWGVRLFDEGETAKETRLKRGTRRRYQRRRNRLIYLQDIFQQPMLAIDENFFHRLDDSFFVPDDKSYDRHPIFGSLEEEVTYHNTYPTIYHLRKHLADNPEKADLRLVYTALAHIVKYRGHFLIEGELNTENTSISETFEQFLDTYNDIFKEQLVGDISKVEEILSSKQSRSRKHEQIMALFPNENKLGNFGRFMILIVGNISNFKPVFDLDDEYKLKLSDETYEEDLDTLLGMTDDVFLDVFMAAKNVYDAVEMSAIISTDTGNSKAVLSNQMINFYDEHKVDLAQLKQFFKTHLPDKYYECFSDSSKNGYAGYIDGKTNQEDFYKYIEKVMKTVKSEEKDYFLDKIDREVFLRKQRSFYNSVIPHQIHLQEMQAILDRQSQYYSFLAENRDKIESLVTFRIPYYVGPLTASDQSEFAWMERQSDDPIRPWNFDEIVNKEHSAEKFIERMTNMDTYLLEEKVLPKRSLLYQTFEVYNELTKVRYTNEQGKTEKLNRQQKAEIIETLFKQKNRVREKDIANYLEQYGYVDGTEIKGLEDKFNASLSTYNDLVKIDGAKAYLDDPEYTDMWEDIIKILTVFEDKAMRKKQLQTYSDTLSPEILKKLERKHYTGWGRFSKKLINGLRDEGSNKTILDYLKSDEGSSGPTNRNFMQLIRDNTLSFKKKIEDAQTIEDTTHIYDTVADLPGSPAIKKGIRQALKIVEEIIDIIGYEPENIVVEMARESQTTKKGKDLSKERLEKLTEAIKEFDGPTDIKVKDLKNENLRNDRLYLYYLQNGRDMYTNEPLDINNLSKYDIDHIIPQSFTTDNSIDNKVLVSRTKNQGNKSDDVPSINIVHKMKPFWRQLHKAGLISDRKLKNLTKAEHGGLTEADKAHFLNRQLVETRQITKHVANLLDSQYNTAEEQRINIVLLKSSMTSRFRKEFKLYKVREINDYHHAHDAYLNAVVATTIMKVYPNLKPQFVYGQYKKTSMFKEEKATARKHFYSNITKFFKKEKVVNEETGEILWDTERHLSTIKRVLSWKQMNIVKKVEKQKGQLWKETIYPKGDSSKLIPVKEGMDPQKYGGLSQVSEAFAVVITHEKGKKKQLKSDLISIPIVDQKAYEQHPTAYLEEAGYNNPTVLHELFKYQLFELEDGSRRMIASAKEFQKGNQMVLPLELVELLYHANRYDKVKFPDSIEYVHDNLAKFDDLLEYVIDFSNKYINADKNVQKIQKIYKEHGTEDVELTVESFVNLMTFTAMGAPATFKFYGESITRSRYTSITEFRGSTLIFQSITGLYETRYKLEDN

SEQ ID NO: 2133 - protein, 1525 aa, unidentified
  REGION 1..1525: note = Description of Unknown: Cas Enzyme sequence
MKKILGLDLGTNSIGWALIDTQNRQILGMGSRIIPMGTDKQDYEKGIGISKNADRRTKRTIRKMNKRYKLRRNKLLYILYELGMLPEQFQFRYKVRDEKGRLTNDYKDGLPPENNLQDLELLPIKKGTLQLNSLQHYQLRVNALEKPITLEEFGKILYSFNQLRGYSGGNNDEETTKNKKEEDNDDENDVVKKYEVITQKVLIQKVELSDSKFQGRGKNKGQEFSKFDVTVLIDDEELEGETELQNLEEKINQEEELEIRIRRNKKGETTSVVFALPQKTNWRKQMEADEKLLKESTGGIKEKGLFISELRLRDLQQNKWKRIRNRVFLRNQYKDEFDAVWDLQGKTHSILDNCPKDKLEKISNYLFPGRSETQEKLRQEAISGGLKYIIKEQVIYYQRPLKPQTELISKCQFEKEETVLANSHPLFQEFRCWKQINNLFITSKQEVYNERKKKNVFQLTDRYLRSDEKQEIYNRLQTQKQLGFGEVAKIVKLKNDKTEYLNGLNVKAKLIGCDTQIVIKKILDEHFETLHSVDKEIVEKIWKTIFDNANNGSEYDQNSLKVSSIKEVLKPLNNEDIATELSLKFAQTIKFPRKYTGFSKKALLNILPLMQLNPTNVSEQIKIKFENIKNNIERLNKNESVDTETGEIINDLEDYVIDFVRANPNALENGGIMEAFAVSLVYGKHTAKKISAQFKDYHEIQRVDRNLRNPIVEQLANETMQVVKAVWKQYKFNPEELEIRVELARNLKNSAKERDKIYKGQEKNKKINERIKQRLMELKQEVIPKNIEIYKLWSNQNNEAYPAPKKASEPTKDEIEKLRLWEEQGCISPYTLKPIPLSKLFSPERLYDIDHILPKSRFFDDSASNKVVCETNINEEKSNRTAWEYISQQNSTYGICSTGDYISYINRIFYGKKKKNLLLEKIPNNPVDRQLKDTQYISVAVKNELAKIVGSDNVKTSTGEVTDFLRSRWGLKKLFMELTESRFRQMELWDWNKETNQSNSQWVIKYFDKEKQKHIYEIKNWSKRYDHRHHAIDALVVALTDQSHIQRLNNLNKYLQDELLKRKDEFKLEVKEDETILEAFFNMEENRRKEIQQQIESSRHFEKPFEDLIKQAKILLEAMVVSIKPKDKLGIKKDNRGNAQLKIKGALHQETNYGKTKDPKTGLLRDTKTVDISSLKAKDIPQIIDQDVLAKEIDDHQKKYDSVKEAFTGEGLKTFNENRFQTKKPTELKPPVYKVKVWYSNKQTEASTLQRLYDDNDKLSVVTGDNYLFMIIEKEDKNGNERMFDLVSLYDSADIAKRALRNKNNNYKLSIVSETLETIQEQIKQKIEDTRKELSDKLSKEKSKKKKEDLQNRIDQLDVNFKLKTLFTLQQNELVYLPENADDPILNFSNDEFKEWLNNVENKSKFSKRVYKAVKFDKGKTTIAHFVPHNFANIISVPKDLTDEQKEALKKLYKDKKIPKREWNFIEYGSYRDCSPYESGEVFIKSLNEEAKGKKKKFNPLKIQDTCIKLEIDWIGNISFLKKPL

SEQ ID NO: 2134 - protein, 1311 aa, unidentified
  REGION 1..1311: note = Description of Unknown: Cas Enzyme sequence
LEEIFVKNSFLGITVSSDQIGWAITNPKYELECASRKDLWGVRLFDKAETAENRRLFRSSRRMKERKKKRLQYTQDIFQKEIEQTDPNFFQQLKENRFHKDDRTIEFNFDIDAYRKQFPTVYHLRKYLMETKEKPDIRLVYLAFSKFMKNRGHFLYKGSLGEIMKFETSMNGFCELMQKSKINFPTLSETQICEIRDILSDHRMTKSVKKKKIISLTGAESNAEKSWIGLFCGCSVSVNTLYLDLDEEIISDQEKICFEDATYDDYADNIEKSVGSYYDLIISAKIIYDWSILHEILGDHQLLSDAKIAEYDKHHKDLKRLQRIIKKTGDQNLYQDIFVREIVGNYTSYVGRGKSIKNADQKQFYTFLKSRLKNVENIADEDREWIETEMKEGTLIPKLSKRDNSVIPHQLQLKEFVMILDNLQEMYPFLKENREKLLAIFNFVIPYYVGPFKGVERDEQKTNWMVPKKEGRIYPWNFDEMVNKEASAECFISRMTGNCSYLFNEKVLPKNSLLYESFEVLNELNPLKINGEPISVKLKQRIYEQLFLTGKKVTKKSLTKYLIKNGYGEDIELSGIDNEFHSNLKSHIDFEDYEQLSDEEVEQIILRITVFEDKQLLKDYLDREFSKLSEDERKQIASLSYKGWGNLSEMLLTGITVTDPDGVEVSVMNMLWNTNLNLMQILSKQYGYKTEIDLYNAEHEKDIYNRKDLMKHLNIPVVQRRKINQLITVAKAVKHTYGVPEKVFFKVSREHQNDPKRTVSRKEQLKSLYKGCKDNDAKQLMKELEGLEGHELSNDKVYLYFLQKGRCIYTGKRLNLLQIRKSNYQNDIDYIYPLAAVIDRSLNNKVLTGVSENRADKYTYFPIDPKIQTNMKSFWMELVMQGFMTKEKYYRLTRENDFSKNELTSFIEREIANDQQSGRMIAAILQYYFPKSEIVFVKETQILNFKKDFRLLSSYGYNHFQSAKDAYLAIVTGNAYHVKFTMNPARFFKDHKRSDYDLGQLFLQNIERNGQVAWISGPYGSIQTVREMYGKNSVRVTKRVVEIKGQLHEQQPVRKGHGQFPLKTSEKKLHDISKYGGYSSVTGSYFTLVEYEEKGKKKRSIEYIPLYMHDRLEKDPGHKLLKEFLSNDRKIQDPKILIAKIRKHTLLKVDGFSYRLSGRAGNNLILINAVELIMDDWSAKTANKVTRFIKRRAMDRNARVYQYEFHIQELEHLYDFYLDKLENGIYKYRKNNQAELIRNGKDKFMELKTEEQCMLLSEIQKLFICASLSADLTLIGGKKNSGGIKISSNVTNRQIEIISEDPLGLSLGVLC

SEQ ID NO: 2135 - protein, 1362 aa, unidentified
  REGION 1..1362: note = Description of Unknown: Cas Enzyme sequence
MAKILGLDLGTNSIGWALVDTQNDNNQIIDKGVRIFSEGVKIEKGVESSKAAERTGFRSARKLKFRRKLRKINTLKVLIKNNMCPLEMGQIQLWKDKKVYPLVPEFMDWQRTHEDKNPYFFRAKAVEKKLSSFDLGRVFYHLSQRRGFLSNRLEAPTNDDLIETTKQQIEERLQTASNHTELYDELTQYFKDLDISDEKVKKLKNAIEKILKSKNIEFEDERKFIENILNKKENLGPVKKAIQELTEKIEISGCKTMGQYFYTLYQKGERIRNQYTHREEHYKHEFDEICRIQELSEKLKSDLYKAIFYQRPLRSQKGLVGKCTFEPSKARCPISHPEFEKFRMLCFINNIKVRDNEKSDLRPLNKIEREKIKSKFYRRSKPSFEFADIIKELKIKETDSKIKLINFPAHTSVSGNPVSSYFKDLFGNDWEKVNIKYEYINPEGKVKECNANINDIWHVLFTYESNEKLKEFAEQKLKLTPTQTALFLRTPIKQGYANLSLKAIKKINIFLEEGYIYTFAAFVAKIPDIVGEEIWLKNQKQIKETLYTIIEGHNDYKLRKQIVNDLIGWHKNEFANAHSKYELDETDKKAIIDKIISFYGGKTWTGKTKQEQDSIEKEITTEFINCLHNSHGLSYAFAKIDRVDEKIKTYLKVSFNLTDKEISKIYHPSDVEMYKASKENPKDGKRYLGSPLVASVKNPVAMKTLHQLRYLINALIKDNIIDAETQINIELARDLNDANVRKAIETYQRQNEQKRMEYVNKTKEHFGKDYQPSADEILKYQLWEEQNHICLYTGGSIGIAEFIGADPKYDIEHTVPRSLSYDNSQMNLTLCENKFNRDIKKNKIPTELSNHKEILPRIESWQKKIGELHYKIENTKKASRAASTKEAKDRAIQQRHVLRFEYDYWKGKYDRFTMTEVKEGFKNSQLNDTRIMTKFARAYLKTIFDKVYPVKGTATAAFRKLWGIQEYNEKKERVNHIHHAIDAITIACMTKSKYDLLAKFYQADEHNNKREVHELLARLKPWETFVQDVQSIETDTFIYHHTDDNVTKQSKKKLRKRGKIQYTVNEQNEKQPVYLQGDTVRGSLHKDSVYGAIKQNDVIRYVIRKNVEDLKPSDIENIVDNVVKEKIKEFVKNDGIGILKKEIWMNKEKGVRIKKVRCFTPSVTNPIKLKTHRDVSKQDYKQSINVTNDSNYLMGIYNGINKKGKVIRDFEIVNYLEAGTLSKFSKIEKNKPVHILSDYIIKDNTELKLYQILKPGLKVILYENDIDEIWDLDNIQLNKRLYIITGLSSFQIKNKYDFGAIVLKHHGEARPSTHPELKVQSGDFEPNEKYMPVRTFLHSRFNAAIESKDFTISPTGKIKRME

SEQ ID NO: 2136 - protein, 1456 aa, unidentified
  REGION 1..1456: note = Description of Unknown: Cas Enzyme sequence
MHKLSGTSSYTVGLNIGETSVGFAAVDDGGGEVLFHKGKPVMGVHLYNSAKHADGARGHRTARRTLRRKQARVREIERIFEPAVAEVDPGFFMRRHMSALVPADAIEAGADLGSPADRDFKALLGAFPTPAHLRVFLMETNQPADVRLIEHVFAHAVSKRGNFYLEGNDGVSAEHSQLVPALVDLGVALDEYLWGEQEAHFEVDVDAAAGACGDKTLTTAALCDALDAAFTVVPADPDLCDAKAMARLTRAAAALCVGYKANIQAICPDVPNEHKSCSVANSDELDAVAGEAPDELVPILEAAANIYMALKLQDLLSFQPGKTISYNLVGLYDKYRSDLRLLKDTSLELVVGRDARGELKVDGQGYRDHNAFFCGPRKEGEHAYDKYAVIADMKRGVNRGFTAYNLKVRPKDVKGGAMGDDYDLFAQNTVKYLVDHGLARAEVGKDGKSKTFVSDIADVSEILDGLRAKRFCRRVCTPDSRAIPFQLNAEELERIIDNQGRFHPFLLENRGHIMDVFRCRVPYYIGPLSTDGAPVGSRGRNRFAWSERKAGHEDARVSPWNIDEHIDRKASAESFIRRMTGECSYLIGEDTLPKCSLLYQEYCFRDELAGLKVTFDGDDERPLSRAERNAVMEVARHRNTVSYAAIEALLSDEAGGMKARLVGRRTNNGKDEASMASKLSSYNFFAHVVLGKDALTGVEASMCEEIILWNTLFEDRKMLRETIEEAFGEVLTPEQVDKICRKRLSGWGAFSERLLDELTVKVDGRDTTIMDILRDGYPFGKRRGRAVNFMQIVTDSRLGFSKAIEEENQAYADSFEDFEVTDLPGSPALQRAVSKAIAVVDDIAEVAGKNPSTIFYTNTRNSRKAKGKKTVSRQKRLAATLKDARKEYGYALDVDALLAELSSFADGDAFPLRAELYFRQGGRDLYTGERLSLAAALAGDYELDHIIAPSYRKDDSSSNLALVQRSSANLKGPDRLLTSDVRVKMSTFWRTLVLSGLMSKKKQVKLTCSEVKVQNLSDYLNRQLVEAGQYAQLFKLVASRRYPGCKIHAMKPGASGGLRAALSLPKVPAANGLHSAHDALFAASMGRYIKACFPEFFSNRFLHEKLRSYLDDALESRKMSEFDFFLRGFFLTHADRDTGEVIWDAEQEVAQLEREVCWKNLSQVRDSYSGDQVNSNGFWKMTAYSPRNPAIANLQIPRKENLPCDVYGGYTSTKFAYFFIYEYEDKRGKRSVAIAGVPNKLAADAERDPRLLDAEGMRLSSEAGKKFVKVLFRRVLKKQVFEAYGEEFFVSGLAECAPAGQLVFRREDQDRLYTAMRYGTLDPSRLDVEEVLADLDWLFGETMSILARLRPHSYSRLGVERLLTPSEAWHRALEDKPSADRGKLLTKLCREVSGIVSYFAHNTGAKAMELTLLGGSGIAKVNPGAIAKLIMTPEAGFAFVNRSAAGLRETRVKAAL

SEQ ID NO: 2137 - protein, 1458 aa, unidentified
  REGION 1..1458: note = Description of Unknown: Cas Enzyme sequence
MRKLSGASSYTVGLNIGETGVGFSAVDDEGGEVLFHRGKPVMGVHLYNSAKHADGARAHRTARRTLRRKQARVREIERIFEPAVAEVDPGFFVRRHMSALVPADAVAAGADLGSPADRDFKALLGAFPTPAHLRVYLMESNHPADIRLIEHVFAHAVSKRGNFYLEGNDGVSAEHSQLVPALVELGVALDDFLWGEQEAHFEVDVDSAAAACGNKALTTAALCDALDSAFTAVPADPDLCDEKAMARLTRAAAALCVGYKANIQAICPDVPNEHKSCSVASSEDLDAIAAEVPDELVPILEAAANIYMALKLQDLLSFQPGKTISYNLVGLYDKYRSDLRLLKDTSLELVVGRDERGELKVDGQGYRDHNAFFCGPRKAGEHAYDKYAVIADMKRGVNRGFTAYNLKVRPKDVKGGAMGDDYDLFAQNTVKYLVDHGLARIEAGKDGKSKTYVSDIADVSEILDGLRAKRFCRRVCTPDSRAIPFQLNAEELERIIDNQGRFHPVLLENRDHLMDVFRCRVPYYIGPLSTDGAPVGSRGRNRFAWSERKAGHEDARVSPWNIDEHIDRKASAESFIRRMTGECSYLIGEDTLPKCSLLYQEYCFRDELAGLKVTFDGDDERPLSRSERNGVMEIARHRNTVSYSAIESLLSDEAGGMKARLIGRRTNNGKDEASMASKLSSYNFFAHVVLDKDALTGVEASMCEEIILWNTLFEDRKMLRETIEEAFGEVLTPEQVDKICRKRLSGWGAFSERLLDEVSVKVDGRDVTIMDILRDGYPFGKRRGRAVNFMQIVTDSRLGFSKAIEEENQAYADSFEDFEVTDLPGSPALQRAVSKAIAVVDDIAEVAGKNPSTIFYTNTRNSKKAKGKKTVSRQKRLATTLRDAKKEYGYALDVDALLAELSSFADDDAFPLRAELYFRQGGRDLYTGERLSLAAALAGDYDLDHIIAPSYRKDDSSSNLALVQRSSANLKGPDRLLTADVRVKMSGFWRTLVLSGLMSKKKQVKLTCSEVKVQNLSDYLNRQLVEAGQYAQLFKLVASRRYPGCEIHAMKRGVSGGLRAALALPKVPAANGLHSAHDSLFAAALGRYIKACFPEFFSNRFLYEKLRSYLDDALGSRKMGEFDFFLRGFFLTHADEDTGEVIWDAEQEVSQLEREVCWKNLSQVRDSYSGDQVNSNGFWKMTAYSPRNPAIANLQIPRKENLPCDVYGGYTSTKFAYFFIYEYEDKRGKRSVAIAGVPNKLATDVERDPRLLDAEGMRLSSEAGKKFVKVLFRRVLKKQVFEAYGEEFFVTGLAECAPAGQLVFNREDQDRLYTAMRYGTLDPSHLDVEEVLADLDWLFDETMSILARRRPHSYSRLGAERLLSPSEAWRRVIEDKPSADRGKLLTKLCREVSGIVSYFAHNIGAKAMELTLLGGPSVAKVNPGAIAKLIMTPEAGFAFVNRSAAGLRETRVEANLED

SEQ ID NO: 2138 - protein, 1424 aa, unidentified
  REGION 1..1424: note = Description of Unknown: Cas Enzyme sequence
MYNKVLCGLDIGTNSVGWCLTDENNKIIRKKDKALWGVRLFDEASDCAERRQYRSTRRRLNRRRERIDLLRELMAEEIHRVDPTFFMRLDNSFFQKDDREEDFDYTLFNDRKYTDSDYYREYPTIYHLRKHLLESRSKEDIRMIYLALHHMMKYRGNFLSNAKEFEPMNPNDADEYFEELKQSLANTRDGVTIEYDASKDFSRLKEVFTSEQGITVLKEKLGKILNPNKDAYIKKIVIPLIAGGTIGIKDLKFDQTEDLDFKNLCVKDEKFDQYIATLLSTNEEREEEINALASCKKIYEFFLLGKLLGDQRYLSDAMVNRYQMHQEQLRELKAYVKKNHKDKYARIFRKPMRNKSKANGAGKENKKEEELSNYAMYIGSNLTGNHKNRTAHCTAEAFYAFLKKELGLTKVKMPQKTKEIYESQILDLMSNGEFLPRLNSTDNGVFPYQLNLMEMKEILNRQSEFYPFLLTKDEDGITVKDRILSVLEYKIPYFVGPLIPQKEGNERSKYAWIKRTDEKIRPWNFKKVVDLDETAKNFIYKMLNKCTYLPSCYCLPKDSLLFSYFNVLQILNKTSINGESMTKDCKEYVIENLFRKRRKVTKKQLVEFIRAESGDNQTQITTSTGKEMEEINASLASYYDFKDIFGEEYVRSHIEEIEDMIRDIVIFEDKSILEKRLKQVYRIQDKTAIRKIKGLNYSKFSNLSKELLTDLKFYDESSERNCSVLQLLEETNQNLQEILYDETYGFQKKIEEYNKNHSGTGEFETIEEYVKELGAVSPGMKRPLIQAYKICDELEKIIGQPIDEYYVECTRTNRAEKKRTSSRYKKMQELYEEALKTAGDDYEFKSAYEKFKSADPNQFQSDKYYLYFSQMGKCMYSGEAIDIGELYDTNKYDIDHILPQSMIKDDSLSNRVLVKQSLNRTDKRDQYPIPQSMLFNGNYKEAYRFYQSLKEKKLISEEKYHRLIRKEALSEKELASFVNRQLVSTNQAVKGFINAIRYFKTTESFTPKIIFSKSENVSDFRKKHDLVKCRSANNFHHAHDAYLNIVVGRTIDNYFAPYDPHISHDHRNSVLQEMHANGLTTNPSKIFEQNKEGTKKNITDRDGYVVWDYNQSIQKVKKTIKNRYDILTTRRAYFGNSFFGKMTIMPKGEGNISVKKGWDKQKYGGFKEYSFGSYSLIKVKDQFILEAIPTMLRKRKEEYLRERFGEYEIRLDNLKINTVFEVDKKKFVITGKTGDRYLLMNQKERIFSSEQMETLRKIDKLFDKLNQKIGPNEEEEEERKKLRECGIKVNDADMVIAPAKNDQVKEMRITQEEAVRIYETFIQLFSKEIYSFSVINKLGSKLEGKKKEFQSLSLFKKVYLIQKINNLLRCNERKTADLRAIGFKEQEGTLTMNQKLSTCRIIFESITGFYRKVVFECKDGVECG

SEQ ID NO: 2139 - protein, 1037 aa, unidentified
  REGION 1..1037: note = Description of Unknown: Cas Enzyme sequence
MEGKMKKIETVFSFDIGWAFHGWAVKHDNHIDAGVYGFEHENNKKEYAELRKKNNRKKSEKARRETVKDLIIDTGLFLSKKELEAYLDKSSHNNQMWETLRDAHKKEISPKEFAQILYRFAKRRHYVDMRKKVEFKKNNNNKDKEEGEIKKALSKIEEIYQSVPENDCHDEIKTWFIALFKRREEIINNLKSILPDLDEKKFPYTNKKLKRIFSKEDYKKIEKKLTGYELLLKNEYIVDSLEKIASFQRKLGNKSSIFSEVFIKEYRKIVTFKGHHPSLADKIGLCLSGMGKKRHPQSSIDAEKSRIKERYFDLFFEKTEDSLKEIRLFELGISFDTFYNLVIDLSKNNKSGEITVKKLISSIKKQDKTLKEKHLQYKNFAHKSKDAHDNSIVLRLPGHRRLFDMSDSFRKIFMQNKALRDEMEFEMLCYRDPDTLKEKLKKILERHGITEYTQDDIEMLALSSPGKPAPCNNETYRAIQEGLEQGKSFQEALVNKYPDALVNIKRHFRNFLSYKLYKKQQKLRGVNNPFQDKVVEEFIFLFNRLVQTYGKADRIVLETTRAILSEKEKQETLNLIKNNEKLNRKIEEVLSEYVEKYRVKPGKKARERLKLFVQQGGELKFGGEQAKCILTGNPISLEAAIEGDRTNTDHIIPQTWIHDNRLENKILMDKAVNQSDKEDKTPIRYLVSQNYTLEDAEERLKENIKGMKLSKTKKSHIFEKREKETIKKDAENRIHSMDQRMKGVQDASIKIIMDLLVDQYNFNTDEKLTLAQYRERVLPVTGKMTSIFRRGWLTWYRKRREYYDNHAVDALVMLNFDRSFLNRYVDFLKQAYLEDKDPIWITKEKLFPVIENFSDKVKDFVDEYKEQSRIVYRRPIKKYRGRRYQESPRNPKEKHAVLAKKHYFVPASGFEKLIFYKTKKTNRGKEIDSISAIKIHPALRQQKIEIDKEKIIAEAYRYSLLYVKTSKLCGYFYLIGYSVKEKQETIELTPVNRSLKEKERITPDITAKNFIFEVFVRDGSINGKQTKPYCHEESKKK

SEQ ID NO: 2140 - protein, 1033 aa, unidentified
  REGION 1..1033: note = Description of Unknown: Cas Enzyme sequence
MKKDETVFSFDIGWAFHGWAVKSNNQIDTGVYGFEHENYEKEYTELRRKENRKKSEKARRETIKDLIVETSLFSSKKELEKYLRKSSHENKMWEKLRQSHKEKIDPKEFVQILYRFAKRRHYVDMRKKVEFKKSKNSKDKEEGEIKKALSKIEEIYQSMPNRNDDYKIKTWFIALFKRREEVVISLKSILPELDERKFPYTNKKLKKIFSKEDYKKIEKKLTGYELLLKNLYIVDSLEKIASFQREIGNESPVFSKEFMKKYRTIVTFKGHHPSLADKIGLCLSGTGKKRHPQSSIDAEITRIKERYFDLFLVKDESSSKEVRLSELGIDFDAYYNLVVNLSKDNKSGEITVKKLITGIKKQDKSLKDKHFVHKNFAHKSEDAYDKSIALRLPGHRRLFDMSESFRNIFMQDEALRDEIEFEMLCYRDPDILKERLQKILDKHGIVEHAQNDIEMLALSSPGKPAPCNNETYRAIQEGLEQGKSFQEALVATYPEALVNVKRHFRKSLNYKFYEKQQKLRGINNSFQDKVVEEFIFLFNRLIQKYGKADRIVLETTRAILSEKEKDEVLNRIKDNEKLNRQIEEVLSEYVERYQVKPAKKARERLKLFVQQGGELKFGGKEAKCILTGNPISLEAAIEGERTNTDHIIPQTWIHDNRLENKILTDRVVNQSDKEDLTPIQYLVSKNYTLEAAEEKLKANIKGMKLSKTKKRHILEKREKELIKKDAENRIHSMDQRMKGVQDASIKVIMDLLVDQYDFNVDEKLSLAQYREKILPVTGKMTSIFRRGWLPWYKKRREYYDNHAVDALVMLNFDRSFLTHYVTFLKQAYLEDKDLIWIAKEKLFPTIEKFSDKVKSFVDEYEHQSRIVYRRAIQKYRGKIYQELPRNPKEKHAVLAKKHYFVPASGFEKLIFYKTKKINRGKEIDSISAIKFHPALRKQKVKIDKENIIAEAYRYSLLYVKTSKICGYFYLIGYSAKEKQETIELTPVNRSLKEKERITPDITAKNFELEVFVKDGHINGKRTNPHCHEKAKKK

SEQ ID NO: 2141 - protein, 1427 aa, unidentified
  REGION 1..1427: note = Description of Unknown: Cas Enzyme sequence
MKHILGLDLGTNSIGWALIQQNFENKQGEILGMGSRIIPMDQKILGDFGAGNSISQTAERTGYRGVRRLRERHLLRRERLHRILHILGYLPEHYDAQIDFIKRFGKFIPEAEPKLAYSKDGFLFQNSFYEMLEEFKNFQPDFLKDKNGNDCLIPYDWTIYYLRKKALTQKIEKEELAWIILNFNQKRGYYQLRGEDLDEEKDKFFVRLKVSDVVNSGEKVRGNDLFDVYFENGWKYDRQVVKTEDWIDKTKEFIVTESILKNGETKRTFKAVDSEKDWIAIKTKTEQEIDTSHKTVGTYIFDSLLLNPKQKIKGKLVRTIERKFYKDELKQILTKQKEFHSELQDEDLFMDCVRELYRNNEQHQQMLSAKDFVHLILEDILFYQRPLRSQKSSISNCSLENRKSKDGVIFPIKVISKSNPYYQEFRLLQWLQNLVIYRKEDDSNVTKELLPNQNDWEELLEFLNTKKEIDQKQLVEFLLKRKLEIKKVPKTETERYRWNYVEDKTYPCNETRYLIQSRLNKTENVPADFLNFENEMALWHIIYSVNDKTEYEKALKKFAKKHNLSVDSFFENFRKFPPFKSDYGSFSEKAIKKLLPLMRFGKSWNWENIQQGSKDRIEKIITGEYDENIKNKVREFAEKHRLVTENDFQGLPLWLAQYIVYGRHSEATISGKWNSVKDLEEYLNEFKQHSLRNPIVEQVITETLRVVKDIWTKYGNGAKDYFSEIHIELGREMKQTKDERDRTTRKITENENTNLRIKALLAELALDRDVENVRPYSPMQQEILKIYEDGALSSEAEIEEDILKISKTAQPSKSELIRYKLWLEQRYRSPYTGQIIPLNKLFTHEYEIEHIIPQSRYFDDGFNNKVICEAEVNKLKDKQLGFQFIKNHRGYKVSDRISILEVADYEEFVKQNYAKNRTKRNNLLLEDIPEKMIERQLNDTRYISKYVSNLLSNIVRDDKDGSNDNGFNSKNLLPGNGKITTRLKQDWGLEAVWNDLILPRFERMNHLTDSNDFTAWNEKHQKFLPTVPLELSKGFSKKRIDHRHHALDALVIACATRDHINLLNNESAKSDLKRYDLQHKLRIQETYLDKYGKERTAFKEFIKPWNNFTLNVKNALEKVVISFKQNTCVINKATNYYEKYIDKNDEKVKGIVKQRGTNWAIRKPLHKETVSGKVQLERIKVTKGKILTATRKSLDSSFNEKTIGSITDTGIQKILLNYLKAKGGKPELAFSPEGIEEMNQNIALYNDGKQHQPILKVRVFEQGSKFALGETGNKKDKYVEAAKGTNLFFGVYADKEGKRSYDTIPLNIVIERQKQGLSSVPETNEKGHRLLFSLSPNDLVYVPEEGEIFDKVRFDCKRIYKMVSSTGGECHFVHNSISSLIKNYDAKTKIGELGSLNKLEVTIDGIYRIKEVCIKLKVDRLGNISKA

SEQ ID NO: 2142 - protein, 1135 aa, unidentified
  REGION 1..1135: note = Description of Unknown: Cas Enzyme sequence
MERTYRFGFDIGIGSIGWAVISGEKDTARIEDFGVRIFDSGEKSDGKSRKSQERRAFRSVRRLTNRRHFRKIRLKRFLVNIGMLTDDLLINLSKNVDVNTMALKVKALDEKLTKIEIAQCLIHTCNHRGYKPFYMIDDEISDSDAEATDESEKMLQTAYSQMMKNYKRSGLRTISEFICQKLPNNGTDFPNYRNKEGSDNFRLIPRKLLEEEIEKILFAQSSYYPEITASNIQTLKEIIFAQRCFEDGPGDPNNPFRRYTGSLGKIGACPFYKGLERGYRSTLIGDIFAVVNTLSQYRFINQTTGEIALTSDAAKLMLAHVIESGKASIRDLQKLVSPLDILIKMNDNSESKKLSDSIKFINLLKNDVEGSGLSWKDFTSEEQFDCGHPSRIHQIGVVLSKYQTPSKREKALEEIEFLTPELRSRLSNRKTHGAANASDQFMCEAIQAFLKGEIYGNFQYRTTERIASQDMNQSFRKLGAELLKDEEFNDNPVVFRSINETRKIINALVRRYGSPEAVNIEVASDLNRGFLARQEIRKEQAKKEKENELCRMKIAELLKIDCTEVKGSQIDMYKLYNEQNGRSLYSGVNLGGLEAVLRNTHKEYEIDHIIPYSLILDNTLHNKALVFAGENQAKGQRTPLMYLSAEQKEKFLETINQMFSRKENPISAKKYQYCMLKTVYSDESQELLSQWKTRNINDTRYITKYLVGFIKKYLQFSGDAKVYGVKGGYTSQFRKIWLQAIDGEWGSEEKDRTSDLNHALDAVIIANLTPPYLEIASDNNKLQQIFRKNNGAETREYNEYLEDCVRKMKRYYGFQESYTVSLLKNPNRVPAYAPKLDTEVDIRFNITDPAKFNEKVNNFYGDCSDFIVPPHIPLVSYKPERRFQGQIADSNFIKIRKVDGKDRRIVRKSIKEICKKDIADLYTHDQDLLSSLSRILSEREEKYSIEKYMEENSLKEFRTDCGQLVRKVSLLEKNAVSNYRVKQISDTNHSILSSLKYYCVEVYKDAKGKIHCWGIRYVDIVRKGKKLQIKKASIPPDYVSHVHYLMANDYVEITDKNGKVKCAGYYQSVKNINSNLFYFKQMGLSEIIKIGIAQTDEVRKFDMSILGEKGGEIKCSAQSLFLREKESASAIDGLS

SEQ ID NO: 2143 - protein, 1177 aa, unidentified
  REGION 1..1177: note = Description of Unknown: Cas Enzyme sequence
  MOD_RES 1158..1161: note = Any amino acid
VKEYHIGLDIGTSSIGWAVTDSQFKLMRIKGKTAIGVRLFEEGKTAAERRTFRTTRRRLKRRKWRLHYLDEIFAPHLQEVDENFLRRLKQSNIHPEDPAKNQAFIGKLLFPDLLKKNERGYPTLIKMRDELPVEQRAHYPVTNIYKLREAMINEDRQFDLREVYLAVHHIVKYRGHFLNNASVDKFKVGRIDFDKSFNVLNEAYEELQNGEGSFTIEPSKVEKIGQLLLDTKMRKLDRQKAVAKFLEVKVADKEETKRNKQIATAISKLVLGYKADFATVAMANGNEWKIDLSSETSEDEIEKFREELSDAQNDILTEITSLFSQIMLNEIVPNGMSISESMMDRYWTHERQLAEVKEYLATQPASARKEFDQVYNKYIGQAPKEKGFDLEKGLKKILSKKENWKEINELLKAGDFLPKQRTSANGVIPHQMHQQELDRIIEKQAKYYPWLATENPATGERDRHQAKYELDQLVSFRIPYYVGPLVTPEVQKATSGAKFAWAKRKEDGEITPWNLWDKIDRAESAEAFIKRMTVKDTYLLNEDVLPANSLLYQKYNVLNELNNVRVNGRRLSVGIKQDIYSELFKKKKTVKASDVASLVMAKTRGVNKPSVEGLSDPKKFNSNLATYLDLKSIVGDKVDDNCYQTDLENIIEWRSVFEDGEIFADKLTEVEWLTDEQRSALVKKRYKGWGRLSKKLLTGIVDENGQRIIDLMWNTDQNFMQIVNQPVFKEQIDQLNQNAITNDGMTLRERVESVLDDAYTSPQNKKAIWQVVRVVEDIVKAVGNAPKSISIEFARNEGNKGEITRSRRTQLQKLFEDQAHELVKDTSLTEKLEKAPDLSDRCYLYFTQGGKDMYTGDPINFDEISTKYDIDHILPQSFVKDNSLDNRVLTSRKENNKKSDQVPAKLYAAKMKPYWNQLLKQGLITQRKFENLTMDVDQTIKYRSLGFVKRQLVETRQVIKLTANILGSMYQEAGTEIIETRAGLTKQLREEFDLPKVREVNDYHHAVDAYLTTFAGQYLNRRYPKLRSFFVYGEYMKFKHGSDLKLRNFNFFHELMEGDKSQGKVVDQQTGELITTRDEVAKSFDRLLNMKYMLVSKEVHDRSDQLYGATIVTAKESGKLTSPIEIKKNRLVDLYGAYTNGTSAFMTIIKFTGNKPKXXXXNSNNIGGQFKTSWETR

SEQ ID NO: 2144 - protein, 1465 aa, unidentified
  REGION 1..1465: note = Description of Unknown: Cas Enzyme sequence
MNEEQKNQEKYFLGLDIGTDSVGWCVTDRNYNIVRKQGKHLWGSRLFEEAQDASSRRSARASRRRLERRRWRILMLQDIFKDEVNKVDPSFFDRLNNSALHEEDKPESAKAPCLLFNDKDYYDGKYYTDYPTIYHLRKEMIENPEKKYDIRMIYLVMAHMIKYRGNFLREGSIGDIGNDTQTVVDLFNTIDGLLDSLAGEDDLEPVQKFNCTTEIAKNLIDLFKSDAGKSLLLEQAQGFFKLPKGKTGINAILALICGSTRNLKDVFLSDEEDSDCDIKADFNDATFVETTLLALPGTIGDDKAAIIKTAKDIYDYRILANILQGKKYISEAMVDIYQKHNDQLKELKDLVKRYAPNKYAEFFRQVFDKKAKNKTPLKNYSNYVGFCNVKNKNISVAKTTSQEELYKAIKAILPIDKVDSPDYVWKEPGDKEKFFEIRRLMDAQKYLPRQNSKDNGVLPYQLNEIEMNKIIDNQKQYYPFLGNKDKDYLNPNTQSYKLDSLLKFKIPYYVGPLSNDVDPKTGKQLKNHWIVKKDSNVKITPWNFNDVIDKEKTEEAFIENLKNSCTYLIDEPTLPKNSLLYSEFTVLNEMNNWIINGQPITTEDKNYLINNVYLTKKKPTLATLQDALKEKYKTDVQIFTRTGSELNKEDIHANMSSWIDMSNPKGFGDNFFKDEKKKALAEEIIYTITIFDDHKVVSERLEKYNLTSEQKRYFSSLPYTGWGKLSQKFLDGLTVESTDVSTGEVKSYTIMDLLRTTNQNLMEIYETGDKANGFKKQVLDINKSKAPTEEDIIENEYTAPSMKRSLRQTLKVVNELKEILKIDSFDSYFVECTRTVSDKDKKKRTLSRKKQLSDVYASAKAFASQTLKNQLEAMTDDKLRSKKYFLYFIQMGKSVYTGAPIELDEIEKNYDIDHIIPQAKVKDDSFTNTVLVEKGVNNRKQDNYPIPESCLTADGRKCVETLSTIKFGDSYLMPKAKKDRILRSTNQPLTEDEEVGFVNRQLTMTDQSVKAVCDVLAKTDEKAHIVYSKANLVSDFRKAFDLLKCRDVNDFHHANDAYLNIVVGNVYNKTFSSVFNKTMLEQNKAYFETMKLNAETFFHHDHTIFMSDTKVWISKHYDRVDNQTWVEDKNSKGTIDLVRKYMSYNDPLVTQMLFTQTGKQGFFNKISIHPVYDQGSLMPLKATGPMASDGWEKKYGGYNDLTAPYFMLVQSDISKGKYKGKHQYSLENIPSVYKAKFDDKEWVKDYLTKERGLVNPAVILPKLLIRTVIEYHSKDENGKDIKCRVGISCKSLDTIHFVNLNELMVDKIHSDYIRVISKLLGTNLPANADKPDLSIFKDSKEIRVGQTTISSANNEEMYHYLVDYCFKKPCIYMIPGVGSTIQKLSLLIDTFKGLDLIKQCKTLIQMVSMCTCKTRNVDLTTLGLSKTSAIVRGPKFLSFGTKIIAQSITGFYEKVLFTVPDKEGE

SEQ ID NO: 2145 - protein, 1258 aa, unidentified
  REGION 1..1258: note = Description of Unknown: Cas Enzyme sequence
MATTLGLDLGIASIGWCLFDDDEKGNPRKIIDIGSFVFDQIENPKSGQTENILRREKRLMRRQRRRKVRRLEDGRTLFQKTFGLDFFKVVNERHSPETPFDLKVKGLTEKLTPEEIMVALYHYLKYRGYKSNRKVDTGKDPDDKKLLSNISSLRKEISDRNASGEKIFASGLLLEKLKAKPKEEQRLHNTSNEFHLTVARDMYIDEITALLDRQIVFGVIGEDFKKEYLGLFQRQRDFSEGPDPSSKYHVSFANLIGTCVFDGKKRVGKDSYSAKQFVLLSALNNLMFKLDPSDAHYQRLSPEQIKILENFCLDKSEVKYSALFKKLDLVPFRIKGLALSRKQYKTAMAKFYEEHPEAKGGQGNGDPSTYEALSDFMQKKTLDVTFFKNSEIVYSLRRNLCARENLSEADAKLISENSFYDEIATILLTCKTDARIFDECSKRGYHTWIIDEVTKIKSVSKTIDLSLDLCRRLAAPLEHGLTYDKAMAEIGYDHSTISHSRLIGRIPDLDTALKETKQRLTNPVVRHTLVQLRNLLNAIADTYGIPTHFAIELNRDLKRNFEDRKEIRNAQMDNQGNNLRLKATLLDKFPNHFKSVFDLSKKNNDLLRYKLFDQQGGVSPYTNKIIREDDIFDDNLFQIDHILPYSRSFDDSFNNKVLVETKENQNKGDQTPFEYFKDLAPLKAYLSTHYLPREKVSRLLAKDIDSDFLDKDFEDSSYIAILAKNLITYFMLPEGEQCRTIAGSMTEKLRDLWRVSGKTHSFISSASLHYSRKFIEEYEYRSFEANEVGGPSLVFDFVFRKSGNFEVQIKKASVTGDKPLTKDQTDLNNALKEFIAQQGYFKERFSLALNQTLRGLEESISYESVNSESSIRRQAGIYILGRVIDEVERDITAKDRSNDLHHAVDAAVIGCITPKIVKHLTQFYQKNERAIEYATGEVKLSLDEPYPNFTNEVLTRIYERDETKLLSLLNVLPMYQENPSIEKTVHVLWPTRSTEKDITGAISNETIFGFDKPSGMLTSKIAVAKLTKETLEKIMDKDGGNHAVYLACLDWLKKAGEKDRPPFPRLAKKGTLVRKVRILTGRTPSGIVDLSNDRYADNSDVVRVNVYRKNEGNKRFYFVPITYYQISRDKIRRRQFEEVKQGKRKAESVLSEPLYSLMWSQGDAGSCQITDDDLRKNYTLIACLPRHSLVEIERNGKKALCYTGGASSGMFEVYSLLGDNADLYYNGLTDSLRDRNLLTISTISALKVRSISVLGKIS

SEQ ID NO: 2146 - protein, 1256 aa, unidentified
  REGION 1..1256: note = Description of Unknown: Cas Enzyme sequence
LDLGIASIGWCLFDDDENGNPRKIIDIGSFVFDQIENPKNGQTENILRREKRLMRRQRRRKVRRLEDGRTLFQKTFGLDFFKVINERHSLETPFDLKVKGLTEKLTPEELMVALYHYLKYRGYKSNRKVDIGKDSDDKKLLSNISSFRKEISDRNASGEKIFASGLLLEKFNAKPKEEQRLHNTSNEFHLTVARDMYIDEITALLDRQIAFRVIGEDFKKEYLDLFQRQRDFSEGPDSSSKYHVSFANLIGTCVFDGKKRASKDSYSARQFVLLSALNNLMFKLDPSDAHYRHLSPEQIKTLEYFCLDKSEVKYSALFKKLGLVPFRIKGLALSRKQYKTAITEFDTAYKKNHPDTKNWQSSGDSSVYEELSDFMQKKTLDVSFFKNSEIVYSLRRNLCARENLSEADAKLISENSFYDEIATILLTCKTDAKIFDECSKRGYQTWIIDEVTKIKSVSKTIDLSLDLCRRLVAPLERGLTYDKAMAEIGYDHSTISHSRVIGRIPDLDTALKETKQRLTNPVVRHTLVQLRNLLNAIADTYGIPTHFAIELNRDLKRNFEDRKEIRNAQMDNQANNLRLKATLLDKFPNHFKSVFDLSKKNNDLLRYKLFDQQGGVSPYTNKIIREDDIFDDNLFQIDHILPYSRSFDDSFNNKVLVETKENQNKGDQTPFEYFKDLAPLKAYLSTHYLPREKVSRLLAKDIDSDFLDKDFEDSSYIAILAKNLITYFMLPEGEQCRTIAGSMTEKLRDLWHVSGKTHSFISSSSLHYSRKFIEEYEYRSFEANEVGGPSLVFDFAFRKSGNFEVQIKKASATGDKPLTKDQTDFNNALKEFIAQQGYFKERFSLALNQTLRGLEESISYESVNPESSIRRQAGIYILGRVIDEVERDITAKDRSNDLHHAVDAAVIGCITPKIVKHLTQFYQKNERAIEYATGEVKLSLDEPYPYFADEVLARVYERDETKLLSLLNDLPMYQENPAIEKTVHVLWPARSTEKDITGAISNETIFGFDKSSGMLTSKIAVAKLTKETLEKIMDKDGGNHAVYLACLDWLKKAGEKDRPPFPRLAKKGTLVRKVRILTGRTPSGIVDLSNDRYADNSDVVRVNVYRKNEGNKRFYFVPVTYYQISRDKIRRRQFEEVKQGKRKAESVLSEPLYSLMWSQGNAGSCQIADDDLRKNYSLIACLPRHSLVEIERNGKKVLCYTGGLTSGLFEVYSLLGDNSDLYYEGLIDSFSDRARLTVSTISALKVRSISVLGKIS

SEQ ID NO: 2147 - protein, 1352 aa, unidentified
  REGION 1..1352: note = Description of Unknown: Cas Enzyme sequence
MKEVYNIGLDIGTSSVGYAMTDEKGRLLRFHKRPTYGSVLFEEAQTAKERRVNRSTRRRLARRRKRIKLLQALVAPDVCAADPAFFLRMNESFLWAEDSKYEKFYAKLPKALFVDGTVSVETLPTIYHIRNELVKSTKQADIRYVYLAMHHIIKYRGHFLMEGQTLSDIGAEAPQKMQELLELLTDPESFIYGLVPAENAAKEICHTMENHSLRGMARKEQIQKLLYAGKKKESKEAAQALASLLLGYKGSLKALIGYESQTDAPEKTSLGAIEGETEETYLAGMTEAQAEVFTRILELYRWQLFAEIRQNGQTISDTMVARYEKHGRDLEKLKAWVKAYQPDKFYALFRDDENAKGYAAYTDHLRKPKKFKKEKLQRCTQDEFYKVLKAMLTGNKDAEAAAAAQPMLEAIDEPNGFLPLQRINLNGQIPNQIQAEELVKILDAQGKYYPTLRENREKILSICTFRLPYYVGPLYQDKNSPFQKWIVRDKTQPAYPWNFFDVVNQTKTAEGFIANLTNKCTYLPIEDVLPLHSLLYEEYLMLNELNRVRVKGNLIRDVQLKKRMMDELFAKNKSVSYKVFAKWLRQNSPYTDVTENDISGTQEPNKFTASLRTRYDLEKHGFTVNDQTTEQLETLVRWSTIFEDRSILKKLIQEQYPEVTDNQLSFLVQRRYTGWGRLSEKLLTGLLGEYENQPATIMEVLRATNENFMQVLNNPQYHFQEKIAKERLIELGEPKAEIDYDEIRKLQVSPALKRGIWTAVRIVKELIEHQGCHPHAIYLENTREETPDEKKQRTQSRLNQVEQMYKELAEDKTAEKVPSECWEVLKNCRDKKKLDDQQYLYLLQLGKSLYSGKPLDFDQLSATTEIDHILPRCYIVDNSIENRALVLKGENQRKADNLLLADSIRDSQRPWWNYLRQKGFMGEKKFKNLTRSVVSEEDKQKFIARQLVETGQMVQCVTELFKRYYPDVHVSGIKAGLSSELREQYGLYKIRELNDMHHAYDAFLAATMGNFVERFMPWLDNESSAAIRFRKAQGAKKDDDKVDLSSKHGMILARFSRDQVDADTGEIIRNAQQDICYLKAVWGYHDGHVVFLKRQKSGKITEASRYRAGHASAKLPLKKGMSCQRYGGFDSIKPAYIAAISYQKGKQRAGALVNVPIYLAEAIEKNPKVLVDYLEKDYPGVQIIRSKILIRQKIEYEGNELTLGSCTETYNAKELFLPTFLHPILAKIYNASCALTDADENQLNTLTDVLLEKLSSQYPIYSGALKALEAKKSEILSLSIADKGKFIAETMKITSAGKEYAKYSTSLPKLGIADKGRLNNKLPHPEKIILIDQSITGLREKRTKLWPDSEPS

SEQ ID NO: 2148 - protein, 1293 aa, unidentified
  REGION 1..1293: note = Description of Unknown: Cas Enzyme sequence
  MOD_RES 149..151: note = Any amino acid
SVLFEEAQTAKERRQKRSARRRLARRHKRIKLLQALVAPDVCAADPAFFLRMNESFLWAEDSKYEKLYAKLPKALFVDGTVSVETLPTIYHIRNELVKSTKQADIRYVYLAMHHIIKYRGHFLMEGQTLSDIGAEAPQKMQELLELLTXXXEQIQKLLYAGKKKESKEAAQSLASLLLGYKGSLKALIDYESQTDAPEKTSLGAIEGETEETYLAGMTEAQAEVFALMLELYRWQLFAEIRQNGQTISDTMVARYEKHGRDLEKLKAWVKAYQPDKFYALFRDDENAKGYAAYTDHLRKPKKFKKEKLQRCTQDEFYKVLKAMLTGNKDAEAAAAAQPMLEAIDEPNGFLPLQRINLNGQIPNQIQAEELVKILDAQGKYYPTLRENREKILSICTFRLPYYVGPLYQDKNSPFQKWIVRDMTQPAYPWNFFDVVNQTATAEGFIANLTNKCTYLPIEDVLPLHSLLYEEYLMLNELNRVRVKGNLIRDVQLKQRMLDELFAKNKSVSYKTFAKWLQLNSPYVDVTENDISGTQELGKFTASLRTRYDLEKHGFTVNDQTTEQLETLVRWSTIFEDRSILKKLIQEKYPDVTDTQLSFLVQRRYTGWGRLSEKLLTGVLGEYENQPATIMEVLRATNENFMQVLNNPQYHFQEKIAKERLMELGEPKEEIEYDEIRKLQVSPALKRGIWTAVRIVKELIEHQGCHPHAIYLENTREETPDEKKQRTQSRLNQVEQMYKELAEDKAAEKVPSECWEVLKNCRDKKKLDDQQYLYLLQLGKSLYSGKPLDFDQLSATTQIDHILPQCYIVDNSIENRALVLSGENQRKADNLLLADSIRDSQRPWWNYLRQKGLMGEKKFKNLTRSMVSADDKQKFAARQLVETGQMVQCVTELFKRYYPDVHVRGIKAGLSSELREQYGLYKIRELNDMHHAYDAFLAATMGNFVERFMPWLDNESSAAIRFRKAQGAKKADDKVDLSSKHGMILARFSRDQVDADTREIIRNAQQEICYLKAVWGYHDGHVVFLKRQKSGKITEDSRYRAGNKSAKMPLKKGLPCQRYGGFDSINPAFMTAIQYTQGKKVYHRVVGIPIYANVPVEKADELIRAFAADKIPGVTVVRPRLLMNQMLEWDGGIFVLRGGQTIDILTSKKNAARVTITNGKQLFVSGKDMTTIALLFRGKKDDLNPEQLKETVLHLLEKFKTQYAVFYQKCKADDINRILKNLETPEQLTDADWTAMVSELLNAMGKQRKVSKEWITCEDWRIRGIPTKDVDLIDQSITGLREKRTKLWPDSEPS

SEQ ID NO: 2149 - protein, 1202 aa, unidentified
  REGION 1..1202: note = Description of Unknown: Cas Enzyme sequence
MTKILGIDTGTNSLGWAIVEKQADEYHLLDKGVNIFQEGVKIEKGIESSKAAERTAHKAARVRNYRIKLRKIRLLRILSDAHLCPPLSKVELSAWRLKKEYPKNELFMQWQSTDDESEKTPYAYRHKCLHDCLDFSSVTDRYILGRAFYHMIQRRGFLSNRKDQSADDTGKVKESISNLTQEMHDAGYEYLGDYFYSLYNKGEKIRNHYTARNEHYLAEFKAICEKQDLDKNLGPEVVRQIEKAIFDQRPLKSQKGQVGKCVFEKNKTKCPSSHPMYEEFRMLSFINNIKIQTPNDDVLRPLSPEERALIMPLFFRKSKKLFDFEDIAKKLAPKKQYGFYKKSSDAEMPYLFNYPMDTSVSSCPVTTALKDIFGDDWIDSLCETYTLAEGKSRLNVVNDIWHVLCFYTDDTKLAEFAKNRLQLNDEEAKKFCEISLPGDYASLSLKAICKILPYLRRGLIYSHAVFLGNLCEVMPQYEWDIEEMRNAAIDHIIHEMNLIDSKDARTFEVCIKEYLKEQYHVSEEKLKKLYHPSMMEVYPRVQRTNSHGVYQLGSPRIDSVRNPMAMRSMFRLRKLVNRLLEEGKIDSDTEIHIEFARELNDANKRNAIAAFTKENQNKNDEARKKIKNLFKAETGKDIEPTDVDVLKYVLWEEQGHICLYTGKQICISDFIGGNPKFDIEHTIPRSVGGDSTKMNLTLCDSRFNRDVKKTKLPTELPNHEEIMARINDWREKYESLDGQIRRQKKMSKGATTKDQKDAIIRKRHLLELQRDYWRGKYLRFTMESVPEGFSRRQGTDISVISKYARLYLKSLFKHVYTVKGIATSDFRKIWGIQKAYSKKERVNHVHHCIDAIVIACIGLDEYNKLGAYYHDEENHEWYGMSKAYFKKPWSTFVEDIEKVQDEILVYHYTPDNMPKQGRRRILIDGKRVLSKGDAARGSLHNDTYYGAIKNDGVVRYVKRINLASMKESDVKNIVDDVVRGIVEATIREKGFKEAMAGTIWMNEEKQIPIKKVRCYTSIKNPLSFDKKKQRDLSDKEYKRNYYVTTDGNYMVALYVGSAKTGKKKTFYEFVNMMEAADYYKTSYDKSVIGHNIVPLEKDNCQLAFILKKGTMVIFYKETKEEVWDYSQKEKDRNLYYVSVIESDGRVTFKYHQEARQDKELPRNASDTSDIRPKIRVGLASAKILVQGYDFEINELGEIKRLK

SEQ ID NO: 2150 - protein, 1326 aa, unidentified
  REGION 1..1326: note = Description of Unknown: Cas Enzyme sequence
MKSNGNQKRISDYYIGLDVGTDSVGWAVTDPEYNVPRFRGNAMWGVRLFESANTAAERRQYRTARRLNARKRQRLGLLELLFAEEISKTDPAFFIRMKESSLFGEDKTEISEYPLFNDENYDDRNYFKAYPTAYHLRNELISSDKPHDVRRVYLAIHHILKSRGHFLFDMELSDEYRTVGDLLDDFTERFRDEYGAEVKFKDKAAFVSVITDRNTGITEKKKLIKGLASVKSETEQLDQLDPMKALDMLTGAAVRLSDLFCDEDLKSAKSLTLDSDINEAADDLTETLGEGRFDLIMQLKQIFDAAKLAQMLGSHQYICEARVEQFNTNKSDLRRLKVFVKENAPDEYNEIFCQNKDKLNNYAAYSGRTRRSGEYSCKREEFCKYLLKKLPGLEIADGYGDIFRKIKNNDFLPKLKGSENSVIPNQLHLKELRKILDNAEHYLEFLSAKDSEGISVKKKIISVFGFRIPYYVGPLNTKSPNSWVVRTDEKIYPWNFEKNVDTEKSAEEFIKKLINKCPYTGDDVLPRESLLYSEFCVLNEINPLAVNGKPLPIEQKNEIFDELFLKSHSKVTKKSIGKFLLRKGYIKEGDEISGIDDTVKSKLKSYHDFSRIMDVRENREMVEKIIKAVTIFGDDRKMLKRWLKKNCGDLEKSQVDSICRLSYSDWGNLSETLLAGIYTPDENGEARSVIQMLHETNDNLMQLLSNKYYFGENAEKYRNDKYAPSGSLSDMMDGMYLSPTVKRSLLQSIKIVDEIVDAEKSAPRKIFIEVARDRENDNAKERTVSRKAKLTELYKSCGKEYTELYNELLSRDESELRKDALYLYYTQLGICLYSGEKIELEKLSTDYDIDHIFPQSRIKDDSLDNRVLVKRPYNEEKGNKYPLNEEWQNKNKPLWRMLRDKHLISDKKYERLVRIEKLTEEELSSFVARQLVETRQSTKALCAILKTFYGDAGTKVVYSKAGNVSDFRHDNNIVKCRDVNDLHHAKDAYLNIVVGNVYDTKYTENFFRNIKKYADSDIYSLNAVFRFDVNGAWDKKRSMAKVKSVLQKNNILVSRRSYEAKGKMFDVQIKSAGKGQLRIKEDKLIEKYGGYNSVKVSYYCIVDHIVKGKRSRSIEPVYIYKRSFYESNPIVYCCEILSLEEPEIIYPKLLKDSLLEIDDKRLYISGKTEDRIEFTHDYQLVLSASDEKYIKALSKHVSRCNTEKNDDVPLSLNSDISKENNMKLYELFLAKLQAPVYFRLFSNQLEKLMSGADKFREFPLTLQCRFLLEILKLFKCDRQVTNLSTIDGPSKSGTITINKSLDKVKSAFLINSSVTGLYRYKTDLLK

SEQ ID NO: 2151 - protein, 1157 aa, unidentified
  REGION 1..1157: note = Description of Unknown: Cas Enzyme sequence
  MOD_RES 1092..1112: note = Any amino acid
MRYVIGLDIGIGSIGWAAVCCDEKRKLLDFGTRIFESGEEKNGKERTSQYRRSYRASRRLVRRRAHRKSRIKAHLENIGLVKAIDVGDYFQTGKNNIINTRVKGLDEKLTPEEIAACLIYFCNHRGYQDFYEADTEWMTAEEKKEYEEEKSGAAAIDSIMQSGKYRTIAEMIQQDKYFTGEGEFYKYRNSKYSEQQLRINREYLKMECGMILKKQQEYYPAILTDRNIQTASDIIFNQRMFEDGPGYGIKGSAYRRYAGFLDTFGKCRFFPDEVRGCRFTALADVYALVNVLSQYRYFDSDGNRRLPSGLASEMIHFALENGSITKNNVKALAKKHGVDVDMKENGKSDSFSSALRYIKVVKPLFEQCGMDWQHAISEDIFDKSSLLNRLGVCLSQNITPRRRREALKQIDGIPAALVQKLVSKRFSGTCNVSDKYMKGAIEAFFEGDIYGDYQATFVKEQESTESDHPKYIKLPPFDKNFEFVKNPVVCRAINETRKIVNGIIGKYGSPYAINIEVASELNRCFNDRMEIQKNQKNNEKETARIRKAIAELLHIDESAVTHPQIERYFLGEQQGWKCMYSGRDIDAAACLQNAYKQFEVDHIIPYSLILDNTRQNKVLVYADENQRKGQRTPLMYLSGAEAESFIGRVNAMYKGNKGKSISQKKYDYLMQQSFSEELLGEWKSRNLNDTRYISKFLVRYFKENLVFWHGENESYRRTEVYAVKAAITSQFRRLWLNEGTWGTYDKADLKKETYLDHAADAVVIACCIPAYVEIASVQNKLRGIYKRSKCENEEYCAVMEDCLKTMTLYYGLDRKEVMTLLRRKDRTPCLIPNLREEVDIRFIEPYTYRLFNPQEDLTDEEITEIFHAKCTEFYADDPGFASSLQPVITSHKQEKSISGGITLDQPVSLVEINGVSHKLSRKSVVELTKKQLEDIYTGDTAMMDTLNELMKDCKDDCTVGKVLENRGETCLVLPGGRKVNRVKVVEKSAFGGNILDKTIADGGHTLMNAQNYYCIELYRDKAGKLNMRGITYADLVKSDGKLWLSERCVTPADYAKHEMYLFKWDYIEVTDKKGNLKFRGYVVGSYNVNRKXXXXXXXXXXXXXXXXXXXXXNTQTREKPLSIVKTDSVKKIYIDLLGKKGGEISCGEPLLSITEKE

SEQ ID NO: 2152 - protein, 1050 aa, unidentified
  REGION 1..1050: note = Description of Unknown: Cas Enzyme sequence
MKRKCGIGLDIGIGSIGYVVISRTNNFDARIEDLGVRVFDSGENIRKKASNAQERRGYRSVRRLLRRRKHRKERVKKFFLKIKLMNEIQLKAWEERNGDQNVLQTRIKGLSEKLKPEEILDCIIHICNHRGYREFYDEDSCNENINKDDLKKIEGGLASFDELYQHGNYKSVAEMILKDPVFKTETTFVDYRNHKNNNRYVLIKREFVKKELENILHQQSKYYPQLTENNIKIICDNMVFIQRDFETGPGNENDKTRRFMGFIDSIGKCMYYKDEKRAYRSTVIADIYALVNCLSQFSFINTETGEILLPDNAATKIIDTALLNAAITENDIKNILKPYHLEMRKPEKLQVKVPDTVRTLKILKSVLTNAGYKYEELIKEKQFDVNNPSKLHQLCLLLSENITPARRTRVLKAKGWNEKLQKEVIRKKFGGTASVCEKYMIDAIEAFKRGETYGNFQARMLKEREETLSESKKQKFLSPFDKKIDEELIKNTVVFKSVNETRKILNELIRRYGSPEYINIEVADDLGRSFKERSKIIKRNNDKQKDREKIKNKLIELGLRKEGEVKPFDIERYRLWEEQEGRDLYTGEAIPLEKILSGIYDVDHIVPFSLILDDSLQNKALVNLGVNRQQKGQQVPLAFLNVVDKIDYLKRVNVLYKNKKISTKKYKYLMLPNLYANSELLTEWKSRNINDTRYITRFLVNYLSANLLFDSTKTKNVFGVKGIITSKMRKLWLNKKTWGDEQKNRDNNLHHAADALVIANLTPAYLEIASDKIKLDRIYKDYHKKISNEYLTYLSKSVNKMVKYYGFNKEYAEKLLGTPNSRIPAMIRNIADEADIRLWDNSIEYYKDVSEEQFYKNVKAFYNDDTAFAKSVKPVLVSYKQNRKYQGKFTKDNPLKKNEIKGAFIEKIDSLGNVNILDAKEYYCAELYKNLQGQTILRGIRYVDLQKKNKKLYIISSYPEDYKKHIMYLFANDYIKVFDNDGKIKFNGYYKSIKNVNRNAIYYKNNNSNILEEKTISKKDVVKKYSVDILGKIGGEIKCSVPFLSLEENI

SEQ ID NO: 2153 - protein, 1113 aa, unidentified
  REGION 1..1113: note = Description of Unknown: Cas Enzyme sequence
MNYRIGLDIGIGSVGWAVVSSEGDGHPARIEDFGTRKFKSGENPKSSDTLCSERRGFRGNRRLTRRRSFRKKLLLNHFKNIGLLNNTFYDDYADCKDDDVYCLKVKGLDEKLLPAELYKCLVHTCNHRGYRDFYEPDDSDEEAGKNESAANDFEKMFIKSGKRTVSEYLVSDHVSNGFVNYRNRNGGANPYLLVRRKLLQEEVALLLKKQSEFYSCLDSRNTNQIITIIFNQRDFEDGPGNPDDKSRRYYGSLGKCPFYSVEDRGFRGTVIADVFAVTNTLSQYRFVNKETGEYELEPKVAEKLIDHLLANAKLSMTDVKKILKEEGFELLKSERSDDKALGKAIKFLSIAKKCAEEAEFDWKELINEYQFDPEIPTVLHSIGELISKYQTPSRRRKEMKKSGIDERLIKTFSNKKISGTASASYKYMCDAIKAFLSGDTYGNYQANFKKVNVDSENKEKSFKLAPSDIDGADVRNNRVVFKAINETRKIVNAIIDVYGSPEDIVIEVASELGESFEMRARETKRQRENEKSNDKIKSEIASLLSIDIGDVKGAMIERYKLYKEQEGKCAYSVRPLGDIKEVVENRNHAYEIDHIVPYSLILDNTLNNKALVYTEENQKKGQRTPLMYMNEEKSQEFLSFVNHMFSRKTDSIGRKKFEYYRLETIYGEKSEEILSAWKSRNINDTRYITKYIAGLFERKLLFSGEKKQHVFTVKGAVTQKFRREWFKDSAWGEYEKKRDTYLNHALDALIAANLTKPYIEIGSDALRLISIYKSHKSRITPEYDEYLEKCIAKMREYYGFNDEYTRKLLSRTGRAPSFVPRLVDEVRVRFYDEDEKVFNENVEKLYGNEAGFIVPPHMPITSHKQEKKYKGKIADENPLKIVEIDGLPHKIKRIDIKSVSEKTLSKVYTEDKSLIGQLTTILKGKGEKYTIADYLKDNSEEYFVSKEGTLIRKISTDGGVVSNFYRKEIENGNYTYLGMLKYYCVEVYKDSKGNTKTCGVRFVDIVNRNGKLYRKEESLPGDYSKHVMYLFANDYVTIFDGKGETKFSGYYISVENINSSKFSFKLKNYSSNVIKSISREDTIKKFSISLLGKIGGEIKCSEPLPCIKEREYR

SEQ ID NO: 2154 - protein, 1093 aa, unidentified
  REGION 1..1093: note = Description of Unknown: Cas Enzyme sequence
MKYIIGLDIGIGSVGWAVVRNDDDCKRLEDFGVRIFESGEIIESNKNIRNSQRRRKYRGMRRRIRRRNHRKERLKNYLENIEFVSRAELSEFFAKNNHDIIDIRVRALDEMVTPVELTAALLHIAKRRGYKAFYELSDENNNAKDKKAKEEEEKDIYKALTNTADVIKNGGYRSIAEAIMKDSEHFSDKISGRYKYRNIKEKDEKGKKESGGKISENDILFPTEMFEDEVRKILGKQKEFYPQLTDESIDKIFDIIFSRRDFEDGPGNTDDENRPYKGFVDSIGNCPYYKNEKRGHRYTVIGDLFALANKLSQYKYVEKNTGEVVKLPRDLMRNIVNQSLQSGSITKTKINELAKEFNIVILNTKTAKNENIADCIKYLKAVKPIFESYGFDWDKLISEEYTDQNSLLNRVGDTISFNITPKRRIDALNKIDELKGKDELIKKLSKQNFSGTAKVSDKYMIDAINAFFDGTLVGEFQANVQQDEFSVSIKTEKLLKLKPFDNNSEYAQNPVVFRAINETRKVVNAIVQKYGAPNAMNIEIASELNKSFDTRQKISTQQNKNEKERKNAIKQISLITGLDEREIRPQYIERYLLGELQGWRCMYSNEEITNKKEAILNKGKQYEIDHIVPFSRILDDTLNNKALVLARENQKKGARTPLMYLSAEKEKEFKQRVNKLFKGNKITEKKYRYFMLESLVGEDAEKTLGDWKTRNLNDTRYIAKFLVKYFNDNLYFAREKGDDKRPVVYAVKGAITSSLRRQWLNKETWGRYDKGELKKITYFDHAVDAIVIANCLPAYVIIAAENHKLRDIYYSAGKIKTEEYRKSLDNCVDTLMKYYGMSPAVSRKLLEKVKETPSLLKNIRFEVEYRVRDYELMKYFFNYDTKVGEDTLDQIFRNDLYKIYDHQFADSIEMPIVSIKPERKYSGQMVKDNFLKKRVANSENKYVKTIDKNNDAVLDNSYYYCVEVYRTRSGNIDLQGIKYTDLVNKNKKLYLKPCYKYPENYYKYIMYLFKGDYLRIKGPKSTRLGFYKAVNNINQNSIKITRYNSKYTRAFREESTTISADAEIEKIYVDILGKKGKVLTKHGEPLSLLPEKN

SEQ ID NO: 2155 - protein, 1374 aa, unidentified
  REGION 1..1374: note = Description of Unknown: Cas Enzyme sequence
MAQNEKRYTLGLDIGVQSVGWAVIETDPETGDGHIVDLNSYVFDGSESTSPTSKDSKCQEARGYRVGRRQVRRRHHRKEQLKKMFVKKLNVISPDSIDNFYENMVDIVKSKKASLNITDLPSNDLFALRTIALDHKLTKEELFAILLHICSRRGYKDFYDDSEEAKSSRKKEDSRLETAIEDTKLLSEKYRTPGEMFAKDPAFDGKPEYHDFRNVRNHNKKDKDGKKYKRKDFFYIVNRKDVLVEAEEILETQSKFHSFLNDFIEVREWIAIEGCETGKYASTKQIKVNKYILDILFSQRDFEDGPGILPFTKEKALSQSYNEQRSSRFAGFADTISNCIYYNNELRGERSSLIGDLFSTTNLLSQYTYYYKGSGSVLEDNAIKSEVAKRVINAFIKNGKMDDKTLKAILANYRDPKAPTLQIKPTKSDLGSNILTIKKGEKIDGEDTFGKCNKFTHKIKQFLEENGIDWEEFTRDLYDEEGNIVLSTDCKLQRLSSLLAMNITPARREKKLTADNLGLTERVIKSLLKEKFGGTANCSNKYMIEAIEAFMSGEIYGDFQARKNKEKEEELLNIIPEDEIINKVPSIKDADIIRNPAVFRPLNEVRRITNHLLSNYNITQVNIEVASELNQSATAKSKIDTAKRENEKFNGMVRSKIAENVFGRQITDKDMDKYKLYLMQGEKCMYSNKDIILENLFGTESHYEVDHIIPYSLILDDTLENKVLVTKEENARKGQRTALEYLTQDYPQGVDNFKALINSLYISEKNKKGNVKEEKEGNQTQDKKFEEINKRFRPGISKRKLSYLMAPSVHSIPEDWKSRNLNDTRYISKYAVSMFKNLNYIDENTGEIIKMAVTPIKGGITAKFRNAWFDAGTDNKRNSKLELYMDVEKAIVSHQKEEGDITKAVKEFSKYLLYNKIPTTLNDTEKKQAFTEVKDMLMTEYILTDICTQNNIDVSKDKQGVIYDKIKELVFGIREQVEKDTKNTIKTVGDLIKAANTSAKEMAQRLYKYDIEKISENYKNYIISAEYIKLLFDTKMLKTKDREISDLHHAVDAAIIACLDSTTAEIALDANKLYQIYRENKTKVGEYEEYKQSCLNKYKKHKKYIPEYKLNTFLETPGYIPCILSHLKDEILVRTTLDRPEYESLLKELSFELYGCDGLLKLGNDFAESIKPKIKGAKPNRKYRGKITDEQAKQEEKNKKYCKKIIDDKRNIYSLIPADSNYCTEVYLGENENKEKGVYILGVKRIALIKKDGKLWFKPTYEYPKNYVKHIMYLYTNDFIEVYRPKAGKHNGFELQNAGYIRSSTGGYVKTEDGFEIKQQQITMSEINKPVSQNKSATSLDRNGKGKIIKYYVDVLGNKHEVKKESKPIEKLVK

SEQ ID NO: 2156 - protein, 1390 aa, unidentified
  REGION 1..1390: note = Description of Unknown: Cas Enzyme sequence
MKELNLGLDIGTNSIGWALVDENGEIVKKKGFRFWGVRMFDEAKTAADRRGKRTSRRRLRRRRQRIEWLQDEFRQEIEKVDSTFFQRINDSYYKIEDKKLQNKYTFFDDDFTDQDYFNEFPTIYHLRKKLVETDEKADIRMLYLALHHIIKYRGHFLNEGEEFNSSDSKVVEEVFKTINDELKEYANQNEDDETYFQVINLDNPDFFIELQEIMLSKSLKRSEKENSLRVLMDVEKKTLVSEFVIKLLIYGKVSPKNFSFIKDQKYQTKDLNLCDEELHSAIYENKKTITELSSIFDYVENIKLVSDFYYLLNLLGKDPKTHECNRSLSYAMVNSYEQHQDDLKELKGLIKTYLPNKYDECFRKEDEKLCNYVRYVGMVSANGKIKRFAHCKKEEFGGYIKKLLDLIKDENAQKTIKEIGKRIDNNEYMPRQNSGQNTSIPMQLNLFELKSILEKQVQFYPFLKEENEGYTRIERIISIFTHHIPYYVGPLSNANHNQFSWIERKPLAIRPWNFDEVVDKDASAKNFIQRMQNKCTYLQGPTNYCLPKMSLLFSEFNCLQYLNKLRIGGALIDSMRKTKIFNDFFLVYSSPTKKKLKDFIYTNFGIECDDIPEVNCNMASWIKFKEIFKEDFDKKREDNTIEEIIKDITLFEDKKIIERRCKEIYHLTDEQIKAIKGVNYKGYSSLCRKLLDDLRCVNQRTGEESPTIIEIMRETNLNLQEIIYSQEYSFLEAIDKYNKGISNNDMDFRTFIDENLYVSPMMKRALIQTYRLIEEIERIFKRPIDKYYIECTRTNKAEKKPTDTRYSHLKELYKACSNMADEFRKVNVNFKELSKQLDENKDKLSIDALYLYFTQLGKCMYTLEDITNIEGIIRGSKYDIDHIYPQSLIKDDSISNRVLVDKVMNQQVKKNQFLCDTNIVTAKHRQFYKMLLDKNLITKEKYRRLTETKIDESTLNGFVNRQLVATNQAVKGVIQLLKKYKKIDNNDIIYSKAENISDFRNEFEMLKSRTANNFHHAHDAYLNVIIGRAIDTYYKVNKITSTKDVLKIQNEKKTLNPMSIIKYKKVFDLQGKLVWDLSTYIPKIEKYVYHIFDIHETMRTKTSNEMFEKVSVLPAGGKGTVKIKSSDNKMSIQKYGGITSYSYCKYCLVETVNKKNKTEYILEAIPTPFKSRVQEYIESTYQNKYMQYKIIKNNIPTNSIIENGALKFYITGKTVNSYFIKNANDRFFSKEAIEIIRKIDKYNEKIKRKCAEEPIDNSILVSPAKVLKNGKTTKEIVITMNDCLSLLEEIKIMYSKNIFAFPPIIELIKTLNEILDFTKYNIKELVEIISQILLLLKTNERKTCDLSLIDLVSNFGTLRINKKLSTGMKLISESLTGYFSEVIFEVPNGI

SEQ ID NO: 2157 - protein, 1054 aa, unidentified
  REGION 1..1054: note = Description of Unknown: Cas Enzyme sequence
MNQKFILGLDIGITSVGYGLIDYETKNIIDAGVRLFPEANVENNEGRRSKRGSRRLKRRRIHRLERVKKLLEDYNLLDQSQIPQSTNPYAIRVKGLSEALSKDELVIALLHIAKRRGIHKIDVIDSNDDVGNELSTKEQLNKNSKLLKDKFVCQIQLERMNEGQVRGEKNRFKTADIIKEIIQLLNVQKNFHQLDKNFINNYIELVEMRREYFEGPGKGSPYGWEGDPKAWYETLMGHCTYFPDELRSVKYAYSADLFNALNDLNNLVIQREGLSKLEYHEKYHIIENVFKQKKKPTLKQIANEINVNPEDIKGYRITKSGKPQFTEFKLYHDLKSVLFDQSILENEDVLDQIAEILTIYQDKDSIKSKLTELDILLNEEDKENISQLTGYTGTHRLSLKCIRLVLEEQWYSSRNQMEIFTHLNIKPKKINLTAANKIPKAMIDEFILSPVVKRTFGQAINLINKIIEKYGVPEDIIIELARENNSKDKQKFINEMQKKNENTRKRINEIIGKYGNQNAKRLVEKIRLHDEQEGKCLYSLESIPLEDLLNNPNHYEVDHIIPRSVSFDNSYHNKVLVKQSENSKKSNLTPYQYFNSGKSKLSYNQFKQHILNLSKSQDRISKKKKEYLLEERDINKFEVQKEFINRNLVDTRYATRELTNYLKAYFSANNMNVKVKTINGSFTDYLRKVWKFKKERNHGYKHHAEDALIIANADFLFKENKKLKAVNSVLEKPEIESKQLDIQVDSEDNYSEMFIIPKQVQDIKDFRNFKYSHRVDKKPNRQLINDTLYSTRKKDNSTYIVQTIKDIYAKDNTTLKKQFDKSPEKFLMYQHDPRTFEKLEVIMKQYANEKNPLAKYHEETGEYLTKYSKKNNGPIVKSLKYIGNKLGSHLDVTHQFKSSTKKLVKLSIKPYRFDVYLTDKGYKFITISYLDVLKKDNYYYIPEQKYDKLKLGKAIDKNAKFIASFYKNDLIKLDGEIYKIIGVNSDTRNMIELDLPDIRYKEYCELNNIKGEPRIKKTIGKKVNSIEKLTTDVLGNVFTNTQYTKPQLLFKRGN

SEQ ID NO: 2158 - protein, 1481 aa, unidentified
  REGION 1..1481: note = Description of Unknown: Cas Enzyme sequence
MDNKKYKIGLDIGSNSVGWCVTDEDFKIVEKDNKKLWGVLLFEEQQSNQARRANRGARRRIERKRKRILYLQEIFKNEIDKIDPTFFGRLNESFKQKEDKKYKDKYTLFIDKTFNDKTFFKKYPTIYHLQKELMESDSKKDIRLIYLAIANCIKDRGNFLSSKKPENYKVEFSKDETKEKLMSALKELSFYMSDEEKIPYDFDSGTFLSDNFDEILKNNFAKTNNDKKIEYNNIFVDEIKNARTFKNSIFEFAKLVLCGNKITLDKYFKDYIDDKKLEYKVSEEQEIQLNKILEKCKDPDNLIKAINNLESIYQSLQLLNIFKGNVKTLPDALVARFDNYKKDLKNIKEQVKSKFGKDIYYEIFINPKLQKDKNSNGNENNHNYVHYTSSYRNYDVKNKTINKCKLNTSKCSRDEFVDYLKKVLKLEKRTDDNAELYDLVTKEDFLLKPKTHENSIFPYQLKYNVVKTIIEKQKKHYKFFDDVDEDGYKNEDKILSILSFRIPYYYGPLTIDKEKSKWAWISKLEGKENENIRPWNYSDIVDDNKTQETFITKMQNRCTYLKNEYTLPKDSIVFQKYLVYQFLNYVRINGKFFFDADQKEMIISNLFINERKVTNKSFKEYVNTNILKIKATDESDISFKNGAIDDNIPSLSSLYDFIKVYGSYDAVEKNLKTIEEVIRDIAILQDKDILALRLKNKYGFNDNQIKKIKGFNYKNFSPLSYKLLNEITPCDKNGVVIEKTILTLLKECKSSDDQGLCLNRLLELNSNSPSYQYDFKCVITKENGNENCNNIDNFIDDLYVPVSSKRAIKQSCRIIDEIGKILDLNKNYENVSFVVEVTRKKQKNESGKKSKAKETRYKEMSTILNKAFEKDENEQGVIDNFNELKDRDEGIVRSEKYYYYFMQLGKDMYTGETIEYDDLDNYDIDHIIPQSLVKNDSIDNKVLTNKNYNEGVKKNIYPFFNKLDLFRNNGGPTKAKQFWKKLLDNKLISKIKYESLCRTSELCDSELEDFENRQKTTTDQSVIGFINVLKDFYKVEDKNVIYSKASNVSYFRNKFEIYKSRIINNYHHAHDAYLNIIIGSILDNEYKKTFAKYKSINNGESFQQYLEKNKYSVNPEKIIERFFNVDENKELLLSLKNSIFLTKNIFTKQRTYLKGNNIFEKVSLLPKGNFNIPIKNGLACEKYGHYAAYNFAKYCLLRNVNNNGKVNFVLEAIPSLYLDNSEAYLKELYGLDFDNYSIYLDNLKVNTKFKIGEKEFVITGKTNDQYVILNSVERSFAKNNDLCASQKLNKTIHKLEKVYNYANQLTTGDKLKLLNCEKYMNEEDTNLQFLNDLFKRNYYISSDFIKNPYFDKKDESIKNKSKSLCINKTEVDELYNFLINLYLNKKCYSSYTVSNNIVRKLFDSKKYETLNILFKIKVIMELFNLFSTNERKTIDLTILGIGKKKSGTLTQGKKIILGKNERVKVIFESVTGFYKKVITLK

SEQ ID NO: 2159 - protein, 1159 aa, unidentified
  REGION 1..1159: note = Description of Unknown: Cas Enzyme sequence
MEKRQYRFAFDIGIGSCGWAVVSENETGNRRIEDAGSRIFDSGEMKEGKDRKSQKRRGFRGVRRVLRRRSHRKYRLRNYLRYVHFMTDMEIRCASEASMNQILPVKVRGIDEKLTKAELLQVLIHACNHRGYKDFYEVTETDEAQSQEEEDEKINQAAADRLDRSFEESHCRTISEYICRYCTIPGTDRIDYRNRFYKNENRMIIRRKHVENEVSTILKKQREWYPELTDQKIKEIMEVIFSQRDFEDGPGYASDKAEYRRYTGFLESIGYCRFYPEERRGFRNTVLGDVYAAINALSQYRYVHADTGEAKLTQEAAAKMVSYILKQGSLTRTQASKLLKPLGIAMYGSKDVDKTLVKSFRFLKEMKKIAEKCQVSWESLLSETDLTEYEEGKTSLLNQLGTVCSMYQTPHRKEEELKKLYAKWEHVHLPPAFWNALKRHKFNGTSSVSYHHMADAIEAFLKGDIYGNFQWNKQKQLDEKQESQRERLLSAKVLMQDEDVKDNPVVLRSINETRKVLNCLIRLYGSPAEIHVEVADDVARSYLLRKRIQKMQRDHEKTRDAIKKKIAEILHCKESEVKGSQIERYKLYMEQEGKCLYSGRELDLEMVLDTQSHAYEVDHIIPYSLILDNTLANKALVCGNENQAKGQQTPLMYLKGEKKEAFIERVKAEKKRASHPISNKKYDYLMLATLYGKEAKEILTGWKSRNINDTRYITKYVVGLIKNHLQFAGEKARVFGIRGHITSRFRKEWLGKNTWGSDEKCRANYLNHAADAIVLANLSKMDVEVAMDYEKLRQIRRHYGETSIQYDHFLKNAAQRIAAFYPITEEAIRKQLVESKRTPSYVPNLEKEVDLRLGNPEGETRSEEEYRAKTEMYYEGAAFVVKPHLPYVSMKVERKFRGEIAKSNPIRLVEGNGIFYQVSRKPVEELESKDLSELYTSDGYLIEALEKAFTEGEKYLNNEDDKENKKDSQKKPIKKYMEKEHIDVFRTTNGQPVRKVSLKGTPVSNYYKKSINETNYSILGVPKYYCVEVYTNSKGQTQIWGLRFVDMISYEGKLYLKDGVRPADYARHVMYLFPGEYIEVEKKGKIVYEGTYQNVFNINQGKLRIKVKNTNALKTISIGNKAGVFKYAISLNGRKSGVVKEGEAGYPCFAHCLSKKEND

SEQ ID NO: 2160 - protein, 1206 aa, unidentified
  REGION 1..1206: note = Description of Unknown: Cas Enzyme sequence
MNRVYRMGLDIGIGSVGYAVVSTDKNKENGRIEIFGTRLFDSGEQNDGKDRTSQERRGFRSVRRVLRRRASRKELLKRYVETLGLLQDDQIVEAVENPDANVIPLKCRALEEKVSPGDIFRILIHYCNHRGYKDFYETDRPAAAGQAGGTADESSDDLTEQEKKEQEDEKKTKEALAEFDRRFAESACQTVSQFLCKICADPRTGKIAYRNRDYKVEGRMVIRRALLEDETRKILVRQGSFYPMLDSRAIEDILEIIYRQRAFEDGPGNKDDRWRRYKGFLQSIGMCRFYPEERRGFRFTALGDLYAAVNALSQYRYYPALKEELTLPPEQREEKFAGHMKQIAASLIETVMKDGGLTFKKIEKTAAENGIIAAPNKDVNKTLAKSFKYIRVLKKTAEAAGLQWEPFIQDRFRWTACGKNVSFLNFLGETLSKYRTPAYRKEKLKEAAELAVQQQIPTNEAFWKAVSTLVPQGTSAVSYHYMTDVVENYLKGHLYGDYQWQQEAEKINKQNEQRTMLLSHELLTRDVNLKDNPVVLRSVNETRKVVNELIRIYGMPDYINVEVADDVARSYLERQKIKKQQRQNEKENEKIRTDIAEKLEISADRVTGRQIERYKLYKLQGGKCLYSGEDMDLCAVLDDKERTYEVDHIVPYSLVLDDTLNNKALVCGSENQAKGQRTPLMYLTGDRREKFIERVKAALIQKSHPISRKKYDYLMLDDLYSDEARELLQGWKSRNINDTRYITKYITGLLKNNLRDSTGKSPKVYGIRGHITSRFRRHWLCTDTWGGDVKPRGNDLNHAADAVVIACLTQTDAAFAMAYEKLQYIFRYYGRKQDTCQYRAFLESCVSQLSHYYGMDPEFARSRLSDSGTLPCIIPDLINEVDLRFGSPEGDERTDSEFQREIEEYYRNKGYDDFIVKPFKVIATTKPNRRFRGAVADSNPVRIVEINGENWKIRRVDIKSINARNIDSLYTTDGRLISALHKALDDRPDKYTVKEYLEDNKLPFFTNAAGQRVEKVSKKEKKLLGSGSFYRKDNTAKNYTILGGMKYYCVEVYRDAEGHDKVWGIRYVDLIRRRKKLYLKNDMLPEGYKSHVCYLFPNDYIEAEVSGKIEFRGFYQSVYNINAKRFCVKEINNSGSSAAYVKNTENSSDSQTNPKTKNRTPSIALKKGMKLHKYAIDLLGRKGGEIDESREGFPCFEPLSSKKANA

SEQ ID NO: 2161 - protein, 1158 aa, unidentified
  REGION 1..1158: note = Description of Unknown: Cas Enzyme sequence
MSALRYVLGLDIGIQSVGWAVIRYEEPARIEDFGVRIFDTTENAREKNNANQERRAFRRARRMLRRRSQRKAMLKFHLQRMGLLKAGQVEAFFENGGIDLLSLRVKGLTERLSPVELAACLINMSNHRGYQEFYSLDEEDQKQLTAQEKKEYEEERSGIARVEAIMAQGNYRSVAEMLLKDETFAPRNNGTVRVYRSHPYSEERYPVSRDQMHREAQSILECQAQFYPCLKQPYTARWKKNTVEVTNQEFLLWLMFEQRDFEDGPGDAQDPMRRYTGFLMSLGNCQFYKEEPRGARITVLGDLFAVANALSQYRYISKATGELCLPRQMARELLETTLRDGEIPRKKIQEIAKKYQVAVDDKSVKTAEKAPNCVKFLKRVRPVLEQCGLDWEQALGRDPLSPDTLLNRIGRVLSMYQTPRRRKQELLKLQGVTPELAARLTLQKISGTAKVCDRYMRDAIEAFANGERYGEFQWRTQQAQEIPATKGREGRHKKLPPFPANAEFAKNSVVMRSLNETRKVINAVVGRYGSPWAVNVEVASELGRSWAERAEIEKKNAQNQKKTLQDKQKICEIMGWKDPENVTGAMLERFRLAEQQGWQCLYTGRPIQDKRAALDPRGKSLEVDHIVPFSLILDNTLNNKALVLSDANQTKGQRTPLMYLNGQEQRQAFIGRVNKMASAGLIGERKRRYLLLPDLRDSGLLDEWKTRNLNDTRYIAKYLRGYLERELAPAENHRNPFVYPVKGGLTSRFRRTWLSRDTWGTQEKDPLREQTTLHHAADAVVLANISPATAQIAEDNMRLNRILKANHGMESEEYRAMLERSLDTLEKFYHLPREKARKYLKRQNRIAALIDALNLEVDVRFGRPGEEADPETYRRAVRAYYRRDPAFAEKLTPPLTSRKQESKLQGTLTAGNPLGSKRIDGVLYERKRVDVLSLTRGDLNRLCTNDKDLLESLREWLGADEQEPQPDRDEAEKKAKGPTLGQRLAEQGQNEFRTRKGRLIRKVTLQGNVLDTVKIKQISPANQSVLKTANYYCVEVYTNTEGQTKVWGIARTDLVKRDKKLWLACPLPVDYASHQMYLFKNDYITVETRNGLIFEGFYQSPSGLKQAKFNGIPGNSTKRVQFVVSGIAKVKKFDISILGKKGGEIRCGEPLSLLPEKK

SEQ ID NO: 2162 - protein, 1067 aa, unidentified
  REGION 1..1067: note = Description of Unknown: Cas Enzyme sequence
MQRNLIIGLDIGITSVGWGVINKETMQVVASGVRLFPEGANDENLKRRTRRGVRRLKRRQKQRLSDMRDLLKNLGIIGENFVFEANPYELRCRGLVSKLSNSELATSILHITKHRGTSFETVEEDETNKDALSNEIVNQQLSIATNKHICEIQLERFRTKGFIRGNENIFKTDQYVKEAKAILKNQDLTEEDSNKIIEIIQRRRQYYEGPGSKKSPTQYGRFYYDETNNLVEVDLIEKMRGKCSLYPEQLRAPATSSSAELYNLFNDMNNIKWDGSNQLTTDDKINLVNKYMLEKGKFTLNELAKYLECNIAVITGFRIDKSGNALFTEFKGYNKLRLALGKDNPVFQQIKEDIKKLNFDQPTLLDEIAETLTKKKGIDERKTALKHILTNASNDEIDIIANLSGFTKYHAFSFKALRELNKELLQTNLNQMQIITNQKKNNPLEKYKTGLKITFNEEEILSPIAKRAHREAIKVLNELSDDYGTSIDSIIIESAREKNSAEVRQNEVKRQKAREINNKIIEDSFSKVDAKGRQLTPYIKQKLQLYVSQDGRCIYSGNPIDLNLLINDSTYCEVDHILPFSISLDDSLNNKVLCENRANQMKGQTSPFMYFKSGKAYGFNYEMFKSYVLSLYTRKLITYKKKNNLLYEEDLYKFEARLGFINRNLVDTRYANRSIMNTIQNHYKNTKQPIKVFSVRGSITDLFRKKAGIEKDRTEFKHHAIDALIIAGIKSQNFFSELLQLSKDEVIDQKTGEIVSKSSESAINSDFIRYVKHLNNLQEFQDIKFSYKVDKKPNRKVSDETIYSTRLINEKHYVVKKYNDIYDEKVGEVVANKIKEANGAEQKLLVYKNDPQTYSLLKTIVESYPNERNPFLAYKNEHGDIRKYSKKGDGPLIRSLKYLEDELNVHIDISKNYRVTDKKVVLLQLSPYRTDFYYSEKYQMYKFVTVRYAMIRQSKEGYYIEKEKYSDLRESKGISNDYEYLFSLHRNEFVRISTIAGEGEIMRFIGTNNDKTNKIECKFISHNSVPGKQIMITIGKKTLIIEKFHVSPTGKLIKVDKEVLQLNLNMV

SEQ ID NO: 2163 - protein, 1112 aa, unidentified
  REGION 1..1112: note = Description of Unknown: Cas Enzyme sequence
MKCMRYTLGVDLGPTSVGWAVLDHDRNKIEALGVRLFPGAENPKYGSSLAEARRLARGARRSTRRKQRRMKDIRKLLVSSGVLTQDAMDIVSKTVGEHTPWEYRVEGLDRLLKPDEWTRVLIHMAKRRGFKSNRKEAPEGVQKVDKKDDESKMKAGVAENSLILKTGNNGKGYRTVAEMFVMDPKFGEHKRNKDGQYINTVLRAEIEAEVQELFKRQRSLGNPFAGEDLEKTYLEIFNRQLPFASGDIIEKMVGYCAIEPEELRAPKASWTAERFILLSNIRNMRVVVDGRTGELGPEKSAKLLQYCYDHTKVTYKQIRNLLDPAPKKSKKKGQPEEQQPQQASNWHFAYIPAAKKKVSRKKAADKETENPQAENTQEYDPEEATFAELKAFHEFRKAVTKALGEKYWTDLTANNPRVMDDLAFALTFRKNEEDIRSCMAERNVPEELIEAVIGLNFKGTVNLSLKAMTKLIPFMEEGSDFTEACGQAGYSSFDPRSGSNRSILLPVPDQGRVRNPVVFRAITQTRKVINEIIRKYGSPERVQIELAKELAKPIEVRKAIKERNDENYRQKQVLRDEFENRFSHRPSDSQLEKYRLWKEQDGYCPYTGEKISLDRLFSVKGGTYADIDHIVPYSRSFDNSWTNKVLVMTYVNRDKKNMTPYEYFGQDSEQWNTFLKNVEKYIHDKSKARRLMTKDRDFDEIKLRCLNDTRSITKYVADWIESSLVFSDPEIRNPVVRINGQATATIRKQWGIESCKRRDESDLHHAIDACVVAAATPAIIDRILKYSAADELGELREEDPTDSRKRLPEPWKDFAREVRARISEDPAGLIKSYGITSYTEEELQELRPIFVSRMPDRKARGEVHEATVRSLRYADEGKGTVVKVPLKKIKLKRLENMVGKEKDKILYEALQKRLNEYADEPTKAFAEPFYKPSKKGQPGNLVKSIRLFDPSVSGLKIREGMSANGNGSMVRISIFRKDGKHYVVPYYIEDIARKRTRMHAIVAGKPESEWLEIDNTYEYMFSLFMNDIVKIVDKSGKEVFGYYKGCDRSNGGIRIVRHDSEKDSTRIGVKTAAVIEKYDVNILGEYHKVKHEKSPCGQISRKPGKKKASAAA

SEQ ID NO: 2164 - protein, 1411 aa, unidentified
  REGION 1..1411: note = Description of Unknown: Cas Enzyme sequence
MAKYRIGLDVGTNSIGWAVTDLNNKLIMKKGKKLLGVLMFKESSGGDKDPNKLRRTYRCSRRRIRRRKERLNYLNEIFAPEINKIDPTFFERLDESFLKLEDRKYKDKYTLFIDKNFNDKTYFKKFNTIYHLQKYLMESEKKEDIRLIYLAIRHLIKYRGNFLNSSNPDNYSSKIDELDFLERLTRVFEIINSYEIYSKFNKPILDINDIKSLIKANKDSKGINSKKENFIKIFNKEEKKNNLIDFVASLLAGSSVELNKILKKDEDGPQNSIKISFTDDLTEKFLELRSEYPEYDDFISSIEDLYRLYQALYINKYVQNSLPQTMVERFNTYKTDLKLLKGYIRKYYSTKYDEVFNSIENKMSYPHLVRHYCSDIDKKTKVNISNDKSFSRIEFINYLKNEFSFDQDDELTLKLKERINSDDFLLTQSDKSNGNFPYQLNYFVLKKIIINQEKFYSFFDEKDSNGYVNKDKIISLLTFKIPYYIGPLSNNYDESDENNHAWIIRKKEGHIRPWNFDEIVNVEDSAKKFIQRMQNKCTYLINEYCLPKDSITFQKYLVYQQLNTLYVNGKFYFNSDNKDDLIINLYSKNRKITKKLLQDYLSNKLKEKVVITYKNGKDKDVEPNLHSLSSLFDFIKVFGSYEEVDKNIDLIENIIRDIAIFEDKSILASRLENEYKLNKDQIRIIKSFNYNKFSRLSKKLLDGIKPFDKNGVLINKTILTILKDYDGSENKPATLMEILNSKDSEYDFDSVIKIENSKEEENESVDSFIENSYLPKISKRPTILTCRIIEELAHALKANISEDFEFYIECARTNKSDKKATKTRYEKLMETLSKSGLKSQVDSLINELKKYENDKSKLNAESLYLYFMQLGKDMYTGDQIDLNTIIENYDVDHIIPRSLIKNDSLDNKVLTEKKFNNGKSNIYPLSKIDLWEYNGGRKKALEFYKKLKDNNLISERKYIALTANTDLDNDTLEGFANKQLSTTNQSVIGLKEVFEDYYSINSENIILSKAENVSDFRNNFDLVKSRTANNFHHAQDAYLNIFVGSAVNSWIKNIFKLWRIDESNEHKYSDFVSFVREKRYTLNPIKIMEKYVKDQSDEFNELKDVIYNYKFIFTKTRTYIKKDFFPKSTVYAANSCANINTKNNLDCKKYGGFKEYAFGYYVLIKTKDNKFILEPVPYIFSKNANQYLDNLYKKNYEIYLDNVKINTKFQIEKRQFIITGKTVNSYLVRNSIERFFPYDLIKIIKKVDNFMNFLKLNKIAINVKNQESINKAIDDLNNLHKIKDKNNELISKENKFGEIETLTSNELINVFDYLFTLYSKDAFSYSFSKALIYEQEELKNKFMNLDILLKTYTISEMLNYLKTNERKKINLIKLDKEENCGKLTQNKVLPLGTKIIFESNTGLYKKEIILK

SEQ ID NO: 2165 - protein, 1336 aa, unidentified
  REGION 1..1336: note = Description of Unknown: Cas Enzyme sequence
MKKFEDYYLGLDLGTSSIGWAVTNEKYDILRFNKKFMWGTHLFDMGNTAAERRIFRTSRRRLKRKKSRIELLQTLFSAEISKKDFGFFQRLKESQYFIEDKTVKNKNTLFMDKNYTDQDYHMEYPTIYHLRKALIDNEESAFEIRKLYLAISHILSHRGHFLFEGELSDNLDFDDIFNEFVKYLNEELNIDFKIKSDVSLQAIKEILTDKMLNRTKKKEKLSELLEEEKNKIYQEIWKLLVGNEAKISTIFDDKEYEEAKIAFSKGNYDEKEEEYESILGEKILFVQKAKAIYDWMLLQNILKEDKYLSYSKVKLYDEHKNDLKILKEVLKRLDKKAYKEIFSENGLYENYVKKNGKEELYKKIKSYFNDENTDEIVKNILNKIELDSFLPKQKIKDNGVIPRQVHQKELEIILKNAEKYFTWLTEKDETGLSVSEKIMKIFKFKIPYYIGPLNSKSPFAWIERKEYGKILPWNFENMVDMSKTAEKFIKRMTNKCTYLPEKDVIPKNSLLYTKYMVLNELNNLKIRGEKIKVELKQKIYTELFQKNKKIGMKTLIEFLKSQNIVVTKAEITGIDGTFNTSLGSYIDMKKIFGEEKIVKDSYKKMIEDIILWITLYGEEKKLIKSKIEEKYPEKVTPEEMKLILKLKYKDWSRLSKEFLTEIETMDEETGELISIIEMLWRKNENIMELLSYKYEYLDRIKEYNGINEEEKNITYEDLVKDLQVSPSVKKMIWRALVIVKEIKKVTNKSPKKVFIEMARDTQTEKKRTEKRKDKLLELYKNIKNDDSIKELEKNLKDKTNDDLKSKKLYLYYLQLGRCMYSGEVIRLEDLMNDNLYDIDHIYPQSKIKDDSFDNTVLVKKQINADKTNEYPIDKSIQNKCKAFWTSLKERGLMSNTKYERLTRTEGFSDDELAGFISRQIVETRQATKVLADLLKVIFGSDTRVIYVKAGLTSDFRQKFGIYKFRELNDYHHAHDGYLNIVTGNIYNTLFTDNPYNFIKDRKKDNRTYNLNKVFERENDVWNPDVMLSKIERYIYKIRPLFTRASYERKGKFYNIQYVKKGKNLISKKNNLNTEKYGGYSGVENSYFVIYLYKQKNKDIKKIDTIPVYLREKINSDKDIMDYLKEKNKIEGDIKILENRIKIGSKIRFENEIYYLKGKPDENRLSVGYMKQLILSKSSYEVMRKIIKNIEKLNLENTEEKLSKILKNSKNSKELTTKEINIKINTVYGELYEKISEKEFGKIFSTITIPLKEYLAKSNLEILEDFNKLDIFSKIRVLEEIFKVITKLDNFSLKDIGGHKAITNARISINKILASEDFCIINQSPTGLFEKKVFLDK

SEQ ID NO: 2166 - protein, 1359 aa, unidentified
  REGION 1..1359: note = Description of Unknown: Cas Enzyme sequence
MNNDYYLGLDVGTNSVGWAVTKESYEICKFKKKSMWGIRLFEQAKTARDRRLFRNNRRRLSRKKERIDLLQEIFSKAMAQKDETFFLRLNESRLHLEDKFVSEKYPLFVEKNYSDIDYYKEYPTIFHLRKALIENKREYDIRLVYLALHNILKYRGHFLIDGDLKGAKDFKFTFNQMLEILTDELEMPFELGVSQRQEFETILRDKNLAKSIKVKKLTGLFYLEKPNLDKEEYKRRKNIIEQVCKLIVGSKGDITKLFNINKEEVTKYSFSFVDTDYDTEIRPNLDYEIPKKSYLLDVIKSIYDWSVLIDILQNETYISFAKVKQYNKHKENLGKLKMIILKYCDKSEYNDFFNNEKGKHNYASYIGSVKKNRKKYTVKKTGEEEFYKKLQKILQNIQPEESDQQIWEELIEETKLQHLLPLQKSKDNASIPHQIYEAELRKILENASEYLPFLKENDEMELSNADKIIRIFLHRVPYYVGPLSNRHKKEGANVWAVRREGRENTRIYPWNMEQVIDYEKSNEVFIRRMTNKCTYLIGEDVLPKNSLLYSKYMVLNELNNLKVYGKKIPEDTKQEIFRELFMNKYKVTGKAIQQYLKRYIPEITIEDLSGFDQEFKSSLKSYLDFKKQVFGDDIEEIEIQNMVEDIIRWITIYGNDKKMLHNMIEKVYPNRLTVEQLRKINSLRYSGWGNFSKKFLKGTDGTDKETGEVFTVIETLWNKNDNLMQLLSSRYTFMEEVENHNNVLRGEIKDISYETLVKDLCVSPANKRAIWQTIQLAEEIKSIMGHAPKRIFVEMARGEEKIKQKTKSRKSQLLELYGNCKEDTRNWLKEIENRDEREFNSLKLYLYYTQMGKCMYTGEPIDLEELMSGNSAWDRDHIYPQSRIKDDSLDNLVLVKKTINAKKTNEMLSSGIQKKMKSFWESLLELKLISRKKYDRLTRTGEFTDEELAGFINRQLVETRQSTKAIAEIFKAIYPKTDIVYVKARLISDFRKNPLNCLKSRRVNDYHHAKDAYLSIVVGNVYDSKFSSNPIQWMKQNRYTNYSISRVFDYDVYRGASLVWKASEKNGEKGTIDRVRKTMEKNNILYTEYSYCEKGELFDAMPVNKNRGSKIPLKAGLSTNKYGGYLRAKTAYFSLVEFENKKGKKQKLIIAVPLFIDKMLDYKPGAFIEYCQELQEMRNVRIIVPKIKKNSLFIVNGFPMRIRGESSKDLLFKGNLQLKVSAKIEKYIRNMEKYLEKNSQFAIDEKLDNISHEVADTVFDYLLEKMNTSYLNRPSNQYHNLYKNRELFYTANNLSDKVKFINEMITLLRCDIETKADLSFISGSVNAGSITFNKNTLSKVKVELVNQSVTGLFENRIQL

SEQ ID NO: 2167 - protein, 1245 aa, unidentified
  REGION 1..1245: note = Description of Unknown: Cas Enzyme sequence
MKNEKNTTLGLDLGIASVGWCLFENDEQENPKRIIDLGSFVFNQIENKKTGQTENIARRQKRSMRRQRRRKVRRLEAGRYLFQNELDVDFRSLNLSQIGNPLELKIKGLHEKLTKEELCVALYHYLKYRGFKSNRKSDKNAEDTKLLEKFKATAEGIQPGQYITEYLCSKANMSDRVKKGIKIHNTSEEYNLTVTRDLYEKEINALLDKQITCGVIGSDFKNKFLTLFNRQRDFSDGPGKESPFSFSIEAMIGESQYSKEGQNSKRAPKDSFTAQKFIFLSSLCNFRYIPAKADPNGEIDFKYIGLEANQIKRASALLKEKQIIKYKDILKVTQIEPLKIKNLTLSKKEYKNVFDKLEKEKGITKQNLNEENQKFLSDAIEKAKLDKTFFKRTDFLNEYFKKLKEDKFKDIKGELEKEDIIDSISYILLIAKTDEKIKEKAEEENLTNLISFISELPNSKNVIDLSLDVCKDINPELEKGVSYTNALENKGYKSKKDKHTQKNGKLPDIDTALSELNIKLKNPVVKHSLVQLRKVINAVVDKYGAPSKYCLELGRELKKGFNERKEIKAQQDSNRYDNISAKLEILEKYPTTFRSIQSINKDALLKYKLFKEQRGISPYSNKQIRESDLFNNNYYQIDHILPYSRSFDDSFSNKVLVETELNQNKGNKTPFECSSIFSEVKSFISSHYVESNKREKLLTQKIDENNQKFIGKDAGDNSYIATIARDLIDAFLLPEEKYCQTVSGAITAKMRSLYRLGGKKHSFYPNSSFETHYISKPLTSYKYESINVNENGIELKCTNISKPYEVLLNKKSGKKELSPHQQKENELLNYFKNNIDIVNERFSKCINEPIEKLSEISKISNGADDLTKLSEACIFVIGKILNKIQKEIEEKDRSNDLHHAVDAALIGCVNAKTVKRISDYYKNEEVDELITSGNTNFSLPLPYLDFDKEVMLRVYERNINKLIENLKVLPMYQAEQLDVRNIHVLIPARLPDKDIKGAISKETIFGLTRKGELTSTISTKEIKQDQLEKICDKDDGNKAVKESIEKWIKEKKPTEWPLLEKKNTPIKKVKIIKYDDTRGKVDLSHGRFAENDSCIRVRIYKSKNANDKKIYMVPIYYYQLLREETIREQKKKNRQMLPEPVYQLMASPNDIQEMTAKQINEKYILINELNRSSLLEIEKTDGKKCLVYSGGLSNAKLEVYSLLGDNYDLATSGVIGSPKVERAVVYVNNVKTIKVRSISPLGIIS

SEQ ID NO: 2168 - protein, 1065 aa, unidentified
  REGION 1..1065: note = Description of Unknown: Cas Enzyme sequence
MRLVLGLDIGIASVGYGIIDIETGDIITSGVRLFTEADKKNNEGRRSFRSGRRLLRRRKLRKEELKELLKDNGVYEWDSSLDPYICRVKGLNEKLSNAELTTSLLHICKHRGSSLETVEDENNKEDGLKNVLTENDNLIKQGKYVCEIQLERKEKKGKIRGINNNFRTKDYDSELLKILSNQGLDENINKKIEDIITRRRHFSVGPGSFISQTIYGQVYNEDGTVRENMIEKMTGKCSVYPDQLRSPKSAPSAIFFNLLNDLNNLRVADEPIDVDKKQELIKEAFEKKSLTPLKVAKVLGVNLDDIEGFRKNEKSLPILTDLADFKIMVNIFEKNGYIIKVEDLELLDEIAVIITKTKVKKERIDEIKIKGVVNEKILDELSDITRFTGYHSLSLKAIRELNKELYETTYNQMEILSLSNHFEFIHSNFSQKGKKKIAINQDAILSPVAMRSYCQAIKVVNAARKKYGEFEAIVVETTRDKNSYEEKKRIKEENDFFAELNKNAEELVKGYNVKLDGKLRTKLRLYLEQDCKTGYLQEPIDLPLLIKDPTAYEIDHIIPISISLDDSYNNKTLVTRYENQKKGNNTPIKAYESDNFLNKDVNEYKKFIASIRNKQSGISWKKYNNYMYSKDITKYEVMKEFIARNLVDTSYANRLVFNTLTRYFKDNGINTKVHTIRGSVTSAFRKLVKGLEKDRDKDYSHHAIDALIVASVKKMNLFDKLLTDFSIADDGKNVIINKDTGEISKIDDDLYFKDAPFLKFLKSLLRYKVTDYSYQIDTKPNRSIADQTIYSTRNVDGKDYTVKKIKNIYDPKATTLADDIVNGVTGKYLMEKNDSQTYQKIVDIVNYYAKEYRGSDKLKDDKGKKKFVTNPLKEHLDETGEYITKYSVNNKGPVITSMRYFDGELGSHIDISQNYKNIGDKKVVLLQISPYRTDFYKDEGIYKFVTVRYSNIKYYKKDDSFVINEQWYLQEKRKKAISENAEFCFSMHHNEYIEIKSSDECNLYRFTATNNDKANTIEVKEIDRYEKKQNIKTIGKKIVELKKYSCDSLGQLREVKNARLKLRLK

SEQ ID NO: 2169 - protein, 1497 aa, unidentified
  REGION 1..1497: note = Description of Unknown: Cas Enzyme sequence
MQTKNYTVSLDIGTNSVGWAVLNQDFTLAKGNKRITSTIGGNSRTRTNLWGVRLFDEADTAETARSKRGMRRRIERRKKRLKYLREIFEPYMGFDPSFFIRMEESFFQKDDTDNKTIDTSYPLFQGTTGEGESFVNEKDYYKTYPTIYHLRQRLIQDCTQADIRLVYLALHHILKFRGHFVNQGQVFNLENINVTTSLEELLTTYNNLQGEEFAFSYESQYLTQANTILTNRNTSKSKKAYDMASLYSVADKDEYYDRYEGTVSKTKKWLEDKDKQQKALFTAIVGNGIDISKIFANEDYNNKNNDEMPKHDDFKYSREDFEDKLAKLEALITPTEYEILALGKKVYEAIVLCNILTASTLSASMVQKFCNHKVQLSQLKAIAKNISNNMWHKIFKKDGLYTAFIEGVGNPAKVTNRDDSKKARRKKFNKVTNRDDFYKALREAFNIDTSKIRNKDDMDAFHNSVLEQLQSKATIDPQHHLALAQMAVDMELETYLPKQRMSDNGAIPYQVHEYELKKIIENQKQYYPFLGEVVQVEEEDDEGKKSYKEEYKIQTLMKFRIPYYVGPLTHATHGKEGERKTDKSRFAWMQKKPGMESINITPWNFNQVVDKERSASEFIERMTSFCTYLPHEKVLPDNSLTYQEFKIYNELIISGWKDNKGKKHYFTPEMRAKIIDCLFKKHKKVTAEKMTEFLDSYGYAHIKPHDLFGIDVVAKSPSYNTSYSTYIDLMRCEISEQTIEEHRREFEQIIKWITIFEDKKILKKTIIQANQNEWDNFLTPPQIKELTRLRYTGWGRMSAKFLTGICHSNGKTILQNLKEENYNNLMRLIEDDKIKEAIQEAEVEGRDVKALEYGLVEDLAGSPALKKGIWQSLKIIQELEEYLGRENISKVVIEMARSEGGSRTKTRKRQLEELYARFTEKTDGESIQREVQVNLDETDQNVIQKSERHFLYFLQNGKCMYSGKSLDISDLSSYEVDHIIPQTYIKDDSFDNKVLVLRTENQNKGGDVPSQEIIRKMKWMWELLAKAGMVSQRKLANLKLGKISDEQKEGFINRQLVETRQITKHVANILTSHFAETGIEVLTPKAGLTNQLREGVLYIPTSEFDFKNEIDKGTHFEYDGREYLPGGGGEFIESSYNNSNLVKVHFHEGYKKNRNINDYHHAHDAYLNGIVANYIYHTRPDLKNMWVYGRYQRKAERETGRTASQRNAYFKQLLTSMAYPQWELLYDDEYIHLDRDQTFAMIRKTLGYRNVNITKKIEMQLGKFGDESVYRKGDANAVPAKRNQDPTRYGGTKGAISAFTVVIRNKKGEIKPVSIPAMLANDYKKTSDKLDMVKRLYPKDGVQEIVLPVVPKHTKYILPNGAPRLLASFQEAQSGSQMPTMSIATETSTPEEMLESYDVLAEFIAKNKLFTESKISLLTTTMREYFLTMDRTVDEKMAVIKEMQRVTKGSNQGLKALQKAGLGTTAQQLKSGNAIEVNTTLIHQSLTGLYETRITLQ

SEQ ID NO: 2170 - protein, 1153 aa, unidentified
  REGION 1..1153: note = Description of Unknown: Cas Enzyme sequence
MGNYYLGLDVGIGSIGWSVINIEKKRIEDFGVRLFDSGEDVKNKNSFCQQRRSKRGIRRLYRRRSHRKMRLKNYLSVIGLTTPEKINYYFETADINVIQLRYKGLSEKLTPEEIAACLIHICNNRGYRDFYEVNIDDIEDPDERKEYEEEHAAIGNIHRLMNEGRYRTPAEMIFKCSEFDEPNSVYRKYHNSPSSEKHYLLSRNMLEEEVGLILEQQSKYYDILDNKAIASIKDIIFAQRDFETGPGNENDKYRKFTGYLDSLGKCQFLQDQDRGCRFTVIADIYAFVNVLSQYTYTNNRGESVFDTSFANDLINSALKNGFMDKRELKAIAKSYHIEISDKNSDTSLTKCFKYIKVVKPIFERYGYDWDKLIENYTDIDNNILNRIGIVLSQAQTPKRRREKLKALNIGLDDGLINELTKLKLSGTANVSYKYMQGSIDAFCEGDIYGKYQAKFNREIPDIDENAKPKKLPPFKNEDDCEFFKNPVVFRAINETRKLINALIDRYGYPAAVNIETADELNKTFEDRAKDTKRNNDNQKENDRIVKEIIECIKCDEVHARHLIEKYKLWEAQEGKCLYSGETITKEDMLRDKDKLFEVDHIVPYSLILDNTINNKALVYTKENQDKGQRTPLMYMNKNQADDYRKRVNAMLKNKKCSKKKYRYLMLENLDDSELLSEWKSRNLNDTRYICKYLVNYLRKNLRFDRSYEPSDKDDIKIRDYSRVFAVKSRFTSTFRRWWLNEKTWGRYDKAELKKLTYLDHAADAIVIANCRPEYVILAGEKMKLNRMYQQAGKKITPEYEQSKNACIDSLYKYYRMDRRTAERLLSGHGRLTPIIPNLSEEVDKRLWDKNIYEQFWKRDDDKKSCEELYRENVTSLYRDDPKFAAALNMPVVSIKPDHKYRGSVTTDNAISVKEIEGKMIQLSRKSISAITVKDIDKIYTDDRILIDSLKTVFEHGNYKDVGEYLKKTDQPFFITSNGMRVNKVTVKSTAPSRWLKKNIDDRNFSILDDRSYYCIELYKDSKGNNNLQGIAMSDIVHKNGKLWLKADFKYPDDYCTHVMYIFPGDYLRIKSISKKSGEQLKFEGYFKSIKNVNENSFRFISDNKPCAEDKRVSVAKRDIVIKLTVDLMGRVQGEKDGRGISCGEPLSLLKEKS

SEQ ID NO: 2171 - protein, 1151 aa, unidentified
  REGION 1..1151: note = Description of Unknown: Cas Enzyme sequence
MNYYLGLDIGIGSIGWAIINLDKERIENFGVRLFDTGEDHRKNERYSQQRRRYRGIRRLFRRRSHRKQRLKNYLNLIGFITETQINNYFETHENNVIKLRYNGLSEKLSPAELAACLIHICNNRGYKDFYDINIEEIDDPKERKEYEEEHKALNHINQLMKDEGYRTPAEMIYKNEEFDALNSVYRNYHNSAFSEQHNLVARNLLEKEVDLILWQQSNYYKCLDKSTISNIKNIIFAQRDFETGPGNENDKYRKFTGYLDSLGKCRFYKDMNRGCRFTVIADVYSLVNTLSQYNYVGADNNNALTSELANEIIDTALSNGSLSKRELNTIAKKYSVSINDNNSDTPITKCFKYIKTVKPIFEKSGYSWKELIENYTDTENNLLNKVGIVLSQSQTPKRRVAKLKAISPQIEDSLINDLAKQKFSGTTNVSYEYMIGSINAFCEGDVYGKFQATINKELPPVDESSKPSKLPPFKDEDNCEFFKNPVVFRAINETRKVINTIIGKYGYPRAVNIETADEVNKTFEDRNRDTARNRRNEKENDRIIKEIIDLTNYSPEKARSYIEKYKLWEAQEGKCLYSGTPIEKSDLLNDTAHLYEVDHIIPYSLILDNTLNNKALVLTAENQRKSQRTPLMYMESEQADAFRKRVNVMLKSKKCSKKKYQYLMLENLNDSELLSEWKSRNLNDTRYICKYLVNYLRSNLRFNTTNETDGIIQIKDNNRVFAVKSKFTSMFRRQWLNEATWGKQDKQDLKKITYLDHAVDAIVIANLRPEYVILAGEKQKLSRMYFQADKKITPEYEKSKKECIESLYRYYGMNKKESERLLSSHSSRLTPMIPGLCDEVDKRLWDKNIFKQFWNLDNFTDEEIEEKCEEIFKSNVLSYYKTDPEFARYLRMPVVSYKPDHKYRGKITDDNAISVKEINGIMMQLSKKEVNSITSKDIENIYTDDSALIEKLKSVLKDNDDKYTVSDYLSENDLPYFTDTAGRRINKVTLKSSAPARWLTKQISDNNYTLMNDRSYYCIELYEGKDGANHLLGITMSDIVHKNGKLWLRPDYDYPSDYSKHKMYIFTGDYIRVTTNKGKLKFEGYYKSVKSISRNQIYCISNNDPNSIVHSITKKDKCIKLSVDLLGSISGYNNGEGIKCGEPLSLLRAKN

SEQ ID NO: 2172 - protein, 1044 aa, unidentified
  REGION 1..1044: note = Description of Unknown: Cas Enzyme sequence
MKKANESLVLGLDLGTNSIGWALFGFDGDNPVRLVGMGSRIFEAGTEGDIEAGKDESRGVARRMARQIRRQGERRARRQSKVGRVLQAMGLLPEGDIDHSQARHEYFVTLDRTLRARHKKVNLEALPHVFPYWLRARALDNPLERDELGRAFYHLGQRRGFLSNRKASGKKDEEKSVVKQGIAELAAAIHETGARTLGEYLSRIDPSDPEQRRIRERWTARQMYEDEFNAIWDAQSKHHPEVLTPEWRKILHNALFRQRPLKLQHDLIGACPLEPDRKRAPMALPAAQRFRVLQKVNDLRVIAPDYSERPLNPEERTLLLDALDRQEEMTFGKLRKLLNLKAYVFNLENGGEEKLIGNRTSAKMYGIFGERWFRFTPAQREAVIQDIRCFEKDAALAKRGREHYGLDEETAKRFGEIELEDGYCSLSRQAIEKLLPLMEKGIAYKTAEKEVYGDPGPAIAVEMLPSVAEAVRQQLMPVLRNPVVNRVLTELRKVVNAIINKYGKPDKIRIEIARDMKKPRQERMKISRKMRDNEKSRQKAAKRIFEEIGVQNPSRDDIEKVLLAEECEWRCPYTGKTISMRTLLGDAPQFDVEHIIPFSRCLDNSFNNKTLCYHEENRSVKRNRTPHEAYGGDPARYQEILDRVAKFKGEGRDAKLRRFQMADLEDFEDFSTRMLNDTRYASTLAAKYLGLLYGAEYRKHIQVSTGVITKYLRDCWGLNKVLGDGGEKNREDHRHHAVDAVAIALTSPKTVKMLSDAAKHATEERRRQFGKVPPPWDRFLQDIQEAAGQIVVSHRVARKVNGRMHEDTFYSPQPSSDPAKPCVHVRKRVEALSKGEIEAIVDPIVRRQVKQRLDELDSDDPKKAFATAEKHPFIETGDGRRLPIHKVRIRKNAATFKIGKEHRVRHVTTDSNHHVEIIETTDKRGNVKWEGSVVSRYEAMRRLQNREPVIKRDHGNGRKFLFSLALNEVVQMKDTEGVVRQYRVAGVSQFSTGQIVIDVRELSDARRAVDVPREGRTRSPDTLRKSESIKFCATPLGELRRAND

SEQ ID NO: 2173 - protein, 1097 aa, unidentified
  REGION 1..1097: note = Description of Unknown: Cas Enzyme sequence
MDKKLILGLDIGITSVGWGIIDDSNKIVKAGVRLFEEADSEDNTKRRSFRSQRRLKNRRKLRILDMRQLLFDNKIIPVIDYKPKADPYHSRLKGLTCKLTADELASALIQYSKRRGSNLETVEETKNEESPKFILQKHDNMLHKEKHIVHLQIDALNQFGSIRGHENVYRTIQYENEIKQMLFVQEMSDKFTSSVLSIIRRRRHFSDGPGSLNSPTPYGRYRSVEQKIKHDLISSFTEIERNQYKKAKFTIHREGIDYLVLSSGDIINKQPLNLIEIMRGKCSIYPEELRAPKNALSAEIYNLLNDLNNLTIISQDNRKLSRDEKEKALQFLIHNGYFKPKGVKGLLKQLGFDLSDIKGFRVNNKNEPLISELEGYFKIRKALNDETNLDSFNNELYDTIAEILTSTLVIDERVKLLETLGLTPKSVKVLAELSGINGYHSFSLKALRILDNELLNNDYNAQQIIKLTDKLNNNNTLSLSDSVILSPVARRAQQEAFKVVDALMKTYGQFDRIVIETTRDKNSKEQAANIRDRQKKQEKSKIEAENELKELIGDTNIDVKPIMIQKLRLYKEQNGKCAYSGTQINLHKLITDPKAYEVDHIIPFSISLDDSYHNKVLITPLANQIKGNLTPFSYFKSGKVDSRFLIQNYETFKEIVLNNPNISRNKKANLLDERDITKYDVMKEFINRNLVDTSYAIKAFMMTLKQYFENHNIETTVTTIKGKQTDLFRNIAKTQWYRDNPDSNDNNPFNKDRNIYSHHAIDALIIAGLSNQKLFSYLFNVTKNESGIVHNPKTGELFEADPKKDSKFIMFCKSISNLSDTDIQFSWKKDTKPNRSISDQTIYSTRSFGGTHYVIKKYKNIYEMKKDDLAKIFEDDKKKQNLLMYMHDKVSYDHIEKAYLQYRHEPKPFLAYQQNHGKLRKHGKIDGPVITDLKYKEDQLGNSIDITKSRSDKKKVVLLQVSPYRIDLYKSDDGEYKFITLRYSNFKKQGKKYILSQSFYTNKLSEKNIDSKYQFLYSLHRNEIVEIVTFEGLSKFYRFIGTNNDFKNMIEVKSINIKDDKQVMLSIGKKIKSIQKYHVNTIGKLFVANKEVLKLEI

SEQ ID NO: 2174 - protein, 1015 aa, unidentified
  REGION 1..1015: note = Description of Unknown: Cas Enzyme sequence
MGKLRYRLALDLGSTSLGWAMVRLNQKSEPCAVIKAGARIFSDGRNPKDGSSLAVTRREARAMRRRRDRLLKRKARMMQTLLRHGFFPQDESARKALEKTDPYTLRAKGLKEALTPEEFARALFHINQRRGFKSNRKTDKKDNDSGALKTAISQLRQAMTDTGCRTVGEWLFERQKKKLPLRARYREKRIARDDGKTKIEKSYDLYIDRAMIEQEFDTLWSKQAEINPSKFNETARAELKDCLLHQRPLKPVKPGRCTLMPEEERAPLALPSQQRFRIYQEVNNLRRLGEGLSENSLTLEQRNKIVDALELNSKRTFTQLRKLLGFSDSFNLEDEKRTELKGNSTSTILSKSDMFGEKWSEFLESKQDEIVMQLLKEENETRLVNWLQSETGVDEETAEHLAKAQLAEGYGSLSLKALNKILPHLRDEVVTYDKAVLAAGFDHHSNISHAATGEILSQLPYYGEYLQRHVGFGTGAPEDHPEKRFGKIANPTVHIGLNQVRTVVNALLKRYGHPSEVIVEVARDLKQSQEQRKEEQKRQADNQKRNERMRRQIAELVKTSAERVKTADLQKMILWEELSFNVADRRCPYSGVQISVAMLFTDQVEIEHILPFSQTLDDSLNNKTVATRQANRIKGNRTPWDAKEDFVKQGWGFEDMLERASLMPKGKRYRFAEDGYQKWLREDKGFLARALNDTRHLSRVAREYLSLICPQDTRVIPGQMTAMLRGKFGLNDILGLDGEKNRNDHRHHAVDACVIAVTDQGMLQRFAKASASAREKQLNKLVETMPLPWATYREHVGRAIHNIWVSHKPDHGYEGAMHNDTAYGLLGNGRVRVHKMVDGIRTLEESALKVIEFSEPKLSSRHGSLSDGQPRPYKGYKGDSNYCMEIVRNEKGGWEGEVISTFEAYQVVRQHGLSRLSHPKLSLSDRPLVMRLMIDDFIKFEISAGKEITARIATISGNGQIFMAAHCESNVDARNRNKTDSFRYVSKMPGSLKTARGRRVTISPIGELRDFGFTN

SEQ ID NO: 2175 - protein, 1408 aa, unidentified
  REGION 1..1408: note = Description of Unknown: Cas Enzyme sequence
MKTNKKIYKDNQYTLSIDPGLNNVGWALFDEENKKMVEMGVRKFEPAKEAKISRLKRSARRNNGRKKWRKQQLKQAFIDFNLISEEEFKNSQFYEFHPEQYKVAGVKNLMDLRCYALQNKVTYQELFQCIYNILKYRGNFLRDDIDFENGESLTEELLIQEITNFMIKSLQLDIDNLDKLKESISTMCNQNIDLKEIPYAEISDDKVSQKSIENVFKALKDQKFNPFMIEDDPILIDEEEGKSIIPEAKTKTIYMKSVQKCGDLSNRFEQLLNITDSYRLYKVLNGEKYICTAYKKKLDRVADYYSFKDSPEGCSKYSDIESAKIEEEITYITNNMNATKGKPEKYGYTRKNPRGPIHVIHNVLNRYPNGLLVKEAVDILRTQQNYYGKEVVSDEFIDVIRYILKARIPYYIGPLSETAKNQWCTKTGKFKYSYSYTIEHMDGVDEESSIKDWKDRMRGHCTYLPEAFALPKGSFVAETLLILNELNVLTAIDKNNNTYYLTTNDKIKVFDYLFLDENHYGDVKYKEICDLLDLEYFGPKNHKSQVKTFKQNYTLYKSITSICTTLKLHSIIDLFSTKFQENQLKTIEEIVLNLNLYDEKKHKYQALTKMGISDENSKKLSALNSKKFYGLSEKFVLKTPLNKDGRSLLEILFEDIQPGYTNEMMTAITNACDMNGNPISFIANKYEAAFKELEKNGELELNFNSLLEVMNKTGNGFQIPASRPVLRSINQMMKVIQAVYTYYGVPKRIVLEIPRDMSGKNTNHEMPAKHYKTMEALHQDIMKQCKDKDHPRKTCIDQKWNDLKDFEVNSKNRVKLELYLRQNGMDMITGEKISLNELENYEIDHILPRGFGDDSMDDKILIRFAPNALKKDRTPLMWITDPTDPVINKSGKEITADQYINRVNELFDMKLISENKKRRLLLKDTEDLDRFINQNLVDTRYITREMIGILKAYNHVNGYPTKVIALKPAFTKNYSNAFDIYKNRDLGLQHHALDVAVLGITDIMLNKLFPNYESGRISTSFAKHHQMLADVGNDKKLRDSTKYIIRKMYEKVFGDSPLDYGSLVYTCKNTMPLYSQKSNRNWKGEKFPASRRVPYQKYDIKNGNIVGVYDDKSEENIGKQNSEVLRLFEINNKNHAFDSVNCVAYDIYRIPEKKNNKVIWNNKGIHIPKCIVNEDGTIQKDKYIKLIKEYYGLGDSLIDENGDLVMAYFKIRLYKNDLVGNTEKHEIKDLILGSIADGRIELNKIDCFEYQKIAQKKASLIKMVIDNQGSSKYDIHNYKEYQEYECKEEILRDMIFDNMTIENKQFASLLYDKISNNKKLDWANINKICWILAYYQQFINEITGKKEFNTGRGIGTLKKDENINYFKLKTSPLGVRFNTEKNQWTGPVGYENAFKIIKKEAFTWKITV

SEQ ID NO: 2176 - protein, 1386 aa, unidentified
  REGION 1..1386: note = Description of Unknown: Cas Enzyme sequence
MSKAKCKDKYYLGLDIGTNSIGWAATDEYYNLVRKRSTDLWGSYLFEEGKSKKDQRIFRSARRRNFRKKNMQRGFLEDIFEVEVSKVDPIFYQRLYDSFYHDEDKHIVQKNSIFNDSNFDDKGYYKKYPTNYHLRSELLHDNSKKDIRLLYLVILNMLKRRGHFLFKGELNASGVSLDSCFQELNEYLRDIFDLEIDEGKVIDIEKLLKNKSVTGNDKKKALQKMAIFNGDNKKQSDAIISAITGLTFDLKSLFVDDKFGKEDKISFSEYPEDKEDEFIKKLDSDYEFIELLQAIYNWSVFSTIWDQSQFKYLSDAMKDVYYQHKNDLKDLRKFIKKHIPEEYDNIFNKTVNKYDNYVAYAGKLVINKKKQVVNYRCNHEKFLKCLDKEIFIKAEKRLTSIGLEFSEWEKELQNRVKSGSFLVKQRGARNSTIPYQVNLKELKEILENQKCHHSFLLDMDEEGITNIQKIISIFEFRVPYYVGPLNSTHEELNGNSWMEKKMQARITPWNFDKIINVEVTAEKFINRMTNRCTYLYGEDVLPKHSLLFQKFVALNTINNLVVNNEKISVENKQKIYNELLEQKENVSFADIRKFLTIEGIIGKTDELAGVDKEDKSLRISLSTYHKFKKINILNTRMVDELVRVVALFGSERKMLSNILKKRYSDKLSNSQIDEISKFKMEGWGMLSRTFLNEIEAVRGSSGEVGTIMYFLWNSNDNLMQVLSRNYNFKEVIDDLNADVLSNDSLEKDIANMKLAPAVTKMVRKTFVSLISEICKINGGSPDTFFVETTRNEGEKKRTLSRHKQLIDLYKKCKQDSSQIFRKLENSTNNDLRSKKLYLYYIQQGKCMYSGECIDLEKLFDDLQYDIDHIYPRSKVKDDSIMNNLALVKKHINKGKSSDYPISEDIQDSMGKHWIYLLEQGFITREKYNRLVRKEALSAEEIAGFIERQLVETSQATKAVATLLKKHYPDSKVVYVKASHVSEFRKKYEFVKSREINDHHHAKDAYLNIVVGNVYNKKFANRRESAEEIANNKVSMNKMYDFDVKKAWTTIGENKSICIVKNTMSRNTVKVVREVKENSGGLFNQTINKKVVDFKKSIRIPLKSSKNLKRASKYGQFDNIDALKDFSKYGYYDSVSVSHNVLVKIKTKKGEELQIVPVFVYMRDLARKSLVEYCETVLGISDVEIIVPKIGYNTVFSINGRELAIAGKSNNNSYYNSTFQLVLDEETYNYIHKIGVFVSKMRESIKKEEDKYVYQNPYYTEKRKDNSVALINDKKLIEVYSILVRKFETSPHETVFGDGNNAYTKLISDEAHNKFVMLHLYDKCEIIVEMIKHLKCDAQLGKFDRIIGSNGARISLSNNFFNNDKYKKISIISNSPTGFYRKEVKIK

SEQ ID NO: 2177 - protein, 1062 aa, unidentified
  REGION 1..1062: note = Description of Unknown: Cas Enzyme sequence
MVTRLGLDIGTNSIGWCLFNLDLEGKPVGIRDMGVRIFSDGRDPKSGASLAVDRRDARAMRRRRDRYVRRRSALLEALIDTGLMPADSQDAKALVGCDPYALRAAALDEALNPYRLGRALFHLNQRRGFKSNRKAERKARDDKEGGKIAGGAKALDMVMHEVGARTYGEFLAGRDEKRVRMRADADGYDFYPERRHLEAEFDAIWAAQAPYYPALLTDAVRDRLRRIIFFQRPLKAPKVGGCTFFNEEERLPKAHPLFQERRLYEEVNQLEITKAGAPSRKLSLDQRDKIILKLKSAKTASFSGLFKLLKLADGENFNKASENRTGLIGDEISASFSDKKCFGDRWAHFEAGVQWSIIEAVAEEEDPVRLHDWLMASHGVSAEQAEAIGRVRLPEGHGRLGETASRKILAELKKDVVTYDKAVEAALGKSHSDFRTGEVVDQLPYYGEILSREIPPGSLDPNDDDEMRWGKITNPTVHIGLNQLRRLLNAIIKAHGRPDEIVVELARELKLGEKDKAEHNRRIGANTRAAEARSKKLLESGQRDSGSNRALLKLWEDLNPNNPLDRCCPFCGRHIGQLALFTDETEIEHIIPYSRSFDDSSANKVIAHRSCNREKGNKTPWEAWGHTERWTIIAEQVSRLHKSKQWRFAPDAMERFDQEGDFIARQLTDTQYLSRMARTYLSSLYPDTGGVYVIPGRMTAMLRRLWGLNELLPDHNYVENPHSGAPKNRLDHRHHAIDAAVVGVTTRSLLNEISKAAGRAEDQNLDKLFIDLPRPWEKFREDLRESLARIVVSHKADHGRKGVPAKGKDATAARLHNDTAYGLTGLTSDSGLPIVVHRVPLLSLKPADITDPIRIPDAALQRALWEATEGKSGKDFEAALVRFSRSDPVFKGIRHVRVREALKVIPIRDASGNAFKAYKGDANARFDVWRMPDGKWVSSWKDRDGKSHSGIISMFEAHQTGQPEQRPHPAAKRVLSLRQNDLVAVEPQGQPRKIMRVVKFSGGGQITFAEHHEAGPLKARDATSPDIDPFKYFYSSAGGLQKARARQIRIDELGRIFDPGPR

SEQ ID NO: 2178 - protein, 1066 aa, unidentified
  REGION 1..1066: note = Description of Unknown: Cas Enzyme sequence
MAYNLGIDIGIASVGFAGVDIQNQTILCCGAHIFEAAENPKDGASLAAPRREKRGMRRAIGRRAQRKKKIRALLAQHGLQDIESVDLSRNHPKTGTGNPPVTPWDLRKAALERKLTDAEFARVLFHIAKRRGFQSNRKGAEPNDTEGKKALSGAKELQEAMANAPTVGAYLSTLPKKRNGDGSYDRFVTRDLLRQEIRKIFEAQKKFGNAKATLEFMTAYAGDGDYKKRNTIEGDGIAFYQKPLQSSEHLVGTCSLTGEKRAPKFSYTAELFVLWSKLNNARIKDKSDNERPLTKDEKNSLANLAHKNSGGVSYKQARKELGLSDDERFNISYRKTKDEDNSREKIREATEKTAGNFLRMPGYHALKAALETDSDADWQKWLGADRNKLDNIARILSFYEDQKQIDEMLSALGLNDDQRRKLSSITSFSKSVDLSLKAIRDILPYMQDGLTYDKACKEAGYDHSRKENKGLAKVPPFDDIRNPVVNRALAQARKVINAVIRKHGMPETIIIELARDVGRNFKDRKDIEREQKKNQAYREEAKKHVAEILGIIEDNVSGEDILKYRLWKEQDGHCPYSGVYITPENLRDSVATQIDHIIPYSRSWNDSYMNKILCLTSENQNKGNDTPVEYFRRTGKNLDSLEVFSRQLPHKKAETLLTENFDGEKENKWKDRALNDTRYMARALKNHLEQSLSLGDGNRVQTRNGALTANLRGAWGFPDKNRRNDRHHALDAIVLAVSTQGQVKRLADWNKYEARRKNPAERTLPPAPWETFHRDVMNAVHGSKNEQGERTGGIFVSRMPVRKITGAAHQETIRSIRKSDGKIIQRVKLSGLKSAMLENLVDKDRRNRNLYNILKERLDAHKGDPQKAFAEPVKLTGKNGPDKAAVINSVRIETSEKSGIEINEGLASNGDMVRVDVFQKDGKFQLVPVYVHHFAQKQLPNKAIVAFKDEKDWLEVSDADFLFSLYKNDLVFIKSKKEEFLGYYNGTHRGTGNINIRTHDSDPSFGKDGVKEGIGVKTLLAFHKYSVDYFRDKYRITKEQRLGVAHGDDSEPGETEPLERAVAVGE

SEQ ID NO: 2179 - protein, 1048 aa, unidentified
  REGION 1..1048: note = Description of Unknown: Cas Enzyme sequence
MAYNLGIDIGIASIGFAAVDLEAQKILLSGAHIFEAAENPKTGASLATPRRTARGQRRVINRRAKRKKAIRQLFRDHGFDHVETIDQPLTQTRGQFYPEQFGPESSKQDKNATISVWDFRNDALKRQLTDAEFARVLFHIAKRRGFQSNRKGAEANDIEGRKALSGAKELQDAMAREGHATIGAHLAAKDKKRNGDGTYENFVERNLLRHEVRKIFESQRAFGFEKATQELEAQFVEIAFFQRPLQSSAHLIGFCSLEPAERRAPKFSHTAELFVLWSKLNNLRIKDQSGGERSLTQAEKETLAAKAHTLKSLSYVQIRKQLELTDQERFNISYRKVKDTDTSWEAIRETTEKKDFISLSGYHAIKDALAIPSEIDWRAWLSSNRDTMDETARLLSVLEDAAQIENELGKLPLTHAQITRLSEINHFKKTVDLSLKALRTIEPHMQQGLTYDKACLAAGYDHSQKINQGLDELPPFEDIRNPVVNRALAQSRKIINAVLRHADLRNHGKPQTIIIELARDVGKNFQDRKAIEQEQKKNEEYRDAAKKHVGEILGIQPENVSGEDILKYRLWKEQDAFCPYSGVYISPEMLRDSLATQIDHIIPYSRSWNDSYMNKILCLTSENQNKGNDTPREYFSRTGLDIDILVAYASRLPRKKAENLLLENFDEEKAAEWKSRAMNDTRYIARALKNHLEQSLDLGKGNRVQTRNGALTAHLRGAWGFPDKDRRNDRHHALDAIVLACSTQSMVQALTNWNKYEARRKNPAARVYPPKPWENFRDDAKAVIESVFVSRMPVRRITGAAHDDTIRSIKKLPNGEKQILQRVKLKELKAAKLENLVDKERNLVLYRLLKERLGAYRDDAKKAFAEPIFMPVKDSNTTKAPRIKSVRLVTSEKSGIEINHGFASNGDMVRVDVFKQDGKFHLVPIYVYHFTKTTLPNRAIARSKSEDQWTEVDDRSFLFSLHKNDYVNLIDKKGKYEGYYVCCDRYDASIDIKAHDSDSNFGANGQKGFGTKALKDIQKYSVDFFGNKTRIIKETRLGLANDSDSEPS

SEQ ID NO: 2180 - protein, 1206 aa, unidentified
  REGION 1..1206: note = Description of Unknown: Cas Enzyme sequence
MPPLGKPYGGKNYAFNFRDLTPRGTRPPYHSNASDTVILCIEKQLATLYCISQDIYMVVKKFLWGNSLMTYTLGIDIGIASVGFAGVNQDQKKILFCGVHIFEAAENPKDGASLATPRREKRGMRRVTGRRSQRKKQIRALLARHGLKDIESIDLSKKEAVTLSPWELRKAALERKLEDGEFARVLFHIAKRRGFQSNKKGNTEENDTEGKKVISGAIELEENAFKSGAKTIAAYLATQPKKRNGDGDYTNSIKRDAVREEIKLIFESQRKYGNEKATEELRFEYAGSGRKEERNTREGDGIAFFQRPLKSSEELVGECTFEAPEKRAPKFSYSAELFVMWSRLNNTRIKYKNGHDPFLTQEQKNKLVDLVHKQKEVTYKQAREKLDLSDDESFNISYRQVGENDDTPEKKRATAEKRVFLSLAGYHTLKEALSPDSERDWDIWRNQRRDDLDDIARVVTYEQDQDTRQSKLTKYDLIETQIQHLRKIEHFSKTVDLSLMAIKKILPYMEKEVITEDGEIIHGYDHAWRKIYGKPENKALELVPKFKDIPNPVVNRALAQTRKVINACIRKHGMPKKIIVELAREVGKPMNGYWVDKNGKKKLGKGNVNHGDRYIKGRRDIEKEQAKNWEKRRSAAIAVAIELGINPDLVSGGDILKHRLWEEQRHACIYCGNIIGAEKFKAADETQIDHILPYAKSHDDSYMNKVLVHKNCNQIKGDSIPFEKWSADTARWEKIVACASVLPKDKQERILMEEFDAREQGWKDRALNDTRYMAKELRNHLKDNLACKVDARNGAITAHLRGIWGFTDEKLNEIINILSSDKDEKDVTKNLSSLGLQDYHVKAALRIRDMDQANLKKALRGLINYKDRTNDRHHALDAIVIACSTEAMVQDVAKHNRYNKEKKHFPTPWPDTFRDDALAAVYGEEGEDGIRRGGIFVSRMPVRKISGAAHQETIRSIRKPDGKVIQRVKLKSLKLSTLENLVDRQRNIKLYNLLKERLEAHGDKPEKAFAEVIYMPVNDPSKPAPRVNSVRIETNEKSGIIINEGLASNGDMVRVDVFQVNGKFQLVPIYIHHFVQKKLPNRAIIAFKDEKDWLEVSDEDFIFSLYKNDLVRIKSKKEDFLGYYNGTHRGTGNINIRAHDSDPSFGKEGVKEGVGVKTLLAFEKYSVDYFGNKHRIVKEQRLGVAQCDDPECGGAVPLEGAVEAAE

SEQ ID NO: 2181 - protein, 1087 aa, unidentified
  REGION 1..1087: note = Description of Unknown: Cas Enzyme sequence
MKYKIGLDIGITSIGWAIINLDIPRIEDLGVRIFDRAENPQTGESLALPRRLARSARRRLRRRKHRLERIRRLLIREGVLTKEELDKLFEEKHEIGVWQLRVEALDRKLNNDELARVLLHLAKRRGFKSNRKSERSNKENSTMLKHIEENRVILSGYRTVGEMIVKDPKFTLHKRNKGENYTNTIARDDLEREIRLIFSKQREFGNMSCTEEFENEYTALWASQRPFASKDDIEKKVGLCTFEPKEKRAPKATYTFQSFIAWEHINKLRLVSPSGARGLTDEERHLLYEQAFLKNKITYHDIRTLLNLPDDTYFKGIVYDRNMPLKQNETIRFLELDAYHQIRKTIDKVYGKGKSSSFLPIDFDTFGYALTLFKDDADIRSYLRNEYEQNGKRMPNLADKAYDNELIEELLSLSFTKFGHLSLKALHNMLPYMEQGEVYSSACEQAGYTFTGPKKKQKTGLLPTIPPIANPVVMRALTQARKVVNAIIKKYGSPVSIHIELARDLSQTFDERRKTKREQDENRKKNETAIRQLIEYGLTLNPTGLDIVKFKLWSEQNGRCAYSLQPIEIERLLEPGYTEVDHVIPYSRSLDDSYTNKVLVLTKENREKGNRIPAEYLGVGTERWQQFETFVLTNKQFSKKKRDRLLRLHYDESEETEFKNRNLNDTRYISRFFANFIREHLKFADSDNKQKVYTVNGRITAHLRSRWDFNKNREESDLHHAVDAAIVACTTPSDIARVTAFYQRREQNKELAQKTEPQFPQPWPHFADELRARLSKHPKESIKALNLGNYDNEKLESLQPVFVSRMPKRSVTGAAHQETLRRYIGIDERSGKIQTVVKTKLSEIKLDASGHFPMYGKESDPRTYEAIRQRLLEHNNDPKKAFQKPLYKPKKNGEPGPIIRTVKIIDTKNQVIPLNNGRTVAYNSNIIRVDVFEKDGKYYCVPIYTMDMMKGILPNKAIEPNKPYSEWKEMTEDYTFRFSLYPNDLIRIELPREKAIKTTAGEEIKIKDFFAYYKTIHSGTGGMELVSHDRGFSLSGIGSRTLKRFEKYQVDVLGNIYKVRGEKRVGLASSSHPKAGETIRSLQSTRD

SEQ ID NO: 2182 - protein, 1217 aa, unidentified
  REGION 1..1217: note = Description of Unknown: Cas Enzyme sequence
MKYNYVLGLDIGISSVGWGLLALDENKNPYKIIDVGSRIFSPGEVEKTGDSKAKERREKRGTRRVIRRREFRLDRVRNLLYEKGYLKGNITSNIVSVKNEELTTLFNNMINNYYKNKDTNPYKLKVEALNRKLTNDELSIILVHYAKKRGYKSNREESNNNDNGKVKEAIKENTNLMEEKKYRTISEMYINDEKFKNKIKNGPDDYKLSVTNEMYLEEINKVLDSQIGFGLIDDNFKNEYLEIYNSRRHYSEGPGYYYEKDANGNKIKVRSPYGGDLIKKMTGICSFDKKARAPKYAFSSELFVSISKLVNLRYKIDDDSYKQLTKEQINELIDEAKNKNKVTYKSLIKILGIENIKVKDLNLSKSEYIKVIDELKKKLNISKEEIIDIYSLDEENKKIYNDIYNEKLFSKTIIEFKGYNLLKKAITLSYNSDIWNDVKDNIEFLDELALYCTDYKVNNEIQEHIHNSLIIDSRFDDSNFVENLPNFKDHLMLSTDIIRKLIPIMLEGITYDKAMDKIGYNHSNLYKDTIKEDLLVPVYVSKNITNQRVIRSLTQARKVINAIIKKYGSPKIINIETARELAKTQKERRIIEKNQQDKQYENERIKKHLVELGLFSDESKITGNDLLKYKLWQEQKEFCGYSMKKIKLEDLFSNNIVQIDHILPYSRTYNDNYLNKTLVYTKYNQDKGNKTPYEWFGKTDKWQEYESLINNLSISQNKKDNYLLKNLDQDTEREMREQNLNDTKYISRELSSLIKAYLNVDEVNVFPGAITAKLRARWGFNRLTHSYISKTYIMPEDMKKGINKDRDNHLHHAMDALVIASITKSLQQKITLYEKFSRYVDGITRNELDKISTGNINNDLYNYYDEETGEIKELELREYIKNQVAQNNIYFSKHNVSKLIFPTPYNNFVEEAKLRVYERDLEVLKWNLNNLGTYTSSELNRIHILTPSIAKNKISGRLHEETYYGLKEVGAGDDKVTYKTLKTPISKVKKKDLDNIPDCKGGSKDIYNALVKWFGNCETGEEALKMHDGKYPINSNDKEQKEIRKIKVYTKYNDTGHIVNNSNVEKGGIYRIDIFKSKDKGDNKLYFTAYDIFEIEQIKEYEKGKNINFSIKLEYGQGKNNEIILYEDVTKKYDLIMSIYKNDLIRIKTKTGNKSTAYVVGFSGGKLEIKSTIGDGYDIISNNNIFDKRMERYRVTSSTIVKIDKLSISILGEISGL

SEQ ID NO: 2183 - protein, 1067 aa, unidentified
  REGION 1..1067: note = Description of Unknown: Cas Enzyme sequence
MITLGLDLGHTSIGWTLADTEKGKILDGGVQVFETPEDEKNRTLASIRRDKRSARINNKHHKKRILNIKKLCSSYGLVDKNLLITPKNGIAPLFKKGIKKDSSLKLRTKGLDELLDGKELTRVILHIANRRGFKYDIDEESDEDAGKIKEAQGALKEEFLATNYRTYGEFLYKEYELKGKKTRNRVKKDGSSDYKFSIHRDDLEYELRAIFAKQQELKSPYVTDEFRDKVLIELLFVHEPKSLKRMIGKCSLMKGEKRASKALYSSELFVSRNILINLRVKEPEEEEYRALSSNEIEALLKAGHQKKIGKKDAKTILNISQKSIFKGDEDDNLSHIVHFPSLLRMKDSIGDRVLFEKLFSDLDLYENIVDILTYERSSLRRKTKIEELLKRSSFSLDEQRLIYQKIKTISFSGYLSISTKAVKRILPYLENGLFYSDAIEEENLKIEVEPQSYLPPLIDTDLMIPNPIVIRAITKSRHLINAILKKYREIYNDKEWTFDRLNIELAREINTKNEKKEITTAQKIDRNNKQKAVDFILENCGENYITSKNIEKVRLWQQQDEICLYSFKQISAEQMVSEIINKGDAFERDHVLPISRSSDDSISNKVLVLSTENQKKSNRTPYEYFGTDKQRWEKFENYIRSKEVYNKLTKAKVGKLLMKDFANKEQEFLARHLNDTRIISKTVKNYIEKYLKFKNSTYERRVYVVSGKLTNTLRHQWGLESKNRDNHYHHFEDAVLIAFSNNSIINRLSKYYHALETYKREEKDKPKFTKPYDNFVDDINTMIEKINVVRQPKIKNSGKVFHDNHKKGGILKNAEGSMVRVDVFKDLKKEKYYLIPLYLKDLNKPLPTKFITAGKKEWEEFNPSKHRFVFSLYPNDLIEIKTKTDTIRGYYVSTDASTANITIQSMDNIADAIFTKEIIKYTLRISIDNILDSDSRKKEIENISKLNTIKKKKPNGTLTLMMDIKINDIKESKSKKSNLSLILDELQQNYSIEEIRNNTKELDLPTNIKNDNEIKLTLDFNTDYDNRALRGTGVKTKTLGFRKLQIDLLGNITELPFETERKPFIKR

SEQ ID NO: 2184 - protein, 941 aa, unidentified
  REGION 1..941: note = Description of Unknown: Cas Enzyme sequence
RGFKSNRKNEAEPKDSKGLLKALAANSADLSSYRTVGEMLYNRENRRNKPNDYSNTVQRADILHEAHELFKHQRSFGNHYCNEEFEEQYCAILASQRSFDQGPGKPSPYSGSIEEKIGYCQFEKNEKRAAKATYSFELFDLLQKINHLRLNVDGKTRALFANERQAIVDKAHISPSKMTADALRKLLELPENVKINFRDYTPLKAYHEMRKALKGVTDIKYINAEMRNEIGTIFSNHKNDNDIRNALEKTTLSMDEINALVSKLKSFSKCGHLSVKALGNIIPHLREGLTYDKACKEAGYDFQGKGGEKSKLISLKHLAEQTEHTITSPVGRRALSQSAKVLNAIIRQMGESPSYIKVELARELSKPKKERDAIADNMKKNEDRNERIVNEIRETHRISEPRGQDIVKLKLCKDQDWRCMYSNEPLDPEQIFDPGYVDVDHIIPYSLCFDDSYNNKVLVRTGENRQKGNRLPLQYLQGERANDFRVRVNRSNLSTRKKQNLLKEEFTEEDKLNKERHLQDTKGISSFFYNYLVDFLELAPSTTERKKQVHAINGAVTSIMRKRWGLTKVREEGDLHHALDAAVVACVTDGMIRKITHFAERQENYIVDKRTGERKERFPQPWPNFRDELQARLNPNPARALQRLGTYTDGELAQVRPVFVSRMPRRKVTGAAHKETIKSPPVSLKKREVVLKKVALTELKLGKDGGIADYYNPDSDKKLYEALKAQLMAHGGDAKKAFAEPFYKPQGSSKKKSKDKPAPPARVKKVKVTEPFTTNVEVHKGADNKGTGRADNGTMLRVDVFHVAGEGYYLVPIYVADTIKPRLPNLALGKGKEKWKEMSDADFQFSLYRNDLIFYTLKSNPDEPQIVYYTGFDSSDGRISYIKHDNSSEGRISMKTKVDSLEKLTVDLLGKVTPKVDLNGGIIRVIREKRLDFKKPRKHKK

SEQ ID NO: 2185 - protein, 1088 aa, unidentified
  REGION 1..1088: note = Description of Unknown: Cas Enzyme sequence
MRQHRFAFDLGSGSLGWAVYELAPSSSGKPRPTKLVDLGVRIFPTGRDPQSRESKASGRRQPRQMRRQLYRRKKRRGELEGKLVRHGLMPDKSNHAQRKKFFAISPYEARSKAAQGEAELYELGRAIWHMSKHRGFKSNRKTDRANEEDSGKIAEGSKQLRQSLADETAATYGDWLAKRHAKGDLVRVRLVGAGAKASYDFYPLRDMLEDEFTRIWNTQAQHHSHLNDAMKEDIRDTVFFQRPLKPVDPGRCTFFPDENRLPRWHPLAQEFLILQALNHLKWTDERGEEHSLSLDTRNVIAKQLMDGVKMTWAGLRRVLKIPSSAIVNIQGDSKKEKQGALKEPPYNLVAWKMENKTRKKGIEIPAPLPRWHTWDEAVRMQVLTILDEGIEPEATTKRLIDECGLDQDTAAAVEKISLPEGHLRIGESAAKAIVRELRADVIVYSEAAERAGLHHSDLRPDDAKGLDALPPYNRLETLQSAIGTGTSNPDDPPDKRYGCIANPTVHVGLGQFRRVINALIRRYGKPKQIVIETTRDMAYSAQDIKDHERARAANTQRNDAWRKELEAEGVMEPGAKAGDRFLRMHLWEELGESPAARCCPYTGRPIALHQLHSDQVEIDHILPFAATFDDSRANKTVCFRKANREKAGRSPSDAWSGDKLQGIIQRVVAAPNMKHKVWRFREGALKDYLDKRDFEDRQLNATGYLARVVRRYAEALFDKDGTSNVWVVPGRMTAKLRHRWGFYLSNDNYKNRDDHRHHALDAAVIGLIDRALVQQLQTWAGKYGASEINKHLLPPLPEEWEPIRDKVRQRIAQVQASHRPNHASRGRPHHSTGGALHEETAYGQVPEEEQEAQGLGNLVFRKSVEALEPGEINRIRDGHLRAQLKDYTQSHLGNKKALREALQQWGEDFRGYETEKNANRRHGTRSLRIVKRDQSARQIPGQRKWVIPGENLFVEILEQGGKWFGYGVDRWGYASRTAKPWQEAHPGAKFIMRLYKGDTIQLYDWHKERKAIIEDPGRNRVKRVIRIGIVAQALMIAGVNEGGTLVKRHNDPEDRFRWDIPSFDRMRQRRARRVRIDETGRLRVVPMG

SEQ ID NO: 2186 - protein, 1079 aa, unidentified
  REGION 1..1079: note = Description of Unknown: Cas Enzyme sequence
MYRFAFDLGTNSLGWAVYQLDSDTKPAALALIGVRIFPNGRDPQSKESNAAGRRIPRGARRRQDRNLGRRERLLDGLISSGLLPSDAKARARVFATNPYEVRARAAHEQVSLEQLGRALWHMSKHRGFKSNRRADKDADKKGKIATASSALLERLKAEGHPTYGAFLHARLCRGEGTRVRPTGDGAKLSYEFYPTRALLEAEFDHIWAKQATHDPVLTEDMRERLRDTIFFQRPLRPVRPGKCTFFPDQDRLPRWHPAAQEFLILSQLNHLRIVDDHGEYPLDITARDLVARTLMGGAKLSWSALRKTLKLPSQAAFNLEKGGLKELARNDVAARLLGDAKKPGPLVTLWPLLDYAAQEEMLGRIAETADPEDLIGWLIERHNISPEAADKIEKIPLPDGHLRFCKTATQAIVEELRRDVITYDEAVRRAPSLGGAGLDHSDFQAEEGVDTLPPYNRLPVLQRMIGNGTGDPNDPDLVRYGRITNPTVHIALGQFRRVMNALIAEYGKPAQVVIEATRDMAKSAEELNKIDSDIRKNTRRNDRWRAELQAAGLLAEGARIGDRFMRMRLWEEMGNGPADRLCPYTGRPIALHQLHSDEIEIDHILPFEETFDDSPANKTLCFREANRRKAKLSPADAADRQPDFFDLASIIGRTKHLPANKAWRFLPGAMQKWEETRGFEDRQLNATGYLARIVRAYAEALFPKADDEGKRRSHVWVLPGRMTAMLRHRWGLNLGDHNRKSRNDHRHHAIDAAVVGVIDRRMVQVLQTHARNMGVVRLDRVLPAPPEPFEGFRGAVLSAVERVNVSHRAQHGSIDPSDPSQTSGRLHEDTVFGLVRDVPENQADRTIGNVVVRKPVSGLTEKEIGQVRDVKLRLSLEDATRSARDKSLPEAERKNRLAESMAKWVQETGHRKLRILKPEAGVRPVHDRDGKPYKWLVPGEISWLDILESPDGTWFQHATDIWAANSGGAEPWNVAHPGARFIMRVHKNDTIQVFDWDDKNNCVVEGSNQIKRIVRMEPSANRVRLVGVNEAGVFDDRHKNLDDPFRWDLATISKLKLRRARRVRIDELGRVHTIPHGTL

SEQ ID NO: 2187 - protein, 1078 aa, unidentified
  REGION 1..1078: note = Description of Unknown: Cas Enzyme sequence
MNRYRFAFDLGTTSVGWAVYELDAANRRPVALSRLGVRIFDDGLDADGKTSNAAKRRQPRAQRRQIDRRLARRNQLLKDLENADLMPPKGRARDLLFNCNPYLVRSQAAFEKVSLYELGRAFWHMSKHRGFKSNRKTDKPDDDTGLIKSANIALRNKLENHRTYGSYLWSRLQSGEGVRVRALGENATKHYEFYPTRNMLLHEFDTIWNLQKKYHPELTDELCERLRNYTIFYQRDLKPVLPGRCTFFPTKDRLPRWHPAAQQFIILQQLANIRIIRDSVEKPLDQEIRIVLFDALNSGTKLTWTKVRRILKLGSNDEINLQTGGLKELHFNQVSAALIGTVKKPGPFKEEWLTYDQTTREDILYKLTESETSEDLFDWLEKTLNLTDAQIEEIEKVRLPEGHIRFCKEVAEALVTEMRSDTIDYSQAVLRAPILAEVDINHSDFRQDNGLPNLPRYNEVPVLQRMIGNGTGNLEDPIDKRLGKITNPTVHIALGQFRRVINMLIHHYGKPEEIILESARDLNKSPKEKDEIQKMIKFNTDRNDRFREDLEKADLLKPGQKVGDRFLKMRLWEELGQTAADRCSPFSGRQICLTELHTDSIEIEHILPFAETFDDSPANKTLAFRDENSKKGKLSPGDAASIGLFDQQEMVQRTKHLPRNKAWRFLPDALQIFEEQKSFDDRQLHATGYLSKVVRAYSEALFDKTDSDGKQREHVWMLPGKMTAMLRHRWAVNLGDHNRKDRSDHRHHAVDAAVIGVIDRAMIKRLQDNAKTIGAQTLSRVLPSPPEPFPDFRNTVMMAVNNINVSHRAKHGSADPIKPSKTSGRLHEDTAMGLIRDLPENQADLTIGNVVVRKPTTSLSEKEIKQIRDPKLRLDLENATKPAGKAGLKKTEADKIRLSLLASWANKTGNHRLRIIKAEASATPVYNKVGEPYKFYAPGEVHSVDIIESDNRWHGHALTVWDANAGQAKKWLDIWPQGRFVMRLHKGDTIQLFDWDDDRGEIVSGSNAVKRVVRLAPSNNRIYLCGINDAGKLNDRHNDKTDIFRWDLAGFEKQRLRRARRVRVDELGRLHTIPHGKV

SEQ ID NO: 2188 - protein, 1067 aa, unidentified
  REGION 1..1067: note = Description of Unknown: Cas Enzyme sequence
MYRFAFDLGSGSLGWAVFKLDEGRKPTELVKMGVRIFSTGRDPQSKESTAAGRRQPRQQRRQIDRRKKRRQRLEEQLVTAGLMPARNDTAGRKAFFDIDPYDARDRAAREKCSLHELGRAIWHISKHRGFKSNRKADRSNEDDSGKIATASAALRDRLAQEGAPTYGAWLAQRHARKEPVRIHLGNDKAYDFYPTRQMLEDEFDHIWRRQAAHHPELTDAARETIRDTVFFQRPLKPVLPGRCTFFPEEFRLPKWHPLAQEFIILQQLNMLRILDGRGEQALDLTARDLLARHLMAGQKLTWKGLRKLLKLPSDAEINLEHGRLKELAHNQTAARMTGTKRKPGPLAGRWESWGDDDRLRLLTILDQAESPEEAVRRLMQECGLERDTAEAVEKITLPDGHLMIGERAAKAIVQVLREDVIVYSDAVRAASERGLFGEDVVIHHSDLRAEDDPGLPRLPRYNELPALRHMIGTGTGNPDDAPDIRYGKIANPTVHIALGQFRRVMNALIDRYGKPEHVVIEATRDMAKSARELQEIERTIKANTKRNDTWRKELEEAGIVAPGQRMGDRLLRMRLWEELGKTPADRLCPYSGRPIALHQLHSDEVEIDHILPFKDTFDDSPANKTVCFRDANHIKGKRAPGEAWHGEELEAIIARVKSAPGMKHKLWRFLPGALEKWQQDKSFEDRQLKATSYLARVVRAYAEALFPRDGTSHIWMPVGRMTAMMRRRWGIHLPDHNAKTRDDHRHHALDAAVIGVIDRRMIQQLQRYARPIGAEELDRVFPSPPEPFAGYRDQVMEQVRRVQVSHRPDHAISGRLQEDTAYGLIRDLPENQAARTIGNVVVRKPVVALTAKEIGQVRDEKIRADLLRATEGLRGDKKKLAEALENWSKQTGHRRLRIIKPVANARPIRDAEGRPCKWLVPGEIAFMDILEGPDGRWFHHATDIWAAQSTGDAPWRADHPDARFIMRLYKNDTIQLFDLDKEGQPIAGSNTVKRVVRLQPSANRVQLVGVNAAGDYDKRHNDKDDPFRWDLATISKLKTRRARRVRIDELGRVRAVPHGKLGGGGRH

SEQ ID NO: 2189 - protein, 1219 aa, unidentified
  REGION 1..1219: note = Description of Unknown: Cas Enzyme sequence
MPFARIAGRYDDVERRQEIDDAVGRRRRATRIANLGVFSGYRIGLDLGNGNIGWCVLFERGLVPVFLTAELIAAHNTGLPKGAPKTQLPKLDSFVPLGTHKFQARDSDGVSFSKGRANARAKRKTLDARQRRRWHLREVLRRHGLYPNENEPTFGMAQVKADRLRVNLLKSGAATHPHDLGRAIYNALKRRGWMKPVGRAGKQEDTNFGKRATAKYRETLARFDCRTVGAFLERCQRDAAADGNMIRKRHKPLTWQDQNRRTQPKADDTPRSYKVFPFLSPTFDLMWDEACVLREEQATTVPISDEVWTDIYTAADFRRSLRAKEPGHCEYLSDQWRCVRALPSFQEFRLLQQAANLTLDGTALPDVPGDLYETVADHLRMIDRASVAAIARAVGARRLGQAEKDASRSLSGAKTDVGLAKALGPSWMAITDIQERDRWTMRFLRRHRMPLDGTPVRSWEPSDEAALKREADLAFGQDALDRVDAVAGDVLEDQFANISEIAARILAKGYRQRLPHDDRLALLATEGGMKAAEIELYDRLPYYARLMPDLTVPSTNFAPLERTAEEERSFGRTPNPDVHIVLNRMRKVINAIVDMMGGILPSQVVVEVAREALSEEAAKKHADVVRERTALREAIEREIKKALEPGPLPIGPRLDRIVDRWIAAARQGWRDYDGNEIPRSDLVDSTAYQLDHVSPAAFGEFQQGNLFVSKTRLNQSKGKRLPWDAFPEHRAVLITFARFGKRSQLDGLEKVMKSLKARGARASDVARIGERVASVRRQLDALEAEAYADVPHVLRALERSRSTRLEIVLDPDQPDDGKQGPPKAFRPGDQAALFAKLGPNARVAEEGPRARDVANIGWSTKLAGRYIACLGARMLAVKPWAVHALRCMFGVNKWRKDLRNHAIDAFMIAHFDERVMRPAFDHLRGMHYEDLYEKRFLETALDQIGESTGVYQGLIDNLRHLSEVIGTIATAHRADNRWNPGDKPGGSFGALGGENIYAFHPTSDTLKALSTAVNKARKLKDGPVYTKAQIVELLGKDISSLNDPLERKACVDLRKMVEVRYRQRPIDAKAKEIPSSLDIVKPIGRQPGGFTNAEGKFAIASASADARREIIDIATFSAANPAERADRFRPGRALYRAGDTVVHEGCAWVITGLKADGRLLLYRVDTTERGSKLVTECTVPIDAKRKPLEKFPSDVLGRRLHRRRKSPGDLDPVPYPLFG

SEQ ID NO: 2190 - protein, 1060 aa, unidentified
  REGION 1..1060: note = Description of Unknown: Cas Enzyme sequence
MNSSASNSLVFGIDLGIASCGWAVLRHPTDADPTGEIAGMGSWMFDVPETDKERTPTNQIRRGNRLLRRVVRRRAQRMAAIRRLFREHGLLPSDDRDALKRADTDPWELRARGLDKPLKPAELAVALGHIAKRRGFKSAAKRKEANAAGDDQKMLKALEATKERLGRYRTVGELFARDPDFQVRKRNRDGIFDRTQSRDDMLHEVRKLFEAQRRLGNDLASEELEAAFIKEAFFQRSLQDSERLVGMCLFEPAEKRAAKHAPSFEKFRLLTRLINLRITTDDGERPLREGELKAAIADLGSTARLTAKTIRKRIGLSDEHRFMAIKPDDEGQDIAARTGEAMHGTKKLRDALGEEIWVDLLEQPEVLDRIAHVLSFFETAETIGAELKKLDLPVGAVDRLLEALPSFTRFKGAGHISAKAACALIPHLEAGLRYDQACEAAGYDHAASRWSKREQVTDKKSFNQLVKDMGAEIANPIARKSLTEGLKQLWAMRNCWGLPDAVHIEMARDVGNSREERSRIKKRLDDTTAQRERERKEAAEQLGVDPGDIGGDTLLRYRLWKEQNCRCPYTDTAIPPAAIAATDNSFQVDHILPWSRFGDDSFNNKVLCIAKANQDKCRDTPFEWIMRAKGEEGWRAFVERIETNKQYRGFKKRNYLLKNAEEAEERFRSRNLNDTRYACRLLAEAVKLFYPEGERQDRGGTRRVFTRPGSLTAALRHAWGVESLKKVDGQRVEDARHHALDALVVAAAGEWEIQRLTKSFQEWEQRGLARPMRRVDPPWGDFHSFRREVQDAYDAIFVARPERRRARGEGHAATIRQVREQDGAQVVYERKAVADLKEKDLERIKDPERNKAVIEAIRQWIADGRPADKLPRSPAGDEIRKVRLSTKGKPSVTVRGGTADRGDIVRVDVFSKPNKRGKDEFYVVPVYPHQVMDKKQWPHPPSKAVVAYKDEEEWVRIDESFRFHISIYPRSFLEVTKPDGEILSGYFQGMNRATGAISLFNDRNARDRRDNAGNSLDGIGAKRLLTMKKYSVDRFGNRSEVKSEVRTWHGAVCTSPTPPG

SEQ ID NO: 2191 - protein, 1057 aa, unidentified
  REGION 1..1057: note = Description of Unknown: Cas Enzyme sequence
MPQILDGGYLVRTFGIDLGIGSCGWAVIDHPANAGETGSIVGMGSWVFDVPETDKERTPTNQIRRGNRLLRRVIRRRRNRMAELRRLFAENKLIAGADRSVLSQKDHDPWELRARGLDKMLEPEAFAIALAHIAKRRGFKSAKKRKDGNNNADDGKMLGEIKKTEERLARYRTFGEMIARDPLYSARRRNREGLYDRTAQRSDLEHEVGALFAAQRRLGAAKASEQFEGAYRAIAFRQKPMQDSERLVGACPFEPREKRAAKFSPSFERFRLLQRLVHLRIVNGDAERALSLDEVERLTRDLGKTAKLTVKAVRAALGLGDHESFKGIKPDQENQDIAARSGEALHGTKKLRDAVGEVHWAELSARPEVLDEIAHVISFHETNETINGKLAALALPVAALDALAIALEGRAFARFTGAGHVSAKAARAMLPHLAQGLRYDQACAAAGYNHTATGLTGREQVTDKAKFNELVRSVGEAVANPIARKAMTEGLKQLWAMRNRYGLPDAIHIELARDVGNSIEERRRIEKRINDTTAQRYRERRETAELLGVDHVDGDTLLRYRLWKEQKGRCVYTDRAISVPALLATDNSVQVDHILPWSRFGDDSYHNKTLCFTAANQNKRRDTPHEWLARTGGWDDFVARVEGNSELRGFKKRNYLLKNAAEAEERLRSRNLNDTRYAARLLAEAVKLFYPEGERQDRGGVRRVFTRPGALTAALRQAWGVESLKKIDGKRVADDRHHALDALVVAAVGEAEVQRLTKSYQEWEQQGLGRSLRYVETPWPGFRQDVLLAYEKTFVARPERRRARGEGHAATVRQVKERDGKTVVYERKQVEALTVADLERIKDPSRNAPLIAAVRDWIARGKPMNDLPRSPTGHEIRKVRLETKYKPAVPVRSGTADRGDIVRVDVFAKANKKGKDEFYVVPIYPHQVFDKLGVPYPPSRATVAYKDETEWTLIDNSYRFKFSLYPRCYVEVTKASGEILAGYFQGMDRSTGAISLFNHKDARALRDENGNSMRGIGAKTLLTIKKYSVDRFGDRGEVRGEVRTWRGEACTLPTPAN

SEQ ID NO: 2192 - protein, 1053 aa, unidentified
  REGION 1..1053: note = Description of Unknown: Cas Enzyme sequence
MSGLVFGIDLGIASCGWAVLRHPTPGDPSGEIVAMGSWMFDVPETDKERTPTNQIRRGNRLLRRVIRRRAQRMGEIRRIFAQHGLLAGNEPDALKRAGLDPWELRARGLDKPLSSAEFAVALGHIAKRRGFKSARKGKEANTAGDDQKMLKALEATRERLGRYRTVGEMFGRDADFRDRKRNRDGLFDRTQSRDDLIHEVAKLFEAQRRLGNDTASAALEAEFTAIAFRQLEMQDSEKLVGMCQFEPKEKRAARFAPSFEKFRLLGKLVNLRITAPEGERPLTPDEIRLAAGDLGKSAKLSVKEVRKRIGLPADQRFTVFKPEEETQDIAARTGEAMHGTKKLRDALGEVLWADLQTRPAQLDQIAHVISFHETADKIGEELAKLGLPAGAVDSLLDNLKGFSRFKGAGHISAKAARALIPHLEAGLRYDQACEAAGYDHAASRWSKREQVADKAGFNALVQSMGDEIANPVARKSLTEGLKQLWAMRNRWGLPDAVHIEMARDVGNSLEKRNEIKRGIDKNTAERERQRNEVRELLGIEDVNGDTLLRYRLWKEQAGRCPYTDKAIPATAIIATDNSYQVDHILPWSRFGDDSYANKVLCTARANQEKKGQTPFEWFMSSQGEDAWNTFLARIEGNTAFRGAKKRNYVLKNAKEAEERFRTRNLNDTRYAARLLAEAVKLFYPEGDRQEKGGNRRVFTRPGGLTSALRHAWGVESLKKVDGKRVEDARHHALDALVVAAIGEWEVQRLTRSYQEWEQKGLARPLRQVDPPWGDAASFRREVKEAYDNIFVARPERRRARGEGHAATIRQVKERDGALVVYERKSITDLTEKRLQDIKDPERNQGVIEAIREWIANGRPADSLPRSPAGDEIRKVRLRTKGKPAVHVRGGTADRGEIVRVDVFARPNKRGKDEFYLVPIYPHHVMNKRDWPTPPERSVVAYKDEDEWTLIDDRYKFKFSLHPRSYIEVTKPTGELLAGYFQGLNRSTGAINLSNPRDPRLLADDNGNSMQSIGAKTLLTMKKYNVDRFGVCSEVKSEVRTWHGVVCTSPIPPD

SEQ ID NO: 2193 - protein, 1047 aa, unidentified
  REGION 1..1047: note = Description of Unknown: Cas Enzyme sequence
MSGLVFGIDQGIASCGWAVLQHPTPSNPTGKIVAMGSWMFDVPETDKERTPTNQIRRGNRLLRRVIRRRAQRMAEVRRLFHSHGLLAGHEPDALKRAGLDPWELRARGLDKLLSPAEFAVALGHIAKRRGFKSAKKGKEANTAGDDQKMLKALEATRERLGRYRTVGEMFGRDPDFGDRKRNRDGLFDRTQSRGDLTHEVSELFRAQRRLGNDAATAELEDAFAAIAFRQAEMQDSEKLVGMCQFEPNEKRAAKFAPSFEKFRLLSKLVHLRIATLDGERPLTPEEIALATADLGATAKLTVKVVRKRIALPADQRFTSIKPEDEAQDIAARTGEAMHGTKKLRDALGDALWAELQGQPEQLDRIAHIISFFETADTIGAELRKLGLPSGAVDALLVDLGAFSRFKGAGHISALAARSLIPHLEQGLRYDQACEACGWDHAASQWSGREQVTDKASFNRLVKEMGEQIANPVARKSLTEGLKQLWAMRNRWGLPDAVHIEMARDVGNSLEKRNEIKRGIDKNTAERERQREEVRELLNIEDVSGDTLLRYRLAKEQGWRCPYTDKLIPPTAIIATDNSFQVDHILPWSRFGDDSYSNKVFCTAEANQRKKGQTPCEWIMASLGEDGWATFVARIEGNSAFRGAKKRNYVLKNAKEAEERFRTRNLNDTRYAARLLAEAVKLFYPEGERQEKDGSRRVFTRPGGLTAALRHAWGVESLKKIDGKRVEDARHHALDALVVAAIGEWEVQRLTRSYQEWEQQGLARPLRQVDPPWGDPASFRRAVQQAYADVFVARPERRRARGEGHAATIRQMKVRDGVPVVYERKALADISEKRLEDIKDAERNQGVIKAIRQWIADGRPADKLPRSPAGDEIRKIRLRAKGKPAVDVRGGTADRTEMVCVDVFTKPSKKGKAEFFFVPVYPHQVMDKRKWPMPPMRAEPSGMELDGSYRFVMSLHPRSYVEVTKPDGQILHGYFKGLDISTGAIHLSSDRDIRVLADKDGNSMRSIGAKTLLTMKKYNVDRFGARSEVKSEVRTWHGVVCTSPILPG

SEQ ID NO: 2194 - protein, 1053 aa, unidentified
  REGION 1..1053: note = Description of Unknown: Cas Enzyme sequence
MNGLVFGIDQGIASCGWAVLRHPTPGDPTGKIVAMGSWMFDVPETDKERTPTNQIRRGNRLLRRVIRRRAQRMAEIRRLFHSSGLLAGQEPAALKRAGLDPWELRARGLDKVLSPAEFAVALGHIAKRRGFKSAKKGKEANTAGDDQKMLKALEATRERLGRYRTVGEMFGRDPDFQERKRNRDGVFDRTQSRDDLIHEVSELFMAQRRLGNDAATVQLEDAFNAIAFRQKDMQDSEKLVGMCQFEPKEKRCARFAPSFEKFRLLGKLVNLRVITPDGERPLTPEEIRLATADLGSTAKLTVKTVRKRIGLPDDQRFTAIKLEDESQDIAARTGEAMHGTKKLRDALGDALWVEMQTTPEQIDRIAHVISFHETADTIGAELRKLGLPDGAVDALLDDLGAFSRFKGAGHISALAARSLIPHLEAGLRYDQACGVVGYDHAASRWSKRVQVADKKAFNRLVEDMGKEIANPVARKSLTEGLKQLWAMRNRWGLPDAIHIEMARDVGNSLEKRNEIKRGIDKNTAERERQREEVRELLKIEDVSGDTLLRYRLWKEQAGRCPYTDKAIAPTAIIATDNSHQVDHILPWSRFGDDSYSNKVLCTAEANQRKKGQTPCEWIMASQGEDGWNTFVARIEGNPAFRGAKKRNYVLKNAKEAEERFRTRNLNDTRYAARLLAEAVKLFYPEGERQEKDGIRRVFTRPGGLTAALRHAWGVESLKKVDGKRVDDARHHALDALVVAAIGEWEVQRLTRSYQEWEQKGLARPLRQIDPPWGDAASFRREVQEAYDDVFVARPERRRARGEGHAATIRQVKERDGAQVVYERKSIADLSEKRLADIKDPERNQEVIEAIRLWIADGRPLEKLPRSPAGDEIRKVRLRTKGKPAVQVRGGTADRGEIVRVDVFAKPNKRGKEEFYLVPIYPHHIMNKRDWPVPPTRAVVAYKEEERWALIDESFTFKFSLHPRNYVEVTKPTGELLSGYFQGVNRATGAISLFNDKDSRSRRDDLGNSLDGIGAKTLLTIKKYSVDRFGARSEVKSEVRTWHGVVCTSPTRPG

SEQ ID NO: 2195 - protein, 1046 aa, unidentified
  REGION 1..1046: note = Description of Unknown: Cas Enzyme sequence
MNGFVFGIDLGIASCGWAVLRHPTPGDPSGEIVAMGSWMFDVPETDKERTPTNQIRRGNRLLRRVIRRRAQRMAEIRRLFAQHGLLAGNEPDALKRAGLDPWELRARGLDKPLSPAEFAVALGHIAKRRGFKSARKGKEANAAGDDQKMLKALEATRERLGRYRTVGEMFGRDADFADRKRNRDGLFDRTQSRDDLIDEVGKLFEAQRRLGNAAASAALESDFTATAFRQLEMQDSEKLVGMCRFEPHEKRAARFAPSFEKFRLLGKLVNLRITTPDGERPLTPEEIRLATGDLGKTAKLSVKEVRKRIGLPADQRFTAIKPEEETQDIAARTGEAMHGTKKLRDAMGEALWAEMQDKPEQLDRIAHVISFHETADKIGAELRKLGLPTGTADALLDDLSAFSRFKGAGHISAKAARALIPHLEAGMRYDQACEAVGYDHAASRWSKREQVADKAAFNALVKSMGDEIANPVARKSLTEGLKQLWAMRNRWGLPDAVHIEMARDVGNSLEKRNEIKRGIDKNTAERERQRGEVRELLGIEDVNGDTLLRYRLWKEQAGRCPYTDKAIPATAIIATDNSHQVDHILPWSRFGDDSYSNKVLCTARANQEKKGQTPFEWIMSSQGEDAWNTFLARIEGNTAFRGAKKRNYVLKNAKEAEERFRTRNLNDTRYAARLLAEAVKLFYPEGDRQEKGGNRRVFTRPGGLTSALRHAWGVESLKKVDGKRIEDARHHALDALVVAAIGEWEVQRLTRSYQEWEQKGLARPLRQVDPPWGGAASFRREVKEAYDNVFVARPERRRARGEGHAATIRQVKERDGALVVYERKSITDLSEKRLQDIKDPERNQGVIEAIRDWIARGRPADSLPRSPAGDEIRKVRLRTKGKPAVQVRGGTADRGEIVRVDVFARPNKRGKDEFYLVPIYPHHVMNKRDWPVPPTRAVVAYKDEEDWTLIDHSFAFRFSLYPRNFVEVVKSTGEVCEGYFAGMDRSTGAISLQSHNNPKNSFRGLGVKTLLTMKKYSVDRFGMRSEVKSEVRTWHGVVCTSPIPPD

SEQ ID NO: 2196 - protein, 1453 aa, unidentified
  REGION 1..1453: note = Description of Unknown: Cas Enzyme sequence
MEQKTLGLDLGTNSIGISLRNPALGDNLKEQLEYFSSDIFEAGVGTDKSGEFSYAAQRTTFRSARRLKLHRRRRLQATLRLLMDHKLCPLSEESYKQWSVYDKTQNLKREYPIGDEGFNRWIKLDFNADGKPDYTSPYQLRCELATTQLDFSSPENKFKLGRELYHIAQRRGFKSSKGETIAEQEKNEKFSANSDDLEQEMKKSEMKRSKGLRELLETQGLKTIGQAFAYLESQGTRIRNNEDIQATRDLYEKEITYIFNFQKELSIESELYKRLVSTKKGEGTIFYKNPLRSQKGLVGKCTLEPKKGRCPIGHPEFEKFRAWAFINNIRYRRTIDSEWQEPTTEMKERLYREVFTARVKADFLFSEIRKWLEKELEIQIHWDNNKSLRTINYADKQNVAGCPVTARLVKLLGTDWERFQQEGRKEHKTHSKQHPTKHTVCYSALDIWHVCFQADELEDVQSFAKDSLQWDDEKCKLLLRVWTSIPQGYAMLSLKAIRNINRMLCRGLKYSDAVMLAKVPEIAGMNENEIDTLIETFSKDLKTEVDRTKDIYIITNSLIADYKSLSFEDRFAEHDTSYCLQESDKEDIVQHIIKHFGEVTWGLMDAEEQETLMNEVEQLYQNFFSKTKRNFYDIPTYASTLRTFLCEKFPHVDEQAWAKLYHPSQIASYHPERDKNCPDSWRLGTPNIGAIRNPVALRTLNILRRKINALLDANMIDPLETRVVVETTRTLNDANMRWAINRFQKEREEQNKTIRSILEKEYTTRAISETDIDTARYILEQREEHIYRTEKTGELQHGFSFNIDAKRYKLWLEQGGICFYTGKVINLTNLFDDNAFDIEHTLPRSKSFDNSDANLTICDAHYNRYIKKNILPAHLPNFEHDQTINGTLYTAIKPRLEMWRKRVERLKVNVDFWKNRTRRAQDKDTRDYCIRQRHLWQMELNYWHEKLSHFEMEEIKEGFRNSQLVDTGIITRHATLFLKSLFKNVEVQKGSVTADFRKILGIQSVDEAKNRDKHSHHAIDATILTTIPIAAKRDRMLEIFYEIEEKKHLMISENAERIKQELEGLKESLKREIRECHIGYNIKDVPNFIETEILINHHSKDKTLTTSHRRVRIRGKKVYTTNSQGEIVEKWSSGDCIRGQLHNESYYGAIRLPQETEMENGRKPKTKDGHFIYDEKNENITMVIRVPLRSFTAMKDIDKIIDASLREEIRTTLTKRLAEGFTFKDAIVQDFWRIDKAGQEIRKDKKGRPICPIRHVRCKVATGRGFMTYDSSLSIRKHALISQKALVHLPNRNYKQNVYAQNNTNYLFLLYEGIKQGKLVRQSRILNLYQVSEMLKAGCSRNLEQSLWHEPLYASFIEKKIEYKLSAIIKTGTRILMWNETPDELRELSKQDLLKRLFVVKKFNHTSSDHVYLKNHLNATDEIDLELVPNKFNCLIEHRDFEIDLLGNITLKD

SEQ ID NO: 2197 - protein, 1426 aa, unidentified
  REGION 1..1426: note = Description of Unknown: Cas Enzyme sequence
MEQKTLGLDLGTNSIGISLRNPALGDNLKEQLEYFSSDIFEAGVGTDKSGEFSYAAQRTTFRSARRLKLHRRRRLQATLRLLMDHNLCPLSEESYKQWSVYDKTQNLKREYPIGDEGFNRWIKLDFNADGKPDYTSPYQLRCELATTQLDFSSPENKFKLGRALYHIAQRRGFKSSKGETIAEQEKNEKFSANSDDLEQEMKKSEMKRSKGLRELLETQGLKTIGQAFAYLESQGTRIRNNEDIQATRDLYEKEITYIFNFQKELSIESELYKRLVSTKKGEGTIFYKNPLRSQKGLVGKCTLEPKKGRCPIGHPEFEKFRAWAFINNIRYRRTIDSDWQEPTTEMKERLYREIFTARVKADFLFSEIRKWLEKELEVQLHWDNNKSLRTINYADKQNVAGCPVTARLVKLLGTDWERFQQEGRKEHKTHSKQHPTKHTVCYSALDIWHVCFQADELEDMQSFAKDSLQWDDEKCKLLLRVWTSIPQGYAMLSLKAIRNINRMLCRGLKYSDAVMLAKVPEIAGMNENEIDTLIETFSKDLKTEVDRTKDIYIITNSLIADYKSLSFEDRFAEHDTSYCLQESDKEDIVQHIIKHFGEVTWGLMDAEEQETLMNEVEQLYQNFFSKTKRNFYDIPTYASTLRTFLCEKFPHVDEQAWARLYHPSQIASYHPERDKNCPDSWRLGTPNIEAIRNPVALRTLNILRRKINALLDANMIDPLETRVVVETTRTLNDANMRWAINRFQKEREEQNKTIRSILEKEYTTRAISETDINTARYILEQREEHIYRTEKTGELQHGFSFNIDAKRYKLWLEQGGICFYTGKVINLTNLFDDNAFDIEHTLPRSKSFDNSDANLTICDAHYNRYIKKNILPAHLPNFEHDQTINGTLYTAIKPRLEMWRKRVERLKVNVDFWKNRTRRAQDKDTRDYCIRQRHLWQMELNYWHEKLYHFEMEEIKEGFRNSQLVDTGIITRHAALFLKSLFKNVEVQKGSVTADFRKILGIQSVNEAKNRDKHSHHAIDATILTTIPIAAKRDHMLEIFLRIKELKKILCFSKDTNKQQEIISLNQKLQYEINSCHLGNDIASLPSYIENNIIIRHLRKEQTQQNSRRTIRIRGKKIYVTDHHGNKHKKWSSGDSIRGELSGQSFYGAITQWKKKTNRNETTNQKEQNIIDPTIYYVIRKPLVFKNNTSAPGFSSWEDLEKQIVNKALIPMMKSQFCEGTSFKEACGQPIYMLNRKGEKINVLRHIRCYVRIKNPIAVKQHTFLSNKPYKQNVYASVGSLYAAAEYTNGNKRQFVIYSLKDIAQNKKKNNEIIPSKILNGTKTLTLQRLLHAKDSILIYEESPEELKKLSMTELSKRLYVIKGFEAAITRIKAVNHLYNIDETGETITDYQNLPITIRLSLNKLKFLLHGYDFKFTTSGLEFLDK

SEQ ID NO: 2198 - protein, 1097 aa, unidentified
  REGION 1..1097: note = Description of Unknown: Cas Enzyme sequence
MSRLVLGLDIGETSIGGALVRLNREDELEEILWMNSRVFSGVTDPRKKTPLNKQRRLFKGQRKITERRAKRRKNVEAMLVRAGLLPSDLVERNLILGKDNATLDRRYLNPYQLREKALSEKLEPYEIGRALQHVLQRRAFRSHRKAKLAELLGPQSEFKDDVELQQWIRDAQESIDLDDQESMDLEGDRIVSLAAAEDEPQSDDDASDDPRKALKMIASTELRWRKSGQPTIGAYLSCELAKNNKVRKRNRLLRQWLEEEFDAIWKTQSAHYPTIMTEEIRTELITAFQQRPLKPFRVQLPKRGWIPDNENQRKVLRMTRACALLGERKPVARRGHWIAHRFRILETLTNLRLKDGNEVRALTTEEIRRIAKRLQDGGSMTWPEVRGELGVKGKFTIETSKGSSKRLVGNTTEEILSRILRDKWDASLILDRERELAQLEFMQDIESYDCPIKLYRNLQLPKKDRPIYPLSKRQAFDLLSESFSRTTTNYSVRAMRKLIAAMLGEERLYEAKATLMANALSPGSFDRLPAPPPLRNPRVHRALCELRNVVNALIEEYEMPNVIKIELTRDIKQSKKEREKASERIKARENLNENAKKKCQERGITNPSSDDIRKYLLWERQQQTCPYCLDPIEASDLFSRSVNIDHVLPRRSGDNSFSNYVLAHEHCNIAKGDSLPFEFLGHTPKWTESIEFIKRTKDTGLLRRFQMEKVPEDYAERQLADTRYITREAAKYLKQLKVDDVWATNGRATAILRKFWGWNTLLPVLERRKETKESEKNRLDHRHHAIDALVVALSTPKRYRQALVAFRDKEQKGSIELTRDGYRPPFELVKKKINAALTSHALNLGIRGAMHDAEFFGRQEHQGKARYVKRAKIKDLLQPKGSAPDFQKTKQYIEERVYDADLRRALIDRMRQGGWVEAFKSPPLHLFDSKGNLMRTETVRISHVKRTDDSTINIDHRGGKSKKDRYAASENNHHAEIIRLANGKLTHRVVRMIDAARVMRKTKGKTKESYPGSPYGLSVKEGEILVMCLGKDELVNYDGRIYRVASIAIDGIRLRGPNDARRANDLDSVVVNGNKYSKLGRKVVASPLRIVLDTDAS

SEQ ID NO: 2199 - protein, 998 aa, unidentified
  REGION 1..998: note = Description of Unknown: Cas Enzyme sequence
MKRTLGLDLGTSSVGWAVIDVPESEGEAGSVLAMGARVFHPGADAKGNFLSTKARERREKRARRRQVQRRARRRALLRGELTKVGLLPAADPEFGVLFDGDPNLLLKRGLKGEPLAPFELGRVIYWLAGKRGFLSLRSGGTALVGSDETFTPKRFRVSQFDRESGALVHPGQEEVLIALFKAQQEHHSRLLTDALLFGARGKLTYPVQPIPRDRYRSNGGLLAEFGLHGLVFFQRKVYWRESTIGRCSLDSSSGMRAARAERLSQRFAVWNTIVNLRVGADARRLDHDERQAIYRELTNKKTVTFRRIRRVLHLAEEDPINFERHDRKDLKGNQTDPALAKALGPKWSTLGDAERDQLVYLLVGNATEEHVRAQLASAPFSLDGDAIDKLTAVVLPIGRMAYSRKTMRRILEHLPEAEDLRDAIGRSSLATPEDALRNRGVDLDVVTNPLVRTSLHQLRKVLSALQKRFERTSAPAFDVIRIELSRDVTSNAKQRERTVKQQRENERSREEAKSLITAFSPGSENSRDAVRRARLWSEQKERCLYCGSTIGVTDLFGSRVEIDHIVPRAATLDDGMANVALVHADENRDKSGRTIFEWLGRDRMLEIADLAHSWHASRAKLNRIRTENVSEQDIPAALLVQTGYVNTLARDLVREVPGLIDLKRANAVEVSRGRLTAQLRYRTGLHKDENDHRRHALDAAMVAITTPLVAQQLSRRYKAERDYGIRHRDEYGAWEPWPGFRRRIVALYEEVLVSHKASRKVNGQLHEETHYGKVTSPHRDGKDLYARRRPIHDITSKKRLDEVADPAVRGALIADLHARGFDPDTARSFSFDRERLPRMPDGQVIKRVRCHINQPNNRLLRPTRDSRTGVTLSNNHAAYVFQGVDTGTWRIEVIPRIDAFQARRRPASDIRVYLARSGELFLFSLCRGDTLALASPDSDDLRTVLVESLDRDASRIEVVPLNSVRYERRLRYSGKALKKLGATKIVITADGQVRTAND

SEQ ID NO: 2200 - protein, 988 aa, unidentified
  REGION 1..988: note = Description of Unknown: Cas Enzyme sequence
MTHRTLGLDIGTNSVGWAVIEVPDSEDETGRVIAMGSRVFPEGAEVAGNALKTKGASRRQARTLRRQVRRRAARKQVLRRELSRIGLLPDDDAEFDALMASDPVELMDRSDHGDALTLREIGRIVYWFSSRRGFLSLRTGGSTVIDDDAADGPDRYRLSQFSAVTGEQLVIGQEDRLMGILQQQATHHPAILTDNVLYGRRGRMTYPVRPVPRTDFLAGPDATLLDEFGLHGLVFLQRAVFWHESTIGACSLNPTRGQPRAARAERIAQEFRVRKLAMDLRVEEDMRPLTDDERRRVIDKLSHQKSLSFGALRKLLGFHPTTPINFDDGEKTSLTGNETDVTMKSLLGDTWSHLSDSDQDDIVHVVLGGGTIDEQRIQLCSRFGLSDDQADAVLAARFPTGRSKYSRQTLRRLLPHLDHAANERDAILAAGFPSPEEARRERTVVIDDITNPMVRAALVQVRKVVEAVAAEYGHRDSDTPFDVIRIELARDVRATASDRANINKQQRSRERERAQIVEQIEEFTPGAGNSRDAQRRVRLWKEQQERCLYTGTVLTLQAALDGSRTQIDHILPRSRTLNNSDANVALVLASANQDKGDRTIHEWAGDSKVAEIADRARQFGLRRAKIRNIERVDVPNDTIPESLLITTGYINAVARDLVTQITGCPVEVSRGRLTGELRYMTGLIKDHDDHRRHALDAAMVAITTPAIANRLARRYKTRQRTDVDTDDKGSFEPWPGARQHILDVYDTIVTSHKPMRKVSGQFVEDTHYGRVAADDGTTLWARRRDLTSGLTRKQLDEVADPIVKACLVNNLLARGLDPAASQLKFDPDDLPTMPDGTPIRTVRCHMSLPSNVVMRADQPNTSQTPAGNQSAAVIKNTKGRHRIVVLSRFAAQQHRALSPRAWFSDELADGDELCFTIAIGETICLTRNNHNEYFTITGLDGASNRLLSRGTNDSSSNPQRLSAKTLSDAAAAKKVVITPAGLIRDARD

SEQ ID NO: 2201 - protein, 1083 aa, unidentified
  REGION 1..1083: note = Description of Unknown: Cas Enzyme sequence
MSEFHYALGLDIGIGSVGWAVLRNQANGEPDRIQDLGVRIFDIAEQKGASLAALRRDARSMRRRLRRHSHRLERIRFLMEQSGIMSVSDIQEMYAAGGFQKSPYQLRAEALDRPLTKEETVRVLIHLAQRRGYKSNSPAEAAKDEKETGKVKSAIEENRRCMEEHGYRTVGEMMFRDERFWQSNPDGSRYHQTRNKADDYRFTVERTAIVDEVKRIFAAQRGFGVAWMSEAVEISYLSILESQRSFDEGPGGNSPFRGGIGEKVGCCTFEPEERRAPKASYTFEYFKLLQDLSRIRLVRMGLPPQPLDAEQRELLKTAALHSASLNYGQIRKKLNLDDDVYFNGLYYGDHSIEDAEKRKWSQMQSYHKIRTALDKVGKGTISTLTEAQLNAIAEILTQYKSDAKRIAALREAGIPPQLDGALLPLSFSKYGNLSITAMQKLIPLLEDGMRYDEACTQIYGDHRGLHANQRMPRISLKDMDEITNPVVRRAVSQTIKVINAVVRTYGPPDVVRIELAREMSQNFDERRKTEKRMENNRAANERVKEQIREYKGDRATGLDIVKFKLYQEQGCVCLYSGQKLDISRLFEPGYAEVDHIVPYSRCFDDSYQNKVLVLASENQQKGNRLPYEYFGQDTERWHAYEVRVENLIHNYRKRQKLLKHCLTEEESNGFIERNLKDTQYITRSIYNLLREHLLFANSQYSKKPVQTVNGAVTAMLRKRWGVQKIRENGDLHHCMDAAVLAAITPGLVQRLTEYSKQRETLVEEAGDARRDRFPKPWELFHQELEARLDPIDPRHQIDLLKLSTYESDEEIKPVFVSRMPNHKVTGAAHKETIRSSKAGDGFTVTKMPLANLKLNKLGEIDGYYNPESDRLLYDALLVRLKAFGGDGAQAFAKPFYKPKKDGTPGPRVDKVKICEKATVGLPVRDGIAANGRMIRIDVFYVEDDGYYFVPIYVADTKKEKLPSKAVVAHKEYADWKVMQDENFVFSLYPGDLVRIQSRKGIKLNLTKGGTGEKEIIRQDGLYYYRTAGITVGSIQIETHDRRYSQASVGIKTLQSIEKYQVDVLGNYYKVDLPEKRMTFSKEG

SEQ ID NO: 2202 - protein, 1013 aa, unidentified
  REGION 1..1013: note = Description of Unknown: Cas Enzyme sequence
TQEEMTHLYDKSDMVSPYQLRTEGLDRLLNAQEFSKVLIHLAQRRGYQSNSTAEEAKNEKENGVIKSAILENQQRMEQGGYRTIGEMMYRDEAFWETINGIRYHCTRNKAGDYRFTVDRASILAEVSLLFEAQRRLGSPWASWEMEDAYTGILSSQRSFDEGPGNDSHGNESPFRKAMSRNVGNCTLMPTELRAARADYTAEYFKLLQDLNHMRLVDNNGSHPLTQQQRDDLETAAFRTANLTYGQLRKKLGLSDEVRFAGLYYGTDPIEKAEKRKWAQMQSYHKIRTALDKVSKDAIRTLTQDQLDAIGEFLTEYKADAARIEHLQSAGIPEEYHKALLPLSISKRAKLSIAAMRKLIPFLQQGMRYDEACKAAGLDFHGADGKVEKLSDFLGEITNPVVRRAVSQTIKVVNAVVRENGNPDAVRLELAREMHHSIKERNRMKKQQEENREKNEQVKAQILETKPGTRVTGLDIVKFKLHQEQKGFCPYSGVEIKKERLYEPGYAEVDHIIPYSRCFDDSYSNKVLVLAEENQQKGNCTPYEYFGADEQRWHEFSVRVRASVRDFKKRQKLLNTSFGEEQGKDFIQRNLNDTQHITRVVYNYLRNNLEFADSAYAKAPVQAVNGAVTAMLRGRWGIEKMRGDGDLHHCKDAVVIAATSRSMIQRLSNYYKEEERLFMGKTHFVDPGTGEVLTRKEFQQRFAPKFPQPWDRFREELEARLDPIDPMDAVMALHLSTYESDEEIAPVFVSHMPKHTVTGAAHEETIRSRTETGTVTKTALTALKLDKNGEIDGYYSPQTDPRLYQALVERLKQFGGDGAKAFAEPFYKPKKDGTPGPRVDKVKIERKSSLSVPTARGVADNGRMVRMDVFRVPDDGYYYVPIYVSDTKKATLPSKAVMRGKAPKDWKQMKPENFLFSLFKGDLIYVESSKGISLALAEKAVGEKTIQVKSGLFYFCGADISTCSIGVETHDRRYTRRGLGIKTLTSIEKYQVDVLGNVSKVRLPETRLEFRGRK

SEQ ID NO: 2203 - protein, 1088 aa, unidentified
  REGION 1..1088: note = Description of Unknown: Cas Enzyme sequence
MNYKMGLDIGIASVGWAVINLELKRIEDLGVRIFDKAEHPQNGESLALPRRIARSARRRLRRRKHRLERIRRLLVSENVLTKEEINLLFKQKKQIDVWQLRIDALERKLNNDELARVLLHLAKRRGFKSNRKSERNSKESSEFLKNIEENQSILAQYCSVGEMIVKDSKFAYHKRNKLDSYSNMIARDDLEREIKLIFEKQREFNNPVCTERLEEKYLNIWSSQRPFASKEDIEKKVGFCTFEPKEKRAPKATYTFQSFIVWEHINKLRLVSSDETRALTEIERNLLYKQAFSKNKMTYYDIRKLLNLSDDIHFKGLLYDPKSSLKQIENIRFLELDSYHKIRKCIENVYGKDGIRMFNETDIDTFGYALTIFKDDEDIVAYLQNEYITKNGKRVSNLANKVYDKSLIDELLNLSFSKFAHLSMKAIRNILLYMEQGEIYSKACELAGYNFTGPKKKEKALLLPVIPNIANPVVMRALTQSRKVVNAIIKKYGSPVSIHIELARDLSHSFDERKKIQKDQTENRKKNETAIKQLIEYELTKNPTGLDIVKFKLWSEQQGRCMYSLKPIELERLLEPGYVEVDHILPYSRSLDDSYANKVLVLTKENREKGNHTPVEYLGLGSERWKKFEKFVLTNKQFSKKKKQNLLRLRYEETEEKEFKERNLNDTRYISKFFANFIKEHLKFADGDGGQKVYTINGKITAHLRSRWDFNKNREESDLHHAVDAVIVACATQGMIKKITEFYKAREQNKESAKKKEPIFPQPWPHFADELKARLSKFPQESIEALALGNYDRKKLESLRPVFVSRMPKRSVTGAAHQETLRRCVGIDEQSGKIQTAVKTKLSDIKLDKDGHFPMYQKESDPRTYEAIRQRLLEHNNDPKKAFQEPLYKPKKNGEPGPVIRTVKIIDTKNKVVHLNGSKTVAYNSNIVRTDVFEKDGKYYCVPVYTMDIMKGTLPNKAIEANKPYSEWKEMTEEYTFQFSLFPNDLVRIVLPREKTIKTSTNEEIIIKDIFAYYKTIDSATGGLELISHDRNFSLRGVGSKTLKRFEKYQVDVLGNIHKVKGEKRVGLAAPTNQKKGKTVDSLQSVSD

SEQ ID NO: 2204 - protein, 1146 aa, unidentified
  REGION 1..1146: note = Description of Unknown: Cas Enzyme sequence
METKYNYRIGLDIGIASVGWAVLENNSKDEPVHIMDLGVRIFDTAEDPQTGDSLASPRRNARSMRRRLRRRRHRLDRIKQLLEREGLIRIDEFMKRYESAGLPDVYQLRCEALDRKLSDEELAQVLIHIAKHRGFKSNRKAELKEDAEAGKVLNATKENRERMQAGNYRTIGEMIYCDEAFRTSCDWVEKGYILTPRNKADSYKHTVERALLVEEVKKIFEAQRTFGNPKATEELEKAYLSIMESQRSFDMGPGLQADGTESPYALNGFEDRVGYCTLEGKPEKRGAKATYTAELFVVSQKLSHLKLIKRGGEGRFLTKEEKAIVLELLHTQKEVKYSAIRKKLAIPVEYHFNALTYTSKKADISQEEREKEVEKVVFGKLENYHKMMSCLNEETKQKPVDELQELLDSIATILTLYKSDDKRRECLNALPLSTEEIENLLELTFATFMNLSVKAMRKLLPYLQGEEGMTYDKACMAAGYDFKAEGEEHKSKLLKGEQVTEIINEIPNPVVKRSVSQTVKVINAIIQKYGSPQAVYIELAREMSKNFKDRKDIEKKNKVREADNEKAKKQIQEYGILSPTGQDIIKFRLWQEQDGICMYSGKRMSIENLFGKNSSCDIDHILPYSQTFDDSYRNKVLVLSSENRQKGNRTPYEYMGQDEERWSEFVARVSSMVKDGKKRDRFFKEHITKDDRKQFKERNLNDTKYITTIVYNLIRQNLEFASYNVPALKEGKKKHVKAVNGAITAYLRKRWGLPHKDRSTDTHHAMDAVTIACCTEGMIQKISRSMQILELRYMHNGRMFDEETGEIYDRENYTLQEWKDKFGVHIPRPWEEFKNELDVRMGEDPLNFLDIHPDVAKALDYPEYYYPDSANNWKGFIRPIFVSRMPNHKVTGQANKDTVRSPRLFKEGYVISKVPLTSLKLKDDEIVNYYNKESDMLLYNALKRQLQLYSNDAEKAFAQEFHKPKADGSKGPVVKKVKVIEKQSSGVYVHEGKGITANGDMIRIDVFRENGKYFFVPIYAADVVKKVLPNKAPSRGKSGWIEMKDENFVFSLYPKDLIHIKTKKEDGLKLNLVSGGQLKTQEVIAYYTGADVSTASIAGKASDSNFLFRGLGIQSLTVFEKCQVDVLGNISAVKHEKRMDFSAKKR

SEQ ID NO: 2205 - protein, 1074 aa, unidentified
  REGION 1..1074: note = Description of Unknown: Cas Enzyme sequence
MGKSPAQDYVLGLDIGVASVGAALLGSDHIVGLHVRAFDKAETAKEGESLNTIRRAARLTRRRIRRRAFRLLRLRRLLKREGLIARHDPTQLDSAVSPWQLRAEGLDRKLNDREWAIVLYHVVKHRGFQSNRKSEAKSDEKAGEMLSGVTANQQRMQQAGWRTIGEMAERDPTFAEAKRNKGGGYTHTFSRSDLERELRELFKQQRAFGNTHTSAAFEKAIHTLLLARKPTLSGTNLLKMVGRCTFESSEFRAPKASHTTERFLWLTRLNNLRVSGRGEMRGLSEAERESLMQLPFTKAKLTYKQARKEIGLPDDIRFAGLDYWRKSKEGNELAAEDATLFEAKAFHALRKVYEAVGLKTEWQRDAANPDKLDDLAFAQTVLKDDTEAREWMLARGIEPAIAEAVLDVSFSDFIRLSIKALRKIIPFMENGQRYDEAVQSAGYAHHSHAVAHNKSRTIPRLSKDDFPNPVVYRALNQARKLVNAIVHEYGPPAEVHIELARDLSRPFDERQEIRREQQRYQDNKEKQVQEFEHLFGHPPRRDQLVKFRLYHEQDGKCAYSLEPIDLTRLDEDGYVEVDHALPYSRSFDDGMNNKVLVLTRENRDKGNRTPYEYLDGEHDSERWRRFAASVQTNKKYRLAKRSRLLRKDFSSTAAEGFRDRNLTDTRYICRAFKTQVETHLQLAEHSDSKRCVVVSGQLTAFLRARWGLLKVREDGDLHHALDAAVVAACTHAMVKRLSDYARRNELDVVRSGYVDPETGEVLDIFALRKLESHFPTPWPHFRDELLARMSPDPTELLSRIPGYPPRLAEAAKPVRVSRAPLRRGLGAAHQETIRSAKLLGEGKSSVKTPLTNLKLKDLPNIVGFDDPRNENLIAAIRQRLEEHGDDGRKAFKEPLYKPSKPGVQAPIVRTVNLSDTQKSGLPVRGGIANNGAMLRVDVFTDGKKFYAVPLYVADAVKPELPNRAVVAYKPEEEWTIMDPTKGFRFLFSLHANDWFEIRLKGKPSPLAGYYAGMDRSTGAISLWAHDRNQSIGKDGLIRGIGLKTALAVAKYNVDMLGRLFRAREEIRQPLQGKA

SEQ ID NO: 2206 - protein, 1100 aa, unidentified
  REGION 1..1100: note = Description of Unknown: Cas Enzyme sequence
MSEFHYALGLDIGIGSVGWAVLRNQPNGEPDRIQDLGVRIFDKAEQPKTGASLAAPRRDARSARRRLRRHRHRLERIRYLMEQRGMMSVSDIQAMYAAGGFQKSPYQLRAEALDRPLSKEEAVRVLIHLAQRRGYKSNSTAEAAKDEKETGKVKTAIEENRRCMAEHDYRTVGEMMYRDERFWQSNPDGTRYQQTRNKTDDYRFTVERSAIVDEAKQIFAAQRKLGADWSSEDLEAAYLSILEGQRSFDEGPGGESPFRGGIGDKVGFCTFEPDQQRAAKATYTFEYFKLLQDLNHMRLAGRGMSPQPLNAQQREILKETALRSASLSYGQLRKKLALADDTFFSGLYYGDKSREEAEKRKWPQMQSYHKIRTALDKVGKGTISSLTEEQLNAIASILTQYKSDAKRIEALRMAGIPVQFDEALLPLSFSKYGSLSVQAMQKLIPLLEQGMRYDEACTQIYGDHRGLHSEQRKNRLSLTDMDEITNPVVRRAVSQTIKVINAIVRTYGPPDVVRIELAREMSRNFDERRKAEKRQDENRAANERAKEQIAEYKGDHATGLDIVKFKLYQEQDGVCLYSGKNLDPSRLFEPGYADVDHIVPYSRCFDDSYQNKVLVLASENRQKGNRLPYEYFGYDEVRWHEYEVRVENLIRNYRKRQKLLKRQLSEEESAEFIDRNLKDTQYITRTVYNLIRDHLAFAESAYRKKPVQAVNGAVTSMLRNRWGVQKIREDGDLHHCLDAAVIAATTPGLVQRLTAYSKHRETWERPPAGYVDPATGELIELPQEARRDPFPKPWERFRQELEARLDPIDPRHQIDLLKLETYESDEEIKPVFVSRMPNHKVTGAAHAETIRSSKGGDGFTVTKTPLTNLKLNKFGEIEGYYNPASDTLLYDALLARLKDFGGDGAKAFAQPFYKPKKDGTPGPRVDKVKICEKATVGLPVRDGIAANGSMVRIDVFYVEDDGYYFVPIYVADTKKESLPNKAVVAYKAYSEWKEMKDENFIFSLYPGDLVCIQSRKGIKLNLAKGGTGEKEIVRQEGMYYYRAAGITVGAIQIETHDRRYLQPSLGIKTLQSIEKYQVDVLGNYQKVDLPEKRMTFSKEG

SEQ ID NO: 2207 - protein, 1148 aa, unidentified
  REGION 1..1148: note = Description of Unknown: Cas Enzyme sequence
VLGLDLGVSSVGYALVKEGSDNQESEIIKMGVRIVNSDPDFHGKFEKGQAASKNASRRQKRQIRRGYQRYKLRRNQLINVLEDHNLMPGFALRFEKSKLDLLRLRAKAATEQISLEEFGRVCMLLLRKRGFLSNRKANAEESETDFKQKLAERHAELGQKTIGQFLYSKVSENPDFSTKGLVFLRQAYQIEFDQIWQTQRQFYPHILTGGPEAKSRDSLYFKLAVETLFYQRPLKSQKHLIGFCRYETQKRVAHSFSPFYQQFRIWKQINDCVLTFPDGSMRHFSNDERGILFLELNNPNSAIVPKTGIVKPSKIFQLLGLDKKTQLNFADGINANKLHLKLNSAFQKVGLVVAPTFWDLDWRESENPGPSYLFWHTIYSIEEEKSIAQTLVDQARKRYGLTISTEIAEGLAANLTFNSDYGSISVRSIRKMMPFLEEGMTEYDAALAAGYERKEVQAQYDKLPRIEPNALRNPVVEQILNQMVSVVNDLMERTGIKPDEIRVEMARELKMNAKRRAAAIQANQKGLKEAQEARKAIEGAGNSRASTRDVLRYKLWKETGMVCLYSGKTIPFSDLFNGMTEIEHVIPRSRLFNNTRSNLILAYRKENEEKGQQTAIDFMEGKGPAAVQQYIDSVSRLFEQKLISKAKKDFLMMRGTDIPNDFVDHQLRNTQYIARAAVNHLAGLVGEKNVMTSTGQITDYLRERWELIDVLKEINLPYYEAANLVTREQKQKNDGTVQEVNWLESFTKRSDHRHHALDALITAFTSRALVHRLNNLNQYVDGQAELKHRNIIAPPPIPHFRALVKDHLQGILVSFKKPKSKAISPKMILKYPGQRKKSNEKIKGLVPRGSLHEETVLGKIKVYEKVPLNVRFYRFEDVVDKDLKDYLLNLKAQAESAQKKAFKAPVEWRGKTLSEVVCWKWMFTKRTAVQTLTAKQIKDKIVDAAIGKLILERFKSVQEDEKKFQKSILEHPLIFNGKTVQRITVFDEGSLMPVRQGFAYSKNNHHAIIYKDEQGNLRDEVLSLSEVVERSTRAFLETGIIPKPIQPKPAQGEEVVMTLQINDLVVIGLEKEKLESILKSGQHSLLAMHLFRVQKMSKGYYVFRQCYQTDIQLTAQFAFRRIQKPLKQFSSVTRVRLSPAGYFMETLP

SEQ ID NO: 2208 - protein, 1094 aa, unidentified
  REGION 1..1094: note = Description of Unknown: Cas Enzyme sequence
MRYALGLDIGSESVGWSVVELDHEDEPIRLVRLGVRAFDVVHREEASASTPAKERRVARSQRRRLRNRRRRTRRVGGLLQSIGLVRNSAELQELLVTKPEDASPWQLRVRALDHQLEPRDWARVLYHLARHRGFKATTRGELESEDTKEKEKLGLMLSSVKAIHEGWHGKYRTVAEYMESPEWREVHGNQKRNRSGSYVCTIGREDLIHEAHTLFESQRKLGNPFASAETENEYIQILDEPPHLLEGEELMKRVGFCFLEPTERRAPKATLTAQQFVALQRLANQRLVSRDGLLRSRGLTPDEIQLLMAEATEVEKVTYKRALKALELNNEWLFLVNGQKRAKKLEELQTETLITLEGYHKVRKALEKEFRDLWEKLRADRDYFDEVAAVLTYYLQADSAVSALIKLGLEREAAQCLAQEVVFRGHTRLSLKAMRALIPYMREGHTYDKAAELAGYVHYRLPAVEKSPTIPPLESLQEFVGITNPNVRRAINQARKVVNAIVREHGLPSRIGLELAREAAKSKARRREEESRMRENERDKKRRFDHIREIAPDADPEKVWKKHLLYEQQGGKCAYSLKDLDLARVLTDPTYTEVDHIIPRSVCFDNSLNNQVLVLAEENRNKGDQLAAEYVRKAHGEKHYEQYLGWVASCQMPPRKRQFLQTPEVTEEQRKEMQRRYLTATQFASRCFLGILRQYFNIPENRIIPVNGRMTADMRWLLGLPEKEREVSDTHHAIDATMAALADHKTVHRMAQYFKMKETAFRDPEGRWITPDGEVIEPPEIVAWPGLREDLLAKSGAVFVSRMPNRRATGKGHKDTIYSLRHVKKVLDELPSSGKLSLPSDAPRPTQRVALTALSDVQIKDILIEPSPILVDEANNKRLYDLIRQRLRAAQDKKDEKDRRTWAERAFGAEADTGPLRMPTNDGSEGPIVRSIRVYVDVLSGLAVRGGIAESDTIVRLDLYRRPNHRGEPRHYVVPVYAADLAAGWCPKKAAVAHKPESEWPEIDDSYDFLFSLYKGDCFRVWKSPEEPGPYLYMTSFDRSGITISGNFHDRSNKSDNGKIQPVRVSVGTSYKVEKFEVDLLGNLHLVKREPRPV

SEQ ID NO: 2209 - protein, 1081 aa, unidentified
  REGION 1..1081: note = Description of Unknown: Cas Enzyme sequence
VSRLVLGIDIGVTSIGYGLIDLETGNFVDYGVRLFKEATAKNNDDRRNKRGSRRLISRRKNRLEDMRNLLKRLGVFSDDYKDLNNPYEIRCRGLEEKLNNQELTCALMHIVKHRGSSLEVAEGENNGNEKGTKVILSQNSLELKIDEYVCKVQLKRLKEQGTLRGIKNNFKTKDYIKEAEKLLSNQSIDEDGKKAIISLIERRRHFSEGPGSKKSPTLYGRFFYDEYGQLQEIDLIKKMRGKCSLYPDEYRAPKQSFSAELFNFLNDLNNLSIEGEKLTEKDKQNLINIILKKGNITVKGLAKELGVSLEKISGYRINTKRQPLLTEFKGYKVLKKIFDKAGKSELLMETMLLDDIISILVETKIIEERIERIRNLNSNFSNELLDDLANITTISGYHSLSFKAIRELNEEMLKTSMNQMQIIHQNKLYHQKIGKYKGRKNIECDENAILSPVAKRAQREAFKVINKIRKEYGELDSIVIEMTRAKNSKEEKDNIKNRQKRFEQENKEVDKLLLEANYDPDKINAKTKTKIRLYMQQNGKSAYCQNNLELPLIIRDPNAYEIDHIIPLSISLDDSLANKVLVTHLENQEKGNSTPVEAFLKAKFSKGSLEKYRAYVYTNNQFYGKKKDYLLYDKDITKYSNAKEFINRNLVDTSYACRVVLNTLTDYFRDNEIPTKVHTVKGQATSAFRKRIKLDKDRDLDYSHHAIDALIVASIKKLGLLNTLLSKYDLDDLYNSDTGEIIKVEDDEKYLDSKYIEYISNLKNVKVIKFSHKIDTKPNRKIADETIYSTRIIEGNERLIKKYPNIYDPKFNHLTEDILNGKEDKYLMKRHDYQTFEKIKVIILNHYEMFKNDSKYYSKKKNGEIELKGENPLTEYKEEHGFITKYSKKGNGPNITSIKYDSENLGNHISITDNYQITENNQKKVVLLQLSSYRSDIWLDKDKYKMVTVRYSDIKYNKSKNNYYIDQNWYKEQKEIKKISDEAVFIASFHHDELIGIVKKKGSACIDPGNENEHDGVNVEILKFTATNNDKENKIEVKPIDYYCSKQLMPSIGTFVKVEKYATDVLGNLYKVTNNHLKLEF

SEQ ID NO: 2210 - protein, 1086 aa, unidentified
  REGION 1..1086: note = Description of Unknown: Cas Enzyme sequence
MKYRLGIDLGTNSLGWAAVRLMEEQHDRLSPGPLLDMGVRIFSDARNPKDKSSNAAQRRGPRGARRNLDRKSGRKRHMLHALVRAGLMPTDEPSQKELEKLDPWILRYRALNEKLTPHEIGRALFHLQQRRGFKSNRKTDGDEAGAMYNAIHQARARMKEHDARTLGELFGRPRHEQKQANEDAPHRGGKPMPQARVKARVEKSKMVYDYYPDRAMILDEFEQIWEAQTPYHPDILTGEAHDSIRHVIEYQRPLKPQKAGRCTFLPEQERAPKALPSAQYARILQEVNNLKVGATGEVSRPLDREQCQTVIDFLIRPSSKTAKRTFKLIRKKLKLPESQRFSHESPKRDHLKGDLTAAGLMQKEAWGPDWFDLGRATQDDIVMKLLDTEQEQDIVDWLVGEYGMDEPRAQHISRLNLPDAHGKLSRAALDRIIPRLEAGERYDEAARQEFRDHRAMGDGEIHEKLPYYGEILNRHTAFEKDDPQNDEEQYGRVANPTVHVALNELRKVINDLIRRWGPPEQVVLELARDLPLSDRGMRELEREQVKNQEANDKRNTWLEEQKLPTNYEHRLKLRLYEEAEEAFGGIAQCVFTGKTISKTALFSADIEIEHILPVSRTLDDSFANKVLCIRDANRVKKNQTPYEAFGHSPPGYDWENIGLRAAELPGSKGWRFAPDAMEQWESRGDFLDRQLTDTRSIATLGKKFVEGLYGGQGSAGQTRQVWVIPGQLTSDIRHFAGFNTLTGLTGSNSKDRTDHRHHAVDALVIALTDQAMVKRAAGLAKREDAAAHHDIMRKMADPLKRYRRSAEDRLSKLTVSHKPDHGFQDAMHNDTAYGLTGETDEKGNALLVTRKPLDSLSKPADLDKIRDEHLRRFLMLKLISPALGSADLDKIPDERLRKEFARATMGLTGKDFTQALIQAGRHMSPPVYSVRVLDPMKPASFVRVEHGDGHSKAYMGSSNYCYDIFMGEKGKWSGEVITTFQAYQMARDNPDWWHNLGGRDGHPLIMRIRKGDMLELETDPGKPIRVVVYKFSTGKIFMHEHFEANASARIAEKELLGYQMAPSSLQRAKAVRLTVSPSGKVTRHRL

SEQ ID NO: 2211 - protein, 1055 aa, unidentified
  REGION 1..1055: note = Description of Unknown: Cas Enzyme sequence
MSILSSPQDFRSGLVLGIDLGSGSLGTALVNPAAERIEFLGVRIFPAGVEGDMENGREEPRSAKRRQARHARRQTQRRQRRLYKVFHLLQRMGLLPAGRRVDVLCQLQRDLELRYPETTVLPWFLRARALDHPLEPYELGRALYHLAQRRGFLSNRVGGKEDEAERSIVKSAIKGLSAAIQDSGKRTLAEYMVSLNPRLTPLRNKPETSNHYTHRSMFQDEFARIWDAQRQYHPEALTEHRRAKLFHALFHQRPLKDQSYLVGPCELEPEERRAPLRLLAAQRFRILGFVNNLRLRLEDGTERKLWPNERAVLLDLCEKSEKLSFAAARRALGLAKALRFTIEEGGEKNVPVDLTATRLRAALGPQWDDLSLAQKEDLVEDVGDGRRCPTDEDLDACARGKWGLPAELAEALTRVRLPDAYGRYSLKVLRELLPALEDGLTVEEAIRQHTKYAATRKPAEPLPLLPKVSDVLGEVRNPAVLRALTELRKTVNAIIRRYGKPDYTRIELARDLKKSKKERQNETSRSREREKLRQLAVEELRKHDSVRFANPRGPDIEKCLLAMEARWRCPYSGNQYGFTDVFGDHPAVDIEHIIPRSRSLDDSYLNKTLAYRSCNAEKGNRTPREWLFESDNERYERMIQVVKGSDPRFEVGKKLRRFAMELSDPDSLLREFTDRQLQETRYASKLACRYLGCLYGGATDNCGNQRVFASAGQITAKLRRAWDLNRILSGQPEKSRADHRHHAIDALTVAVSSRKLIGDLAAASGEADRLFRRKVILPVPWAGFGEQTRSVIESIQVSHRPLRKLSGPLHEETLYSQPRAHVVGADRMGRPVTKDFVHYRVSVTTLNSARDFQDIVDSSVRAAVEEKAAKLGGGGAKFLNDWPVLTTRRGDKVPIRRVRIRKVQSVVPIGQGPAQRFVIPGSNHHAEVVGQLDASGQIARYACHTVTLLQALERKRQQAPVVQREHGPGCRFVCTLSEGDLLEAQRPEDPEPRIWKVRSVRQSGQLELTPSLDARMKKEIEEAGLIWGPAVNPLFLKRARKVVVTHLGEVIPAND

SEQ ID NO: 2212 - protein, 1362 aa, unidentified
  REGION 1..1362: note = Description of Unknown: Cas Enzyme sequence
MTKLGKPYGIGVDIGSNSIGFAAVDENSHLIRLKGKTVIGARLFEEGKAAAKRRAGRTTRRRLSRNRWRLSFLRDFFESHITPTDPNFFMRQKYSEISPKDKARYKYEKRLFNDRTDAEFYQQYSTMYHLRNRLMTDPSRADVREIYFAIHHILKSRGHFLTPGDAKDFNTNDVALDEIFPALQDAYAQVYPDLGITFDEDKENEFKTILLNEIATSIDTQRALVKLLLAEEDDKDILKQQKQVLTEFAKAVVGLKTKLNLALGTEVDSSEATAWNFSLGQLDDKWAGIESAMTDEGTEILDQIRDLYRARLLNGIVPTGKTLSQAKVDDYTQHHEDLQLFKAYLKQLEDDGTAKAIRQLYDRYIDGDDAAPFLRENFVKALTKDVTAHPNTKSPELLERLAQPDFMLKQRNKANGAIPVQMQQRELDQIIKNQAVYYDWLAAPNPVEKHRKSMPYQLDELLNFRIPYYVGPLVTAKEQKAAQGGVFAWMVRKDPEGNITPYNFDEKVDREASANTFIQRMKTTDTYLIGEDVLPKQSLLYQRYEVLNELNNVRVNNEKLSIEQKQQVIRELFERHNSVTIKQFAENLRAHGDYAHIPEIRGLADEKRFLSSLSTYRQLKSLLPEAIDDPAKQADIENIIAWSTVFEDAAIFKTKLKEISWLGSEAITKLSNIRYRGWGQFSRKFLNGLTLGNGHTIIQELLLSTNNLMQILTDETLQKKMTELNADKLKTANINDAIDNAYTSPSNKKALRQVLRVVDDIKRAADGQDPSWLYVETADGGGTPGKRTRARQHQLQEIYANAAHELIDTAVRGELEDKISDKADFNDRLVLYFMQGGRDIYTGAPLNIDQLSSYDIDHILPQSLIKDNSLDNRVLVHAIINREKNATFASTIYAQKMNATWRQWHEAGLISGRKLRNLQMRPDQIDKYASGFVARQLVETRQIIKLTEQIVAAQYPDTKIIAVKAGLSHQLREELEFPKNRDVNHYHHAFDAFLAARIGTYLLKRFPNLQAFFTYGKFTKADVKKLRGFNFIRDITHAEDKIVAKDTGEVVWDKQRDVDELDRIYNFKRMLITHEVRFETADLFKQTVYGARDSKEAGGSKQLIPKKKGYPVDIYGGYFRENTAYLAVVKVTKKTETIFKVVKIATSQVAALNKARSRSTAEELSVLTELLKPKFSKVGKNGKITDTPFEVVLPRVPREQLFYNAKYGFFMVNSDTMFHNFQEIWVSRSDQKILQQIRKAKIDYPNVDQDLDNLFHNLADQIVKYFDLYSIAGFKEKISQSQNTFNDLAVDDTDQSVGKITVINELLKGPQANGMTGSLKVLKISTPFGFTQDKSGVLTKDSSIIYQSPTGLFERSVRLTDL

SEQ ID NO: 2213 - protein, 1382 aa, unidentified
  REGION 1..1382: note = Description of Unknown: Cas Enzyme sequence
MEYYMGLDMGTNSVGWAVTDPQYNLIKKKGKDMWGIREFEAAESAADRRIHRVSRRCNQRSQVRIGLLKDIFSDVLMAEDENFLPRLDNSFYKAEDKDSSLTTLDAIFADKEYRDADYYKDYPTIFHLKYDLIMDRVPNDGRYARKVYLALLNYFKRRGHFLNESLSGTDENGKDVWWAYEELCTVIYDELDISLNHDSSLAEDFRAVFCDASLSRSRKRERLMELLGVTKKNVQQFIILGAVCGLKTDLLKLLSIESEQKADIDFSSSGIEDKLPEIYSIIGESFVNIIDALKQVYDAGVLAGIMSGTDEEGNTIQWLSQARVNSYEKHKKDLKILKACIRKYCGEAEYDSLFRKDVDDSYSAYIGSVNSGSVVRRGENLSASKSGERYANLKKRIKKDLTDYADDENVKYILSELDAETFLPKQLTFANGVIPNQLHEREVRKILGNASKYLPFLKEKDESGLTNSEKIVSLFTFRVPYFIGPVSQSYKGNGWAVRKSGMETKTVYPWNIEDVIDYDDTREKFILKMVRECSYIAGEKVLPKESMEYQAFMVLNTINNIKVRNEKISCDLKQDIYHDIFEKNGKVTKKKILTYLNNRGIEVAENELSGIDTVIGCQLSTYRRFYGVLEDELSKDSIKHMVEDIVFKGTVYGDSKKMLKELIEEQYGDRLSAGQMKRIMGFKFRDWGNLSKQFLELEGCNKQTGEVVSLIRALWEDEDNLNLMELLHSDKYTFNESLKEKHQKSMKSITEFTYEDLNEMYFSAPVKRMIWQTLLIIKEVTGILGCLPKKIFVEMTRSEEEIKGDAGRKDSREKELLELYKEIKDDRSWDDEIREAGSSGRLRSKKMYLYYKQMGCDMYTGLPIDLNELFDDNKYDIDHIYPRHYVKDDSIHNNLVLVDKRKNSRKSDNYPIDAAIRKNEKIEAHWRMLHQKGFMNDEKYRRLTGDRSFSEEQKADFIARQLVETSQATKGVNDLLKEILPDGTSLVYSKARNVSDFRRDFKFYKSRMLNDFHHAHDAYFNIVVGNVYDTKFTANPMNFIRKERGDYHLGRMFERDVVRNGYTAWVAPVKDKVTGEIIEPGASLATVQKVMSRNTPLLTRLSTTQHGAISDATICSASKAKEDGYLPVKSFSDPKLKDVTKYGGFNSIKIAYYFLVEHEVEGKGKDKGKAIRIRTIECLPVYKRAYVESHEDGLYQYCLELGLKNPSVRVKRIKPQSLIKVDGFPLYITGKTNKQYVVRNACNLILTSDWNRYIHVIEKYNLSGQMPKEISPEDNLRLYDELTSKHKDGIYAKRPNSIGKTLENGREKFINLEIGKQVNVLTQILNLSLICNSSSADLKEIGGSSKTGVTLISKKVSGYREFKLINYSVTGLYVKEVDLLRV

SEQ ID NO: 2214 - protein, 1353 aa, unidentified
  REGION 1..1353: note = Description of Unknown: Cas Enzyme sequence
IREFEAAESAAERRTHRVSRRSHQRSQVRIGLLKSIFEPALEAEDANFLARMENSFYKAEDKDEKLTTLNAIFADADYRDSDYYRDYPTIFHLKYALIMDKVPNDGRYARKVYLALLNYFKRRGHFLNENLSGNDEGGKDVWQAYVELCETVYNELELAMNHDSTLAENFRAVFCDTSVSRSRKRELLMELLGISKKDNAQQYMILGAICGLKTDLLKLFSIESEQKADIDFSSAGFEDKLPEIYGVIGESYAGMIDAMKQVYDAGVLASIMSGTDEDGNPIQWLSQARVSSYEKHKKDLKILKECIRKYCDDAEYDFLFRKAEDGSYSAYIGSVNSGKKARRGEKLYASKSGERYANLGKRIKKDLEPYAEDEKVNYILEELKTETFLPKQLTFANGVIPNQLHEREVRRILENASKYLPFLQERDASGLTNAEKIISLFTFRVPYFIGPTSSSLSLQNYKGNGWAKRKSGMENVTVYPWNIEEVIDYDDTREEFITRMVRECSYIAGEKVLPKESLEYQAFMVLNTINNIKIRDEKISCALKQDIYHDVFEKNGKVTKKKILTYLNQRGIAASENDLSGIDTVIGCQLSTYCRFYGVLGDDINKDRVRHMVEDIVFKGTVYGDSRKMLAELITEKYGSELTADQIKRIIGFKYRDWGNLSKDFLELEGCNKQTGEAVSLIRALWEDEDNLNLMELLHSDKYTFEESLKEKHQKNMKSITEFTFEDLEGMYFSAPVKRMIWQTLQIIREVTGILGCPPKKVFVEMTRSEEEKKGDAGRKDSREKELLELYKQMKEDRSWDEEIREAGASGKLRSKKMYLYYKQMGKDMYTGLPIDLNELFDDNKYDIDHIYPRHFVKDDSIHNNLVLVDKRKNSRKSDTYPIDSSIRENEKIAAYWRMLHEKKLMNDEKYRRLTGNRPFTEEQQADFIARQLVETSQATKGVNDLLKELLPEETALVYSKARNVSDFRNQFGFYKSRTINDFHHAHDAYLNIVVGNVYYTKFTLNPLNFIQKERTSYNLGHMFDREVTRNGYTAWTAPVFDKMTGEIAEPGQTLATIQKMLAKNTPLLTRLSTTQHGAISDATICSASKAKEDGYLPVKSLKDPKLNDVTKYGGFNSIKNAYFFLVEHEVEGKGKDKGKMIKIRTLECLPVYKRAYVESHADGLYQYCLELGLKNPSVRVKKIKPQSLVRVDGFPLYITGKTENRFVVRNSCNLVLAPYWNRYIHAIDKSNLSGRMADEISAEDNIRLYDELQNKHQHGIYAKRPNPIGDVLEKGRKKFVELDMVRQVYVLSQILNISLICNSASADLKDIGGSAKTGVALISKKITGYQEFKLINYSITGIYEKEVDLLTI

SEQ ID NO: 2215 - protein, 1410 aa, unidentified
  REGION 1..1410: note = Description of Unknown: Cas Enzyme sequence
MGRYEGDYYIGLDMGTGSVGWAVTDTSYHILRAKGKDMWGARMFDEAHTAVERRMNRVNRRRRAREKARVAMLRELMEKEISKVDPGFYYRLDESKYHFEDKTGANAGQKYAIFAKGSTGETEYTDVDYYRQYPTIFHLRSELVHSDAPHDVRLLYLALANMFKHRGHFLNESLGVDGGAGLEDSWVEFMDSYTQILSKQSSDDESVNNIYMDVDLKIFKETILQKGVSKSQVREEAAKILGITKKNKREYAILTLICGLTGNLEDIYGAKAFEGDENKGKKTMNFRQSSYEEDIAEIQDFLDEEAIALLLAIKSVHDVLLLDQIMQGQEFLCDARVAMYIQHKEDLVLLKHVVKRLVPKEYNNLFRKMQDGNYSAYIGSTNCDKEDGKIRRYVADHATAKRNHEPDELYKTVQKLLKPYAEDEEVATILSRIDGEVFLRKQLTSANGVIPNQVYVREMKAILNNAENYLPFLLEKDENGLSVSERILELFQFRIPYYVGPIGGLDKNQKNKWAVRISGERITPWNLKHVIDAEATRKAFIENLIRHCTYIQDKKVVPKHSLIYEKFMVLNELNNVKVSGELLPVELKQDIYNSLFMKGKPVTRKQLCSFLVVRGVISKGDDNLISGIEERFHNSLSSIGKFNGIFEPPYLDREHTELIEDIILLGTIYGDSKKTFRELVQKKYGENSNAVIKLSAKQVQRISGFKFSDWGRCSREFFELEGASCSDGVIRTIISALWETQDNLMQLLSHDKYTYIENLNQMVEREEKALSEWTIDDLEDMYLSAPVKRMVWQTVRVLSEIEEVMGRPPKRVFVEMTRENREKGNRTKSRKSQLIELYKNPELKKEQRDWISELEGHSEQEFRIKKLYLYYCQLGRCMYTNEPIDLDQLMDDNLYDIDHIYPRHFVKDDSLENNLVLVKKTKNAHKSDEFPIEASIQQHCYPLWADLYKKGLIGKEKFDRLTRKTEFTLDEKVGFVQRQLVETGQGTKAITQILQDALPKSSDVVFSKAGVVSQFRHDFGIWKSRSVNDFHHAQDAYLNIVAGNVYFTKFTRDPRNFIKDALTHDNDPKYHYHLSKMYENTVQRGNDVAWIAEKNGHNNTIDVVKKEVFKTTPIITRRSYVASGAITSKDTNWGIQKTKNAAVGTYFPLKTSDERLADVTKYGGKSGVSTAAYTLISYKQAGKEVRTIESIPSFLMNNGRLDENGQKKLLSYLSKTITLKSKRECSDFRIVYPLIKFNSLLKIDGYYYYIGGKSKSGYYLYNAVPLKLSKDDVMYVKKIEKAIKSDDFGEKNPFGELVLSKERNQMLFEYILLKLQSGIFMSRKGGLLSNLISGKDKLYELTLENQCRVLLNVIDSFSSKTQNISLELLDKPAHAGQIELSKNVAKLQELILINQSVTGLFENEVDLLHL

SEQ ID NO: 2216 - protein, 1381 aa, unidentified
  REGION 1..1381: note = Description of Unknown: Cas Enzyme sequence
MEYYIGLDMGTNSVGWAVTDVNYNLIRKKGKDMWGIREFDEAESAAERRVHRVGRRSHQRSQVNIGLLKEIFANALAAEDENFLARLDNSFYKAEDKDENLTTLDGIFADADYHDADYYKEYPTIFHLKYDLIMDKVPNDGRYARKVYLALNNYFKRRGHFLNESLSGSDEGGKDIWTAYVELCDTVYEEFDIVLAHEYELENKFRSVFCDASLSRSRKRDMLMDLFGMTKKENAQQYMILGAICGLKTDLLKLLSIESEQKADLEFSSAGFEDKLPEIYAIIGESYANLIESMKQVYDAGVLAGIMSGVDAEGNPIAWLSQARVTSYKKHKKDLHILKECIHKYCDEKEYNHLFRENADGSYSAYVGTVNSESKVRRGEVLHASKSGERYANLAKRIKTDLEPYANDENVRYILDELKAETFLPKQLTFANGVIPNQLHEREVRRILDNASKYLPFLQEKDESGLTNSEKIIRLFTFRVPYYIGPVSQNYKGNGWAVRRAGMEKKTVYPWNMEAVINYDDTREAFITKMVRECSYIAGEKVLPKESMEYQAFMVLNTINNIKVKDEKISCELKQDIYHDIFEKNGRITKKKILTYLNQRGFSVEENELGGIDAVIGCQLSTYRRFYGVLGDDLSKDSVRHMVEDIVFKGTVYGDSKAMLKDMIAEKYSDELSKEQMKRILGFKYRDWGNLSKQFLEMEGCNKQTGEITSLIRALWEDNLNLMELLHSDKYTFADTLKEKHQKNMKSLTEFNFEDLEEMYFSSPVKRMIWQTLLIIREVTEILGCAPTKIFVEMTRSEDEKKGDAGRKDSREKELLELYKSIKDDRSWDEEIKNAGASGKLRSKKMYLYYKQMGRDMYTGLPIDLNELFDDNKYDIDHIYPRHFVKDDSIHNNLVLVDKRKNSRKSDNYPIDKSIREDGKITAYWRMLHDKKLMNDEKYRRLTGNRPFTEEQEADFIARQLVETSQATKGVNDLLKELLPKNTILVYAKAVNVSEFRKQFDFYKSRTINDFHHAHDAYLNIVVGNVYFTKFTANPLNFIKKEKKEYHLGRMFDRDVERNGYIAWKAPIYDKETKRMVEPGESLTTVRKVLATHTPLLTRLSTTQHGAISDSTICSAAKAKKDGYLPVKSLSNPKLMDVTKYGGFNSIKNAYFFLVEHEVDGKGKDKGKPVKIRTLECLPVYKRAYVESHEEGLYQYCLELGLKNPSIRMKKIKPQSLIKVDGFPLYITGKSENRFVVRNACNLVLGAQWNQYIHAIEKSNLSGRISENITVEDNVRLYDELMKKHTEDIYAKRPNSVGEILNKGRAKFVDLDVAKQVYTLTQILNLSLICNSALADLNLIGGSTKTGVARISKSVSGYKEFKLINCSVTGMFEKEVDLLKV

SEQ ID NO: 2217 - protein, 1411 aa, unidentified
  REGION 1..1411: note = Description of Unknown: Cas Enzyme sequence
MPSYEGDYYVGLDIGTSSVGWAVTDKTYHILRAKGKDLWGARLFDEAKTAITRRSNRVNRRRREREKLRISMLRELLSEEINKVDPGFYHRLEESKYWIDDRTGDNVSQKYAIFAKGSTGTEEYTDKDYYEQYPTVFHLRSDLIHSDKPHDVRLLYLALLNMFKHRGHFLNESLGTDVDSGFEATWSEFLTSVSALIETQSDDEDVPIHNSFASVDVKELKAVLMQKGISKSQIREDASKILNISKKSKQDYAILSLVCGLVGNLEDIFGKDRFTELEDKSKKSISFRKGSFEEDFAEIQDFLNDDDTSLIMVIKELHDILLLDQIMQGHTFLCDARVSMYNEHKEDLALLKKTIKHLVHDEYSNFFRKMQDGNYSSYIGSTNSDKTGGKVRRYVADHSTAKRNYDPEELYKTITKILSPYKGDSDVDTILSKIAGETFLRKQLTSSNGVIPNQVYVREMKAILEKAETYLPSLRNIDSSGLTVSDRILKLFTFHVPYYVGPIGGLHKNDGNKWAVRTSGEPVTPWNIDSVIDMGKTQQAFIENLIRHCTYLKNEKVLPKHSLLYEKFMVLNELNNLRISGNPIEIELKQDIYNDLFMTGKQVTRKQLCEYLISRGKLLKGEESLIGGIDDRLHAHLSSIGKFNGVFEAPYLDLRHMVMIEDIILLGTIYGDSKKMYREQIENRYGKNSDSSIKLTDKQITRIAGFKFSDWGRCSKAFFETEGASKEDGVVRTIIDALWETNDNLMQLLSPDKYTYTENLESMITRDSKALSEWTIDDLDDMYLSAPVKRMVWQTLHVLSEIEEVMGHAPKRVFVEMTRENRDKGVRTRSRKSQLLDLYKNTELRKEQRDWIAELECHTEQEFRIKKLYLYYCQMGRCMYTGEPIDPEQLMDDNLYDIDHIYPRHFVKDDSIENNLVLVKKSKNARKSDDYPLNNAIQSNCIGLWKDLQNKKLISKEKYDRLVRTTEFTLDERVSFVQRQLVETGQGTKAITQILREALPESSDVVFSKAGIVSQFRHDFDIYKCRSINDFHHAQDAYLNIVVGNVYYTKFTKNPRNFIKEALSHSNDERYKYHLSKMFNYTVHCGNETTWICEKDGKNNTIDLIKKQVFKNSPLISRRSYVATGSITAKETNYGKQAASKAATGSYFPSKTSDERLADVKKYGGKMGISTAAYTLISYKEGNKLIRSIEPIPTFMMNAGELSKDRQTSLLDYLKGKISSNSKKICSDFKILYPIIKFNSLLKVDGYYYYIGGGTGNRYYLYNATSLKMPVKEVGYIKKIDKAIKNEDYSETDKNSKPIITKEKNIALFELIINKMSTGIYTYKKGPLLSSITGVKERFYDLNLQKQCQFLQILISAFGPKTQNIDLSLLGGVKNTGVMYLPKNIDKLKECILINLSITGLYENRVDLLKL

SEQ ID NO: 2218 - protein, 1466 aa, unidentified
  REGION 1..1466: note = Description of Unknown: Cas Enzyme sequence
MAKQSDKNLEKFGEYYIGLDVGSGSCGWAVTDEDYNIVKIAGKHLWGSRLFAPGNTAEDRRVFRANRRRLQRRAWRISLLNELFNTELAKKDPSFLIRLKESELNGDDPNKTIKNRFFLFDDQNFTDKDYLKNYPTIYHLRNKLLTDGVDDIRLLYLGIHHIIKHRGHFLYQLGTNELLDKIKNATFAWDNACESVASCLLKDTEESPAKEDLKLALIDLLKANDFEALVAKGITEKKQNIDDAFKSLATFEKENSADLPPDYKSLKKETMNLIKGNVADCTKLFGIEDLDEPIKIKFYADDFDANFDKLSDEQQGHVENIKAFYDLVKVKDLLGENSYLSQAKVKLYNEHQQDLKIFKSLIKEKLTQERLTAAGYKGTLQEFKKDIFLDEKDVDKSVKIARNNPDDKACNGSFYYNLTHGQRASYLEPSDKFKKGKAYSIYKVLTTLAKNWLSDEASGLSKEEKLLLSKLDNLTLLPTCTTKENCLLPYQLNEIELNKILEIAENKFTFLKVKGNDGLSVSDKIKSLLTFRIPYFVGPLNEHSKFAWIKRKEDGSITPWNFENKVDLSESAEKFIKRMTCKCTYLFEKDVLPKNSPIYCKFMALDILNNLHLKGRRLNTLQHGLVKEIFYDVCCKRKITKLNHIKKYLTDRGLLTDNDLLEGMDEDQSINMSSWIDFTNLLSTLKIDNLTPTSDFCEKVVFYSTVFGANQKLLKERLKEEFKDLSNKYPALIDKACKLKYSGWGSLSKELLVDIKGMSKLQPTDPDNILNYMEQGFGNLMELLSKNFTFSDAIKNINRKSRNSVNIFSYENLVKDLYCSPSVKKMIWQTLLVVKEITEDIMGYPPKRIFVETTRGNLESKKGQKTQSRYDFLNEIYKDILNNKDKCAICKEHDIDIKALSNELVSVSNASLSKNNNKLYYYYLQLGKCMYSGEDINLNDLSDDSLVDIEHIYPRAKGGQDDFSNKVLVKKIKNASKSDNSLSSAVVQKMKPFWQHLQKLGLLSNINDKYGTKKLATLCKAGNLSEMEQEGFIARQLVDTSQATKELVHLLEDLYGPNNTKVVSNKANMIFKFKSYYGLRKVRELNNLHHAKDAYCNIVAGNIYYTTFNSFNFSRVDEVFSTVSLDPTDKEKPYIFNYYLSKDKKEQIRKIYYRNDILLTEKTEETTGTFYDQTLYAKKAELESKKKNLPSELYGGYKSLKGAFDCLVKVTTKKTEYVKLISIPILYKNKVKEYLDKNLSCEKQFVSYQVLIEKIKGPYLLSNDSKGCIYRISGHSNGYLLSGQYHSLVLNENLTKTLSKIYQYSNKKKEDNNAQVNCFDAEINSLFKSIGERTLCAPLCNLDIQYQKIFDIFRSLPIEKLKLTLELKADLIVELIKIFQNKTVTVNTKLLSDYCDKASVSSDDICVLKEFIEFYQKEKKSKLSKYAGKCNISENLPIKDNWSIINRSVTGFYESAVSINELFKRK

SEQ ID NO: 2219 - protein, 993 aa, unidentified
  REGION 1..993: note = Description of Unknown: Cas Enzyme sequence
MKRVLGLDLGTNSLGWAILDVPESDSESGAVVALGSRVFPEGAEESGSKAATKCAERRQQRSMRRQIARRAKRRTVLRDQFAGLGLLPTDADAYAQLMDQNPNLLLKKGNDGKQLTLGEIGRVIYWFSSRRGFLSLRSGGSNILSDDEDDESFKPVRFRQRQFSETTREEVETGQEDSLVEFLKTQEQYYPDLIDHKFIFGRRGRLEYPVKPIAQDEFLSGADSSVFDEFGVHGLVFFQRKVYWRKKTIGKCSIDPGSGNRAARAERLSQRFVLWQTLAHLRVGREKRVLTRPERDLLYQILNKQKTLAFSKVRKELSLDKDEAINFERPEIKSLQGNQTEYSMHQCLGETWESFTEDQRNQVVFLLLGESTDTQMRQALAAQFGLVAEQIDALLKKALPPGRMNFSRKTLARILEFLPDAESVHAATVEAKFIEVDTTFDLHSVTNPFVKASLSQVTKVLNSLTQHFERSDGSTFDVIRVELTRDVSNSVKIRKEIEKKQSANRKVRDEAKERIAQLAPGAENSRDSIRRMQLWHEQGGECLYTGKRISEADALSNKFQLDHILPRSQTMNDSLGNIVLVATSANADKGEHTIFEWGGEDKVNEVVARARKMKLQRAKINNIESDHVADDAIPSSLLVQTGYINSLARQCIEKDFGIQPEVSRGRLTAHLRYRIGVDKDSNDHRRHGLDAAMVALTDIRTAQKLAKEYKAHRDRDKEREEAYGDWEPWEGFRADLMSKYEEVIVSHRSARKVSGQLHEETYYGKVNSPNSTKDSMYARRRPVSGGFASKKQLDEVADSAVKKALIENLRSRGQDPDKAGKFTFDPKDPPVMPDGTEIKKVRCHMNLPSNIILRPESAPKTGVTLGNNYGAYVYINSETEKWRVDIVPRLCAHINRGKSQSELRKLYAQESEEFKFSLTIGEVLCLTDPSSEQSDYFVVFKMSGDAKTVSVRKVSDSSKDIEKQKHMSADKLAEWAASKVAILPDGTVRRAND

SEQ ID NO: 2220 - protein, 1211 aa, unidentified
  REGION 1..1211: note = Description of Unknown: Cas Enzyme sequence
VEPFASVPGRYDDETRRDSIDAAVGARRRATRAANLGTFTGYRIGLDIGNGNIGWCILFEDGMVPRFMTAEDLAAHNAALPKHARRTQLPDMASFVPLGTYKFRARNENGVSLSKVRASERAKRRLLDARQARKRHLRDVLIRAKLLPAEGEAVGGHSDIHADVLRAKLLDPAFVAHRHDLGRALYNTLKRRGWMKPRGRAGEDNDSTFGKTQTKTYREVLSRFGCPTIGAFLERCAQDAKADGVPRFRKRHRTLAVQKQADAKDREEALRSGKSYEAFQFLTPTNELVREEAAALRAAQSAHVPIDDETWALIEEKAGFRRDLKTRTPGRCRFLTDEPRCIRALPSFQLFRILQQVNNLRVDGRPLDERQFRDVVDLLQRNDRKTLRDIAETLMLKPKQLAQAEREGASLVGARTDVALGRVLGEAWTSLSIEERDRWTMRFLRRHWNPDGEKPWTKDDEAALESDCAATFGPDALDRIDGEAAKEFEDNFANVSHKYVMTAIKVLKNRGGPDDILKALGVPEPRIELFERLPYYGRVMPDLTVPADAFAPLTRTCDDEREYGRAPNPDVHVVLNRVRVVINEIIDMMGGILPTTCVVEIARDALTDTEAEEHTKLARERENLRRAIERDIAHVFEGLGKKMPFGPRLDRLVDRWKAALRQGWRDYDGSQIQRSLLVEGDIYQLDHVSPAAFGEFRTNNIFVTRLNAHKGRRLPWEAFPEHRDALLAFAIFGWEQRIAALKAVLKRKDRPLSAKDRERLQRRIEDAKDQLAALAEYGTPRADVLASLRRTLTDKLDKQFETGGGTAPEEARGLKSPFRPSEQAALFTRFGPDAVPPDGEYAARDAANIGWSTKLVRRYFLHLGARSLAVKPWAVRALRCMFNINKCRADLRNHAVDAFFIAHFDERVMLPAFSRMRGGPEELYKPRTLEMALDNTKDSAGVFDAIRTNINRLEAILRTIATSHRPNNMWNPGDPDGGSFGAFGGQNIYSFRPDWATRAKLTAIVRRARKEQGEDKPLAKEDLAAIMSGRPNDPREIKLQSDIIKTAKVRYLTRTSDKTKPTTCKVNIALPIKGQPGAYINAEGKFAVLSATKDAARSIISTAEFSRLSRESRARIFDGTHVVYRAGDTVISDGVAYVIGGLEGDGERDARLIMYPVDAAGRETRHRITVPARPDKMPPIKVRTDVLGRRLHRRRKAAGDLAPVPYPLRDE

SEQ ID NO: 2221 - protein, 1346 aa, unidentified
  REGION 1..1346: note = Description of Unknown: Cas Enzyme sequence
MKHNGNNFSAGDWYLGLDVGTESAGWAATDPTYHLLKYHGKEMWGARLFAEAEDASGRRTARTNRRRLARRKWRLQLLEELFAPEILKIDPGFFIRLHDSNLYPEDKHDKACKYSLFCDKDYTDKDYLREYPNIYCLRSELIHSSEPHDARLVFLALHHIMKSRGHFLYEFSDSDTGVSLSDALQQFKNTLADFGVSFSAADQQSFLNALQEKTGISQKAKNLQKAYGKIESSEEPSGVSVAVLLELLAGKKVNLCKLFNDEKLKEAELASVSLSDNLEDEEIGGKLSDELGDRMDVILHASEVFNTARLDEILAGYQYFSDAKIAEYDQNKKDLRILKGWIKKNCPDKYRDVFRVKQGVKNFAAYTRYKTDEKCTQEEMCKFLDKICAGMKNDSNPDVAAVYAKISSKSFFPRLKGSENGLVPYQLQKKELMKILDNAQEYLPFLNEEDANGITVRQKIESIFTFKIPYYVGPLSTKSPRNNIVRKSNEKIYPWNFEDVIDLQETQERFIADRIGRCYYSGDPVLPKDSLLNNEYCVRNEINKLKVNGEPVSPAALSDIYQDLFVDSSKKVTAKRLKDCLLKHGYIEKSDQLSGFDTQTGIKSNLRSYHDFSQILSRENSIPGVTNMVEDIIERIVVCGDDKKLLRKWLVSNYGKVLTDKDIKHILKLNYKDWGRMSKKILTGISSCDENGEQVCIMDLLRSTNKNFMEIYHDERYGFDKKAQQYKQEKYGAPDSLQDVLDTMYISPRVKRGIHQTMKVIDELIDIRKCAPKKIFIEMARDQDAKNEKKRTDTRQERLIALYRSCRKQIVDLLGGDEAEYKRLYSGLQSLDNDSLRRDKLYLYYTQLGRCMYSGERIDLASCLANNERYDIDHIFPRSRVKDDSISNRVLVKTELNRDKEASYPIDESIRKRMSPFWTMLNEKELISDKKFDRLTRNYPLTADELSSFVARQLVETRQSTKALADILHSFCPNSKIVYSKAQNVTDFRHEFKIPKFRDINDQHHAKDAYLNIVVGNVYDTKFTEQFFRNIQNEKYTLKTEEIFKWSVPGAWNGKDNSSLKLVKHYCAKNNPIVTFACFPAKGIISDLKLRPHGNGSLFPVKQGMDPQKYGGYKNLSVTYYCVVEYQKKTKRIRSIEPVYLYDHEKYENNPELYFSERGYKDPRIICKRILVNVILEINGVRFSVTGKTNNRYVARHMYQFALSDDNSKYLKNAKKYIERDEQESEDSLARYELSKEKNIELFDLFVSKMQTTIYSKVGAIKSLGERVGMEKKPFSNLSLKNQCIVLLQILKVFKCNRELSDLSLIGLSKNSGVITINNTLDKVMSAFLIYQSPTGLTEKKVNLLK

SEQ ID NO: 2222 - protein, 1223 aa, unidentified
  REGION 1..1223: note = Description of Unknown: Cas Enzyme sequence
MQPYSLGLDIGTNSLGWAALAVDPENLDRPTAILGMGSRIFSDGRAIIDKAHMGESLGETLQSKRRIKINAMRAHQRDRARRGRLLRLLADDLKLIRTNGCGRGLRVDWIDPFKATASNRDAWLRRESVFAARAACATTPLDSTNKYDRARLARSLYSLLVNRGTLLTDDGEIEEPEPEAPPKKRNGKKKEVRETTPKGDEPASLRAECTRREEIVAATCGIGGLGIWLSRQFEQRHPFAPIRARRIDSDTRVSHWKGLDDETIARVGSQSLPGRTSRKMVEEEFSRIRETQSAGFKSAGIGAEEWDNLRALIFERAPYNAVRWPCPYVPADERTPRFDPDAQRYLAWEKAWNLRAFDDQANEIDLDTAPEPDSPSLRRRFYVTLLTQPRLTWKQASVALGLPESISFNRVNASGKEAHWLGHPFPELGAWITSRDHRAQGSGGEDDGWPELRENVLELFSAPIRGEDRDFATIPLNIAAEIRGLMVAPPRGSIPYGRSMLQRMLPLLETMRPHVARDAALAKINEERALDTYALDEYKAGRLPYYGAAFSGMLPQLPSRRKGPFSKGEGPARVVRSVEAKYGRVPNPSVHIALNQAQRVVNEIVQKFGRPSRIVIETTRQLHLSDRGRMSLLKRIAENEKRNREAQAAVRSVLGNISTEGEENRRAVRRYKLWKELSLCGEREARLCPYCGVHEITKSDAIGGRGVDVDHIFPRSLGGGDEMGNLILTCKSCNAEKTNAKTALDAFGEKDDRWERIREATRHLPARKRRMILDPENERSKFLKGQLDSTSWASKVLLQWLRPLCLVETNVLASRGELTGTLRKRWGLEELKKDGNGKRIEDNRHHAVDALVTAALSRSLLQKAALGNNLAVTNFDLWDGFKTAAIEAHERIVTSHKVERPRILFAADGRRAASVPGAMHNETIYGMSGGHEQKASAIFPSPLTKGSLPLDGADAAAVLLKAHDLLDRLVEKPVAGKSTYDPSQLVRLRDTLALWFGAQNPSMAHFRERIDEQAEIWLRCNGKSGPKLNSRPPSETGEICTIPWNCEHGTLSGAFRDAFDFVCARNGIAKITIRPTRERDECEGECDADSYGPIDRRRGKRYGLWRSKENLCAVIENLVPLRVRLFQLLRVIADPDEFRAFTGSRPESRIYKGDAIRLDQRVYLIKNMRKDNGRYRIGLEDVNTCESVGSEPALQTVLKRYERVEIGVTGLLGGFRVKMRLKG

SEQ ID NO: 2223 - protein, 1045 aa, unidentified
  REGION 1..1045: note = Description of Unknown: Cas Enzyme sequence
MKDKNYRFAFDVGTNSLGWAVYELDNKNNPIDLTDTGVRIFSDGRDPKSGESLAVERRGPRAMRRRRDRYLQRRTYLMDLLIKAGLMPQDEAARKALEKLDPYVLRARGLDEALSPHEFGRVLFHLNQRRGFQSNRIADAGKDEDSGKIKTAEKRLIAALEAQGCRTYGEFLAKRQAAPKVREREAVRIRIRGQGAKALYEFYPTREILKHEFEQLWSAQAEYHPALLTSELKTRLYDAMFFQRPLKQPPIGKCTFFPEETRIAKSHPLSQARRIYQDLNHLKLKRGLDAPRSLTLDERDKLATVLLLGQDITLKAGLRQELKLSADTTTTLEEGGKADRLVGDQVVARLSGKKGPLKQIWGNLTAEQRADIALRLNTEQNEAALIAYLMTTYNLPEETARLTANTRLPDGHDMLGPKATAGILEKLKAKVITYNEAVFEAFGKSHSDERDGVIHDSLPFYGEILERHTLGGSGDPKDTAEKRYGRIANPTVHVGLNQLRRVTNALIRLYGNPEEIVVELARDLKMSKDQKDEKAKEQKGFEDANKKRKALLEESGYEYNPGNIRLLRLWEELGPMPRRCIYSGEIINLTDLMSGEVEIEHILPYSRTLDDSMANKTLSIRMHNRLKRNKAPAEAFSGDEYESMRQRAQILPPNKRWRFEPDAMEKFDARTDNGEKAFLARQLNETKHLAVMARKYLVSVCNREHGVRVVTGQMTSLLRQRFGLNNILSTDNHKNRDDHRHHAIDACVIGIIDTWILQEIANQAENYENKNELSEITKRFPEPFRGMPRGDFRDRVKAKVAGIIVSHKPEHGAGGALHNESNYGINQSNDAVDGELITRKAIDALTWNEIDKVRDLHLREKLQALKAEHGKDVKALAKGLADFGADNNIRRVRILKKQADFITIKDRKTGAPYRAVIPGENHHMDIIEGADGVWRGFAASIFDVNQKDYVPAWKAQYPGAKLIMRVHKGDLVSVMDDDGETRIKRIVRLSPSNNILYLVGHNEGGEFAKRHADNDDPFRWDFANISKLKDKACRLFVTNELGKKR

SEQ ID NO: 2224 - protein, 1076 aa, unidentified
  REGION 1..1076: note = Description of Unknown: Cas Enzyme sequence
MALRYAYDFGSSSIGWAIFQTEDGRPCRLIDLGSRLFDDGRDPQSGESNAKARREPRAMRRSYDRRLQRNKYVMDVLVQLGMMPVEQEARKTAIPLSPYEIRAKALLEALPLHHLGRAFWHINKHRGFKSNRKADVPDESGKIASAAERLNQKMQAMGCETYGSFLAARQADPDVRNRKPTRIRQNSHIKDELYEFYPTRDMLVWEFDLICKRQRGFNSGFPDEAQIAPLRDAIFWQRPLKPVDPGFCSFFQEEVRLMKAHPLAEEFIVYQKVNELRIDDDEGYPLPLNREMRDQVVQQLLSGRDVSWMQLRRIVGLGKDSGRISLEEGGEKKLEGSSMAYRFKGNKKPGPFAETWTDIRQDRQKIDALLAAYKSSNTDSELRDALAPLNLGDAEIELAMKCSLPDGHLMISMKAVDMILPHLKAEIITYAEACKRAGLHHSDKRDGEVFDFLPYYNEIDSMRRFLGHGTGDPDDPRDVRYGRIANPTVHIGLNQLRRLINTMITQYGRPDEIVLELSREIKKSKAQKDRAKRDNQQNRKANDIRKREMEEIGFYSRGDRLRTREALERIRLWEELGRNPNDRVCPYSGKPIQSLSRLLSDEVEIEHILPRSISLDDSPANKTIAYREWNRLKRNLTPSEAAQSFPEKFNQDDMIYRSRNMPLNKKWRFGPDSRERLGLEDKWQDRLLKETQHFGVVAGHYLKKLAPADVNRKEMSVWVTSGRLTSELRRKWGLHTGTNQKNRNDHRHHALDAAVIGVTDRSLVNILSRAAAQDEVQAFARVLADIPEPFDGFTDQVNTAVKRVIVSHRPSHRVAGKLHLDGAYGKVRENLTNIERGEPARGNLVVRRDILSLKPNMIEQVRDEKVRLALQQVLYEAKQAGGSDKKDFEKVLTEGLAEYSRQTGTRRVRCLYPKENAIPVGKSKQGERYKYAIPAENHHVDIVELTNGSWQAVWVDIFEANQTTLAERKGQVQPPRWQTRYPDARFIMRLHKGDTLQLFDDDKINRVKIIVSLRASFNSLQLAEHLEGGVLQKRHDDQDDPFRWDFANISKLKDRRARRVRIDEIGRIRTVNHGSV

SEQ ID NO: 2225 - protein, 1085 aa, unidentified
  REGION 1..1085: note = Description of Unknown: Cas Enzyme sequence
MSESRGKLACVGLPLALGGTCMGIHVGLDIGITSVGWAVLDSEAERIEGIGVRTFPKAENPKDGASLALPRRLARSARRRLARQRARMDAFRALLMESRIVDPGDLDNTFVPRAGEPTPHQLRAEGLDRLLTGREWARVLSQLCKRRGYRSMKLATQSSSTKKEEGAVKSAIAENEAQMAERGYRTFGEMLWRDERFDESRRNKGDYKGVASRELVLDEIAQLFEAQRRFDNEHASTQIEAAYLEILQWQAPLLEGDALRAKVGRCSIDQSNPRAPLASPTFERFRLVDKLHNVRYTMPGSGARINLSPEQRQAVIDKAFGKTAKMTYADIRKLCALPSEARFVGVRYDGNASIATAEAKETLPLPKAWHEMRRALSDCPKGTWELISGNVELLDAIADVLTYFKHDESVRRELQVLGLPDAVVDALAELRFARHGHLSRETLRSILPQMEAGLPYSEACTSAGFHHSRRADSEKQAKLPPIPTDDMRNPVVIRALTQSRKVLNALIDEFGPIDELHIEFGRDVARSYDDRRKIEKQQRENRAVNESVLEDIETKFGVVNPRPLDIVKYKLWKEQGGRCVYSGSYIDPKRLLSGEPGIAEVDHILPHSRSFDDGYMNRVLVTTAENRHKRERTPFEYLGGDPMRWHEFEERVESMHLARPKRERLLRKDFDERASEEFRDRNLHDTQYAARFFKNFVEENLRLAGDGKTPVVTVNGRATAYLRTAWQLQKVRSDGDLHHALDAAVVAATTRSMVQKVSRFFSVRPLRNPSGLYVDATTGEIIEAKHVPEPWDGFAGQLKERLSVCFGQDPFGELAQADGDPKPVLVSRMPNRTVRGEVHKETVRRIEGTDEKGLVKTSKRVRLEGLTPKLLENMVGRAQDRALYEALCARLAEFEGDGAKAFADPFYKPTRPGRPAPRVRSIRVYDAPSSGGTEVRGGFADNGEMVRTDVFERDGKYYLVPIYLKDTIVGELPNKAIVACKPESQWRVMDESYRFVFSLCLNDPIRLVRKSGGAEAAIGGYFRGVNRSSACIDIEAHDGCWQKRGQGVAMNIVAFEKYSIDVLGSSVHRIRQEKRLGFSNGGDKQ

SEQ ID NO: 2226 - protein, 1408 aa, unidentified
  REGION 1..1408: note = Description of Unknown: Cas Enzyme sequence
MRKYYLGLDIGTNSCGWAVTDENYNLLRGKRKDLWGVRLFEAAKTAVERRQKRTNRRRLDRQKLRLNWLNEIFAPEIAKVDEKFLIRLKYSNLLLDDKQKFGLQGKNSIFFGEVDGKKYTDKDYFEEYPTIYRLRRELIQMPARDIRFLYLALHNIIKRRGHFLYAGEFGENTDAFSFVNGAIKKMNELNDETKEFDLREITQDINEKLIKSVCSKKGLRQTKTEFCTLLNAQTKKEKAFASALVDGKVSIKQLFAVEVENDKLEFSSETVDEAFEKLSAFISDDEMFVLSQMKEGYSCFQLKAILGDKTYICEALDESYKTHHNQLKYFKNFIKKYYPEEYFGLFRNNRDNTKVKDIAVGYAQYVNCNLVDGKKGATNINASGSKRERNEFYKYVKNILKKPPKNVDNLEKFEQEKNEILNLIENDAFLLKQRSKTNTVFPNKLYKAELQRILEINAAKFDFLNQKDETGLTNAEKIMEIFQFKIPYFVGPIAENRDEKSNGWAIKERSLDFKPWTIEKIVDFNKAEDDFIARMTNKCSYLKNEDVLPKQSIIYSKYRVLNELNRLQLNGMNISVELKQRIFTGLFETRSKVTVKMLKEYLVAEGEYSKSEMNDIDIGGIDKEFANNYSSFAVFNNSDLFGKQFIENNLSLLEKVIKYHTIISDKNRLEQRLKKEFENVLSTQQIKFIKGLNFKDWGSLSHEFLVGLKFVNKVTGEITCVLDEMWNTNQNLQQVLNNTDYTLKDLLNKGEEKAIENLVYDDVQSLYCSPAVKRGVWQSLQIIKEICAVMGGMPEKVFVEVSRHDDKKGDDGRKLSRKNNIENFYKSKDFKKSVYITADEITNLLKELNGKDVNELRAEKLYLYFLQAGKCAYSGSKINIAELNNDYLYDVDHIIPRSIIKDDSINNKVLVKTELNKLKDDNTVPLEIISRQKDFWKALLENKMMSKEKYDRLIRTEPWTDEELGNFIARQLVETNQSVMAVIDCLKQYMDNPRKIVYSKACFVSDFRHLEGFELYKSRLVNDFHHAQDAYLNIVVGNILFSRFSDDPRNFYKSKNKNSKLTKNIDKIFKGDIYSPITNEIIWSKQRDLERIKKTCLKNSPIVSYMNFSNLNGAFYKETVHKSKKNNKASGAKFALKGKIENPLNDFEKYGGYSEISNAYFMIVESKDKKGRILKTIEAVPIFAVRQYINKPNYEENILNYVAKAEGLNEPRVLINKINLMSTLLIGKGEYYISGKSDTTYLLHNANQLFLDKNTINYIRIIEKYQKIVATKMDETLEQTEEMIIVSKPKKEGNKALILNKTENEKLYNLLIDKLSMNCYKDMQLDTVLREKLLNRKADFEKLNVKDQAILLYNVLRRTSSGATKADLKLLQEGSAEASIRIGKNITNKNIVLVQRSVTGLYEKRIRL

SEQ ID NO: 2227 - protein, 1104 aa, unidentified
  REGION 1..1104: note = Description of Unknown: Cas Enzyme sequence
MSRYVLGLDIGITSVGYGVIDIDNDLFVDYGVRLFKEGTAAENETRRTKRGSRRLKRRKSNRLNDMKNLLKKNNLYFDNYRHYNPYEMRVKGLNEKLSSEELCTAIMHITKSRGTTLEALADESQDDEGTKAILSKNAKELSDGKYVCEVQLDRLNNNHRIRGAENNFKTEDYVKELKEILKHQDLNEELCNQIIEMVSRRRRYDQGPGSEKSPTPYGSYRLVDGVLKHVNLIDEMRGRCSVYPNEFRAPKQSYTAELFNLLNDLNNLTIKGEKITVEEKKKVIAVVNEKGNITVKQLLKLLDTQEDEVTGFRIDKNDKPLITEFKGYSKVLKVFKKYNQQELLEDKLIVDQVIDICTKSKGIDERKKDIKELYPEFDNELIEELASIKGVSAYHSLSFKAMHMINKEMLETEMNQIQVLHEIEMFDKNRKSLKGKKNIESDEEAILSPVAKRAHRETFKVINALRKKYGEFDSIVIEMTRDKNSKEQVKRINDNQKRFKNENEQVDEIIKNAGINPERINGKTKTKVRLYLQQDCKTAYTQQDIDLHTLIFDDKAYEIDHIIPISVSLDDSLTNKVLASRLENQQKGNLTPMMAYLKEKFTDGNLEKYKLFVTSNKNFNGKKRNNLLTEQDITKEDVAKKFINRNLVDTSYACRTVLNTLQRYFKDNEIDTKVHTIRGQSTNIFRKRINLQKDREQDYFHHAIDALIVASLKKMNIVNSYLMHYDYSDLYDEKTGEVFDVLPDKQFIDQRYISFISNLKNIYQESNQYNLGYITQEQMHYPLIKVSHKIDTKPNRQIADETIYSTRNIEGQDMLVEKIKNIYDPKEKKAIELVNNIINDNTDKYIMKHKDPQTFEKIKEVVLNHFNDCKDSKEYYVIDKKGKYSLKGESPLTFYFNENGPFTKYSKKNNGPAITSMRFYSEKLGNHLSITDNYSTNNKKVILKQISPYRTDFYVSPDGKYKFVTVRYKDVFYKETIHKFVIDENWYHEEKIKKGIQEDWKFVCSMHRDELIGLIKPEGKKFVYDASINGGQTQYHDGKHYEILKFTATNDEKKGTFEVKPINTICKKQLMPSVGPFVKIQKFATDVLGNMYEIKDNRLKLEFD

SEQ ID NO: 2228 - protein, 1105 aa, unidentified
  REGION 1..1105: note = Description of Unknown: Cas Enzyme sequence
MSKYVLGLDIGITSVGYGVIDIERNLFVDYGVRLFKEGTAADNETRRTKRGSRRLKRRKSNRLEDMKKLLQNNNLYVEEYRNYDPYQARVKGLKEELSLEELCAAIMHITKSRGTTLEALADETQDDEGTKAILSKNAKALADGKFVCEVQLERLNNEHKIRGTENNFKTEDYVNELNEILTHQDLDEELCQQILETVARRRRYDQGPGSEKSPTPYGSYRIVDGVLKHVNLIDEMRGRCSVYPDEFRAPKQSYTAELFNLLNDLNNLTIKGEKITVEEKEKVIAFVNEKGNITVKQLLKLLDVDEEEVTGFRIDKNEKPLITEFKGYSKVLKVFKKYDKQDLLENKTIVDNVIDICTKAKGIDERKDAIKEMYLEFDDDLVHDLASIKGVSGYHSLSFKAMHEINKEMFTTEMNQMQVLHEIELFDKNRKSLKGMKNIEPDEEAILSPVAKRAHRETFKVINALRKKYGEFDSIVIEMTRDKNSKEQTKRINDNQKRFENENKQVDELIKNAGIDLERVNGKTKTKVKLYLQQDCKTAYTQQDIDLHTLIFDDKAYEIDHIIPLSISLDDSLSNKVLTSRFENQQKGNLTPIMAYLKGRFTEGNLEKYKSYVYSNKKFPRKKRNNLLEEQDISKEDVAKSFINRNLVDTSYACRTVLNTLQHYFKDNDIRTNIHTIRGQATNIFRKKINLSKDREQDYFHHAIDALIVASIKKMGNIKQYMYLDKGVTLKDIVSEETGEVFNIVSDENFFDPKYIEFISTLKNIYHESNQYNLGYITKEQMHYSLIKVSHKIDTKPNRQIADETIYSTRNVDGQDMLVEKIKNIYDPKEKKAIELVNNIINDDTDKYIMKHKDPQTFEKIKEVILNHFNDFRDSKEYYVIDKKGKYALKGENPLTAYRETPITKYSKKNNGPAITSIKFYSEKLGNHLPITGNYNTNNKKVILKQISPYRTDFYVSPEGKYKFVTVRYKDVFYKETIHKFVIDENWYHEEKNKKGILEDWKFVCSMHRDELIGLIKPEGKKFVYDASINGGQTQYHDGKHYEILKFTATNNDKANMFEVKPINTICKKQLMPSVGPFIKIQKFATDVLGNMYEVKDNRLKLEFD

SEQ ID NO: 2229 - protein, 1116 aa, unidentified
  REGION 1..1116: note = Description of Unknown: Cas Enzyme sequence
MVEFLLKEMKIMGRLVLGLDIGITSVGYGVIDIDRNEFVDYGVRLFKEGTAANNEERRTKRGARRLKRRKVNRLADMKKLLMKLGILDDQYVPLNNPYEIRKKGLSNKLLNNELATAILHITKNRGTCLESNADETQDEESTKNILSKNAQELKDKYICEIQLSRLEESGKIRGVNNNFKTEDYLKELNKILENQELEDDTINKIKEIVARRRHYDQGPGSEKSPTPYGSYRMENGELVHVNLIDMMRGKCSVFPDQLRAPQQSYSAELFNLLNDLNNLKINGEKLSSTEKQKIIDFVNEKGGITVKQLLKLIDVGITEISGFRIDKNDKPLITEFKGYKKVLKVFKNHNQESLLNDKSIVDTIMDINTKIKSIDERSDQLKQVLPSLDTSIINDLASIKGVSGYHSLSLKALNLINNEMLKTEMNQMQVLHQLDMFDRNRPSLKGKKKIQADDSAILSPVTKRAHREAFKVINKLRSIYGEFDSIVIETTRDKNTQEKKRRIKNNQKFYENKNDEVNKFLKEAGYNPENINAKTKMKIRLYIEQDAKSAYTLQDINLKELIEDEKAYEIDHIIPISISLDDSFNNKVLTTHDENQEKGNLTPISAFLKGKFHNGNLNTYKVFIRNNKNLNRKKKEYLLCEDDITRYEVVQNFINRNLVDTSYTCRTVMNTLVHYFKDNEINTKVHTIKGQATSTFRKRIGLIKDREEDYFHHAIDALIVASLKKMNLINSYLMKVDFNEMYDEKTGEIFNVLPDNSYLDEKYISFVSNLKNIYEESNKYIRGVMIKEKMTYPLIKVSHKIDTKPNRKISDDTIYSTRNVDNQDMLVERIKNIYDPKENAANTLINDIINDNTDKYIMYHKDPQTFDKIKAIVLNHFNEFKTDKNCYIVTKEGLYKLKGASPLALYYEEFGPITKYAKKNNGPVIHSMKFYSEKLGNHLSITHKYSTVNKKVITKQISPYRTDFYQSPEGKYKFVTVRYKDVAYNAKKDKYIIDHDWYREQKKLKKISDEWIFVCSVHRDELIGIMKADGQKRIFDSSTESDGETLYHDAKTYEILKFTATNNDITGRFEVKPIYCYCKKQLMVSIGTCRKIQKFATDVLGNLYIVKDNVLKLEFK

SEQ ID NO: 2230 - protein, 1105 aa, unidentified
  REGION 1..1105: note = Description of Unknown: Cas Enzyme sequence
MSKYVLGLDIGITSVGFGVIDIERNLFVDYGVRLFKEGTAADNEARRTKRGSRRLKRRKSNRLEDMRNLLQKNALYFEEYRNYNPYQVRVKGLKEKLSLEELCAAIMHITKSRGTTLEALADETKDDEGTKAILSKNARALSDGKFVCEVQLERLNNKHKIRGTENNFKTQDYVNELNEILTHQDLDEELCQQILETIARRRRYDQGPGSEKSPTPYGSYRIVDGVLKHVNLIDEMRGRCSVYPDEFRAPKQSYTAELFNLLNDLNNLTIKGEKITIEEKEKVIAFVNEKGNITVKQLLKLLDADEEEVTGFRIDKNEKPLITEFKGYSKVLKAFKKYDKQDLLDDKIIVDNVIDICTKAKGIDERKDTIKVMYPGFNDDLVCELASIKGVTGYHSLSFKAMHEINKEMLTTEMNQMQVLHKIELFDKNRKSLKGMKNIEPDEEAILSPVAKRAHRETFKVINALRKKYGEFDSIVIEMTRDKNSKEQTKRINDNQKRFENENKQVDELIKNAGIDLERVNGKTKTKVKLYLQQDCKTAYTQQDIDLHTLIFDDKAYEIDHIIPLSISLDDSLSNKVLTSRLENQQKGNLTPIMAYLKGRFTEGNLEKYKSYVYSNKKFPRKKRNNLLEEQDITREDVAKSFINRNLVDTSYACRTVLNTLQHYFKDNDIRTNIHTIRGQATNIFRKKINLSKDREQDYFHHAIDALIVASIKKVGNIKQYMYLDKGDTLEDIVDEETGEVLKIVSDEKFFDPKYIEFISTLKNIYHESNQYNLGYLTKEQMHYPLIKVSHKIDTKPNRQIADETIYSTRNVDGQDMLVEKIKNIYDPKEKKAIELVNNIINDDTDKYIMKHKDPQTFEKIKEVILNHFNDFKDSKEYYVIDKKGKYALKGENPLTAYRETPITKYSKKNNGPAITSIKFYSEKLGNHLPITDNYNTNNKKVILKQISPYRTDFYVSSEGKYKFVTVRYKDVFYKETVHKFVIDEKWYNEEKVKKGIDSDWKFVCSMHRDELIGVIKKEGQKYVYDASINDGQTQYHDGKHYEILKFTATNDDKSNRFEVKPINTLCKKQLMVYCGSFIKIQKFATDVLGNMYEIKENRLKLEFD

SEQ ID NO: 2231 - protein, 1318 aa, unidentified
  REGION 1..1318: note = Description of Unknown: Cas Enzyme sequence
MTKKSIKYYLGLDIGIGSVGGAIIGEENGEHWLEDFGVRLFNIPGDPENNKSFTEERREFRGKRRLLNRRNCRQKDLKKYFLTLFREQYPSIENDFKNEKRLLLNTNILKYDETKFFNPYAIRCKALDEEIKPVELLHILLHINKNRGYKDFWENLDGKPEEENKDDRETKKAVQEVEKIMKENNYRSVAEMIIKNEKFHHSRDQNLLSPHNHRPEKIKCFSCRKEVKESETKLIRENPSSLAFAYCKVCIDKNHKDKIEVKKDYKHLVISRKLLEEEVKKILERQSKYYSQQLNKISKFKIGENGKTEIKELPVQEIIKIIIFRQRDFEDGPGPQDEEKRNLGEEGPKEKGKKQAWKKNNRNITFTPFVETTGYCQYFFQEKEKRGWRCSLVYCCYQFINEFSKVKLETKNLEETKEIHEKVFKGLLSPEGYQPPVTLSEGEKKKGGKKREKLEKQLENFLDKLEVKHKFPEEGIEFKISFLDLLKENASFYSALGKNLNENFYLNYQDYQKTVFYQIGKIIFENISPGRRKEKLDDLARKNSLDPFSTYLDKLEKYNQERSPASVSFRYMVETIRAFLVGKKYGEFQEEFKKNDLESSKDNSGNKKLGIPQMDLVKNPVVFRSFNQTRKILRNLFLDPKYSKGFATINIETGQDLGNSEKERDEIKEINQDFEEEKKEIRKKLKGYSNIKDSDENIKRYRLGLDQNKKIGKWDNKKKKYKKVKDGINISEGSICLYCGGKLDLIHLNEYDCDHIVPQSKGANDSPRENLTLTHRKCNKDKGENLPLQFFQNRLKKEQKEYLKRVDNLYLKRNPRKHELLNLGDDWGEKTEGFTSRNINDTRAIATYLTKYIQNELNKDKKFEKTEVQAIRGSITSYFRKRIFDKSSVFHYKKQLRSLTHYHHAIDAIVLAHFKSRGHIQLLQDLTKINGKKRELEKGEDFTQEQFDSLCQEITKKGKSSKEKNYGLLDKYTKKMLFENNILENIAKQKEIDNSRFFLINNLKNIVEQRIPVQLEKKTEKKTLQIEEGKKQIKEIVVEVKGVLTEDKYHQRIQESLEDRDKKGDIHYPYVSYATDQKAKKKIIASERAGYRKQGEKILPDICEKLRKKEKVDLSENISLSKLVEQVGLEKLNSEYGGKYNFLIVRDKFKENNYTAWDTSKYAGFGVRNDGKSEKIKNIVLFGKKKISDRNGLTKNYQQLLRPYEIFTFDYSENLESELNELIGLPLMYQGTSSSNRVSSINIVGLVYDEKENLQTRFPEHDDEIVKISNAINGQGQKENKKKLRYSLKQLGTKEKSFQKISLSIKLLKISILGKKIK

SEQ ID NO: 2232 - protein, 1046 aa, unidentified
  REGION 1..1046: note = Description of Unknown: Cas Enzyme sequence
DIELHYSFDFNQGAAMSKSDRGHVFGVDLGKSGNGLASIDYENKDINFLSSRPFKAPENRAGKSLAKVRREARSIRRQLDRKSTRKKQIIKVLKQFSVIAQECDSRWFETKKNGNGGIDLPIIILRSQGLDRKLTNREWARVLYWFCSQRGYINRGEEALSNEEASVEDSSESDEVGKVLSAISDNRKALKKSGYRTFGEYLFKESYAITRSYRNKNGEYRHCVSHPMVVDEINELFKHQQKLGNTYTSEEFREAYLRQLNWLKDTMAFDKLTYQKVGYCVYFDQYSDEPQKRAANADLISEVVKAYEKLGNIRLKFDDKSEQNLTKEVRDAVINEMFSIHQGSRVKSITYKTLRKLIDNENLIEFKGIKSDLEKSSVFAPKAWNFYCRALSISESGLQLLNRMKSDFKFANVISESLTYATSLESLESRILMYQDKESIEISEEELTLIESLPYNSKIFKGYGSRSIEALEMLYDQFTEGEAFTLDEAEKQSGLQGFRLRDKGIKQRLLPPYSDYDPQCTNPVVLRSLSQARKMINSGIKQFGMPDIIRVELGKELTKSPKQREKIAKEQNKNRKENERIRKEIAKYLEIDSSCVTKKQILKKKLYEEQKGLDVYTGESLEPSLHADDWTYLKDDSYCQIDHILPYSRSADDSIANKVLVLAKSNQDKGNRTPYEWMTSGHGHHLSWEEFAIRVSTNLSISDSKKWRLLVEDFNKKEVQFMNRNLSDTQYMSKAIVAWLSDSLDFPSRYGQKQHVYATNGRMTSKLRKEWGLNFGENGIKDRNDKRHHAVDAAVIAACSASMVKEFATSYSRLHETKNSTIAEPWEGFADQVREAREWVIPTMYRPNKKNGLLFEDRRYRYAGKTNKHILIGKEGKEKTSGNIRFFDNEKDGKHVKIVGDVAYIRLWLDVNAREGKGEWLIEPVYFADLQSIKKGTYIPKYIATYNATNDEWKPVPDDVLSKNKPLIVHRQDVIKVDSSFFRVNSVDIAKKTLELVPVFYDSKYSNPELMVTRKWNKSTKIESVSEDALGMIWFNFLKNQNSSES

SEQ ID NO: 2233 - protein, 1031 aa, unidentified
  REGION 1..1031: note = Description of Unknown: Cas Enzyme sequence
MSKSDRGLVFGVDLGKASCGLAIIDYEAKEVKLLSSRIIKAPENRSGKSLAAVRREKRSIRRQIDRRAARKKNVLKVLKQFGVAPQDSDCTWFETKKNGNDGIDLPVIALRSQGLDRQLSDREWSRILYWFCSQRGYINRGEETLINGETSIEGTSESEEAGKVLSAISENRKALKESGYRTFGEYLYKESYVTTHSYRNKAGDYKHCVSHPMVVDEIKELFEQQKKFGNTHTSEEFKDAYLEQLNWLKDTKAFDKLTYQKVGYCVYFDQYSDEPQKRAANADLISEVVKAYEKLGNIRLKFDDKPEQSLTREVRDAVINEMFSVHQGAKVKSVTYKTLRKLIDDDNLIGFKGVKSDLEKNPVFVPKAWNTFCRVLSGSESGIQLLNRMRSDFKFANAIAESLTYASSLDSLERRISMYQEKEDLVISEDELALIESLPYNTKIFKGYGSRSVQALEMLHDQFSDGEAFTLDEAEKQSGLQGFRLREKGIRQSLLPPYSDYDVQCTNPVVLRVLAQARRMINSAIKQYGMPNIIRIELGNDIAKSAKEKSKIAKGQNENRKENERIKDKIAEILHIDQSEVTGKQITKMKLYEEQGGKDIYTGEGLGDIAFAGGRRFLIDDNYCEIDHVLPYSRSADDLKSNKVLVLAKSNQEKGNRTPYEWMNSNDGSHPNWEQFCLRVLSNVRLSDGKKSKLLEENFAEKEVSFIKRNMVDTQYMARAISAWLSDSLNFSTEFNQKQHVYAVNGRMTAKLRRKWGLNFGEDDTKDRSDNRHHAIDAAVIAVCSASMVKEFAISYSRLREVRDSVIAEPWEGFADQVREAREWVIPTMYRPNKKNGLLFEESRYRYVEKKKKHILTSKDGKEKSSGNIRFFENEKDGRHVKIVGNIAYIRLWLDENARKGKGEWLIEPVYFVDLQSIKNGSYVPRYISASHVTSDEWKSIPEEVLSKIPPVVIHIQDVIQVDSSYFRVDGVDIDAKALNLMPVFSDSNNSDPALAKMSKWNKSTEVTRISEDALGLVWFNYLKNQNSSES

SEQ ID NO: 2234 - protein, 1031 aa, unidentified
  REGION 1..1031: note = Description of Unknown: Cas Enzyme sequence
MSKSDRGLVFGVDLGKSGNGLARIDYENKDITFLSSRPFKAPEDRAGKSLAKVRREARSIRRQLDRKSTRKKHIIKVLKQFGIIGQECDSRWFETKKNGNGGVDLPIIILRSQGLDRMLTNREWARVLYWFCSQRGYINRGEEALSNEEASVEDSSESDEAGKVLSAISDNRKALKKSGYRTFGEYLFKESYATTRSYRNKNGEYRHCVSHPMVVDEINELFKHQQRLGNTYTSEEFREAYLRQLNWLKDTMAFDKLTYQKVGYCVYFDQYSDEPQKRAANADLISEVVKAYEKLGNIRLKFDYKSEQNLTKEVRDAVINEMFSIHQGSRVKSITYKTLRKLIDNENLIEFKGIKSDLENNPVFVPKAWNIYCRVFSASDPGLQLLNRMKKDFKFANAISESLTYATSLESLESRILMYQDKENLEISEEELTLIESLPYNSKIFKGYGSRSIEALEMLYDQFIEGEAFTLDEAEKQSGLQDFRLRDKGIKQRLLPPYSDYDPQCTNPVVLRSLSQARKMINSGIKQFGMPDIIRVELAKELTKSPKQREKIAKEQNKNRKENERIRKEISKALEIDSSCVTKKQILKKKLYEEQKGLDVYTGESLKPSLYADDFTYLKDDSYCQIDHILPYSRSADDSIANKVLVLAKSNQDKGNRTPYEWMTSGHGHHPSWEEFAIRVSTDLSISDSKKWRLLEEDFDKKEVQFMNRNLSDTQYMSKAIVAWLSDTLDFPSRYGQKQHVYATNGRITSKLRKEWGLNFGENGIKDRNDKRHHAIDAAVIAACSASMVKEFASSYSRLNETKNSTIAEPWEGFADQVREAREWVIPTMYRPNKKNGLLFEDRRYRYAGKTNKHILIGKEGKEKTSGNIRFFDNEKDGKHVKIVGDVAYIRLWLDVNAREGKGEWLIEPVYFADLQSIKDGTYIPKYIATYNATNDEWKPVPDDVLSKNKPLIVHRQDVIKVDSSFFRVNSVDIAKKTLKLTPVFYDSKNSDPELMITRKWDKSTKIELVYEDALGMIWFNFLKNQNSSES

SEQ ID NO: 2235 - protein, 995 aa, unidentified
  REGION 1..995: note = Description of Unknown: Cas Enzyme sequence
MINQDSKQPYYILGLDPGIASCGFALLDMANHTIPEMGSHLFDTPQTDKTNTSLAVVRRNARSARRNNERTKNRQKHCLNLLKKYEIVPEGVDKQWFQTRHGDCPTLELRVRGLDHLLTDRELAQVLYSLSGRRGYIPHGVGRIENATKSSDEEGKVLKAVRENTDLMKSKGYRTVGEMLYKRKRSRNKAGKYELCVLNSQLVDEARTIFEKQQSCGNEKITSQLVEEYIKCMKWEKETLDQDAKVYAHIGKCTYFDDEYRAAKADLSSELCRAYERLGHLVIVDESGKERKLNSEQRGEYLRTLFSPVSQVNNKDCKVTYSNIRRDLNLSERSLFKGVGRDDEKKEVFAPKAWRCMRKNGLPSSLLERMWKDRELADAIGEALTYASTEKSLRNQLESLDLSVQELNAICGLPFASKVFKGYEARSLKALQLLLDSFDDPQVMTLTDAERASGLLDLRLNRKSKQETFLEPYLVYDPTCNNPVVLRSMGRMRRIINAIIKLYGVPNEIHIELGRELKYSAKEKDKIRDNNKDNRKNNEIWSKTISESLGIAPEEVRGKLLRKYALWKEQGGKDVYTGDKIEFDRMIREDHYCEIDHILPYSRTCDDSKANKVLVLAKNNQDKGPRTPYEWMTQDASAPNWDEYRARVLELVKNPKKRRYLLNTDLAEGDHEAKFLDRNLNDTRYMSRAVKTYLEETLLFPEDGRKQHVIAVAGGATANLRWVWGLNTGKGNTKDRSDNRHHAVDAAVIAACSESTVQKVAKARSLGREMFKVMRRSRLADTQPWPGFADEVLAKRESVIPTRMVSHGVTGRVFEDTLYSFEGEVDGKEGYGLLKAKNKQVKKGNFCFVTDKSVHLVDGLAFLRLWLDPTARPNGKVKGKYYAEPVYYADIPSIKNGTYVPRACKIHVARTKWEPIPDSVLKQNPIVLYRGDVLSIDGNIGRYWAFDINKCGMKVHDLKTNKELVSFPTIGKLGVKSNVFIIQEDILGHCYANLE

SEQ ID NO: 2236 - protein, 1214 aa, unidentified
  REGION 1..1214: note = Description of Unknown: Cas Enzyme sequence
MGKILGLDVGIGSLGWAVIDEDQHRIVDFGVRIFDSGEEGASKAADRASQVRRRYRSTKRLNKRRKQRKLRLKQFIEEQGLISVEDINSAYRTNGFNPDVWKLRAEGLERKLEPIELASVLINLSNYRGYQDFYEDADEEDSGKLSEAKNKINTIYKEKGKLYKTIGEMIYREECFRSGPDGMLTIRNKARRENGKKVTDYKYLIDRKYLSEELKTLLKCQREFGYEQLTDDVIDAFSGIIFTQRDFEDGPGPDKNKDKMRRDAMMAALKGNQTYSGFDELVGNCPFYPDEKRGHKNSQLYDMYVIVNSLSQFTFFDGKGNEINCPESMVLEIRQQLFEKAGVLTKKDIETLCKANGVTIKIPTELGKKKNLVKAEFIKFLSNSDIFPVEFIQRFKEETFDDENALSAKIGYILAKFATPRRRKEELQKVLTQEEYELLKDGDKIKTEKTGGGASVSFKYMKEAVEAYFEGVKYGDFQAEFNKKHPQEEKRVFLSPEGKVLPITDSDMVRNPVVYRSLNETRKIVNVVRAKYKDVKTINIEVAKDVGKSFEQRKETLKYQRENEENNEKLRMQLIEKLAAENMQVMLADKLIERFTLWQAQKGKCMYSGKDISFAELVSTTVVQVDHIIPQSIVLDETLNNKVLVYTEENQRKKNKLPLEYMAEDQATEFKNRVNNLFRTGNISRTKKEYLLLPFLDDETVRGFVDRNINDTRTISKFIANYLRIAFQDKVKVQVIKGAITSKFRKRWLGSKTKRYGYVSSIYGLEKKTRDLHYYHHAIDAAIVANLTHPYIELAQDYVKFDAMMKDIDYLQRKGNGSTALKLQEELIQEQAKTVDKMFKVYGFNREYTKELLASGYVPSICEDLRKEVEIRVPLEIEFDAKEYADMEKAFYELRQLLNAVRYNFKDVDYENRSDVVDPDMLEEINARLPIVRPDVACMKSNAQLVFVDKPVDENATAEEVSKELTSFVKKLEQRSIMDYIKSIRMLSEEEYAERVHEYYSDKQFADEIELPYVSFKIDRKFRGSMVASDNPVSLGKAGYKTFKELEEDMKNNLKCPYYVRFNKGIGETGNFTIYDARSYYCMEVYTDEKGSYQIRGIRYVDVRNDHKSGKLVLLKPLPEGCTHHVYLFKNEYIKAYKNGKLRNNGFGAYRGVENINESTGKIRLFSNVNLSGRNTKIRLDGEIKKIEISALGHIMGEQKCGDQSLFIAENDLT

SEQ ID NO: 2237 - protein, 1544 aa, unidentified
  REGION 1..1544: note = Description of Unknown: Cas Enzyme sequence
MKKILGLDLGTNSIGWAVVNADEIIRENETNYLKPIGISAAGSRIIPMSADILGNFDAGNSVSQTAERTGFRGVRRLHERNLLRRERLLRVLKVMGFLPDHFASQIDEHGKFINYDEPKLPWRKDANGKFEFLFKDSFEEMLADFAQSQPQLVSDGRKVPYDWTIYYLRKKALTQRLTKEELAWILLQFNQKRGYYQLRGEDEDELQDKQVEFIAQKVVRVEATDEKKGDDVWYNVYLENGMVYRRTSKTPLDWQGKIKEFIVTTDLEKDGTPKKDKEGNIKRSFRAPKEDDWTLQKKKTEFDIDNSHKTVGCYIYDNLLQKPDQKIIGKLVRTVERKYYKDELRQILETQVALMPELKDDTLYNKCLEELYPNNEAHRNNIAKPDFANLFINDILFYQRPLKSKKSLISDCPYESHFDKDGNEHPVKCIAKSNPLFQEFRLWQFVQNLHIYQREKMVSDGQLDLFGNVSVGKLQTDVDVTDEFLKTEDDYVNLFDWLNDRASIKQDTLLNSYFKIKKEKGKDMYPYRWNYVEDKEYPCNKTRAAILNKLDNSEKDSLNEDLTAKIWHLLYSVKTKSEIDQVFDEKKKQNTKGIYAELRKVFSEEAIGKIKNIKFEEADYGSYSEKAIKKMLPLMRMGKYWSADAIEDRTKERIEKILAGEYDENIKNRVREKAINLLDISHFKGLPVWLTCYIVYDRHSEAKEIGKWEKPEDIDTYLKGFKQHSLRNPIVEQVVTETLRTVRDIWKQEGQIDEIHLELGREMKNPADKRKRMTENILQNENTNLRIKAMLMEFMNDPEIENVRPYSPSQQDILRIYEENALDNLTKEDKDFDFVSKISKSAQPSKADIIRYKCWLEQKYRSPYTGEMIPLAKLFTSAYEIEHVIPQSRYFDDSFSNKVICESEVNKLKDRQLGFEFIKNHKGEKVQISQGKTVEILSVEAYEKFVKEHYANNRTKMKKLLMDDIPDGFIERQLNDSRYISKLVKGLLSNIVREKLENGEYEPEAVSKNLISCNGSITDRLKKDWGMNDVWNSIILPRFQRLNELTGKDCFTTLTPEGHLIPNMPLELSKGFSKKRIDHRHHAMDAIVIACATRDHVNLLNNEAAHSKHNANRYQLQRKLRRFEKVVIDGQEKEIAKEFLKPWDSFTTDARQVLENIIVSFKQNLRVINMTSNHYQHYDENGKKVMVKQEKGDSWAIRKSMHKDTVFGEVNLRKSDKTVSLKEALKNPKAIVNKEFKKKVMELLEEGRDAKYIEKYLKDNKDVWSDIDIKKIQVYFFTKDTNDRYFATRKPLDTSFDKKKIESSLTDTGIQKILLAHLEAQGSDPELAFSPDGIDEMNRNIVTLNKGRSHQPILKVRVYEKAEKFAVGQTGNKSAKFVEAAKGTNLFFAIFGTEKTNKETGEAEQVRSYLTIPLNVMIDCQKKYGAKWRDNIETYLKEQQLAAPDAKLMFILSPNDLVYLPTKEELKGEVIMVDKKRIYKMVSSSGNQCFFIDEKVAKSILDKVEFTSLNKAERAITGEMIKEICVPIKVDRLGNIIELNGKKL

SEQ ID NO: 2238 - protein, 1396 aa, unidentified
  REGION 1..1396: note = Description of Unknown: Cas Enzyme sequence
MKKILGLDLGVGSIGWALVNEAENNEEKSSIIKLGVRVNPLTVDEQTNFEAGKSITTNADRTLKRSMRRNLQRFKLRRENLIKVLREYHIIKDDSVLNETGNRTTFQTYRLRSKAATEEISLEELARVLLMINKKRGYKSSRKVNNDSQEGGQLIDGMSIAKILYDENITPGEYLLKTYKSGKRRVVDFYRSDLQKEFDWIWDFQQKFNPQFLTEELKKQIAGKSKTRTSAIFYAGYKVTTADNKGKDKDKQAYKWRVEGLSKELPLEILAYVIADLNGEISGSSGYLGAISDRSKELYFNKQTIGQLLLSKLDENPNFSLTNKVFYRQDYLDEFETIWETQAKFHKELTPELKHEIRDIVIFYQRNLKSQKGLISFCEFESRQIEVVVGGKKKTKTVGYKVCPKSSPVFQEFKIWQVLNNIQVFGVGSRRKIKRDNGMPLFAGQEIETVNGQRYLNIDEKKLLFSELKTKESISKSEALKLLFSNYKELDLNYNEIEGDETQAKLFKAYQTIIDLSGHGEHDFSKMTSEEILEIVIPVFKILHINVDILKFDYSLNDVDFQKQPSYQLWHLLYSFAGDNSRTGNEKLIEKLHDLFGFDKEYAKIIANITFKPDYGGLSTKAMHKILPFLELGEEYSVACTNAGYRHSKDSLTKEEIENKILKDRLELLPRNSLRNPVVEKILNQMINVVNTLVATYGKPDEIRVELARELKKNAKEREEMTKSISASKKEYEGYRDLLQKEFGIMNVSQNDIIRYRLYLELKSNGFHTLYSDQYIPQDKIFSKELDIEHIIPQAKLFDDSFSNKTLEYKSVNIEKGNMTALDFVRTKYGEEGLQRYQQNVESLLKNGAISKGKRKRLLMEEKDIPKDFINRDLRDSQYISKKATEILNEFVRNVLTTTGSITDRLREDWQLIDVMQELNWDKYDKLGLTEIIEDHDGHKIRRIKDWTKRNDHRHHAMDALTIAFTKRSIIQYLNNLNARSDKSGSIYGIERNELYRDSHGKLRFIPPMPLDEFRAEAKRQLINILVSIKAKNKVMTPNTNVTKAKGKPKQKIQLTPRGQLHNETVYGKINQYATKIEKVGGNFDAEKIATVSIKSYREALIARLKEYDNDPKKAFTGKNSLDKNPLYLDNNHTFTVPEKVKTVTMETVYTIRKEISPDLKLEKVVDVNVRRILQKRLDECGGDAKKAFSNLNENPIWMNKEKGIDIKRVTITGVSNAIPLRDKKDKEGKYILDEKGDKLPVDYVSTSNNHHAAIFKDEQGEIHEHIVSFYEATVAESLGLPVIDKEYNKELGWQFMFTMKQNEYFVFPNKETGFDPKEINLLDPYNYSLISPNLYRVQKLASKYYVFRHHLETTVDDSSTLMGITFKRMQTLNFCDSIIKVRVNHIGQIVSVGEY

SEQ ID NO: 2239 - protein, 1475 aa, unidentified
  REGION 1..1475: note = Description of Unknown: Cas Enzyme sequence
MKKYYLGLDLGTNSIGWCVTDENYNIVKKHKLLLDANNKVLKQSGNHLWGARLFNEANSAAARRQNRGNRRRLQRRKYRIKLLQEIFNSEMDKVDPNFFRRLNNSFLHNEDKDEDLRTDYLLFNSNNLNDKIYFKQYPTIYHLRNDIIENPNKKFDIREIYLALAHMIKYRGNFLYESNISSSNGGSEEIITCFKNINNILLNLNENDDIEASYSTFDINSKIASAILNAFQSISKKDDLYDKLISTFSLTGLSKKESKNDLRKSILSIICGKKVRIIYFIKDNEIEDEDAKLPIDFSSDQFENEIKDKLPEILGDELANLILECQKIYNLKVLTNLLKGQSSISKAMISIYKKHQSDLKNLKYIIKKCYPSKYKIFFSNKPENETTYASYIHKIKALKNEDKSSSKDNANFLSTIKKLLNEVNTEDKNDKELIDNIIKDIDGENFLPRQNSSKNGVLPYQLNLNEMREILKNQSKFYPFLAEEATDFNNPNKQCYKIESILKYKIPYFVGPLKTTNNKKQRDNHWVIKNEKYLKTTVTPWNFHEVINEKETANRFIENLKNYCTYIFNEQTLPKNSLIYSSFVLLNEMNKWKINGEFISLDIKRYLITNVFLKIKKPTVKNIKEELRKKIKSDVDLSTSNKETLEDLDLHASLASFIDFKNAFGEKFFIKDNEGVVIGVDHNLFNLAEKIINDITVFEDKTVLKERLKEYQLSDENIKFFSNLKYTGWARLSKELLVGLKTEEIDISTGEVKEYSIMDLLKLTNQNFMEIYASRNSNYTFSKQVDEINKKNLGGDFNVEEFIQKSYTSPAVKRTLRQTYKCIVELKKILNIDSFDSYFIESTRQEDKIKKRTKSRMDTLKQYISAAKSLSNDIKIDELQENLKNQNDETLRSKKIFLYFMQLGRSIYSGESIDFSDLVSNNSKYDIDHIIPQSKTKDDSFINTVLVEKERNNKKQDIYPIPNIRKDIISDKGRNWIEILSKNKDLMPILKYKRLIRQKPLSDDELSGFIERQLVNTSQSNKAACDLIKEIDPDANVIYSRASLVSDFRHFFNIPKLRDLNDFHHAHDAYLNIVVGNVYNKVFTSPNGNWVKLNLQNKSSFNFQVEKVFTKDEYGLINHKQYWVSKIYENKIETNKKEGTIDKIRKYLNYNDVLTSKMLYKNVGAQGFFNKISIKTANENKATFPLKFNSKLSGENYSKKYGGYSDLTTPFFTLVKSKSKNKVLYSLESIPTIYRRLFDSISDEELKKEKYLDFLKNKCKLINPEILINKILYGTIIENGGNENESKRIAITGKTESNIAGINQNELYFSNTENKFIYLDTFKKICKLLGTNISNSANKPNLSIYEKETSDIKFSNQILTKLELSNLFTYIKTKIYSQPKFNLLFKNFFEKFNKVSVEKFSSLTTIGQVKLIFNMIKLLQCKSVQQTDFTYLDLSKNVGLLRCGKNFNYGTRLIQTSITGLYEKVIFEVPKNNIG

SEQ ID NO: 2240 - protein, 1337 aa, unidentified
  REGION 1..1337: note = Description of Unknown: Cas Enzyme sequence
MSEKQVMSFGYDIGITSIGSAAVEGTKLKYLGVRMFNQANEAKESRMHRSARRNLSRKKWRKKQLKEAFEDFGLISKEEMNQKDFSCFPAKSALFPTPSDYTVYHLRKRALSGKVSLREIYLCLLNMLHARGHFNMEMYDFTKETITFDTFRERFYAIAEEYIPFIENEKQKFEEELLLPLYKGECNKALIRQIKKNHFTDDEDALTELMNLLCGYKSNLVKISEAFEAQEKVNISSLRSSDEGLPDFLEECVDLFDMAKISQILKKYSYLCDMAVDKIDEYEEIVRKYGIQSKEYEEYCKQIRNISGGNPNHARSWRNLNNNYPNGLYIKEASAILRKQQEYYPGITDDFIEVCLSILSARIPYYIGPMSETGKNAWITRNDKVAMKYSFAYAQKSSGGTAVDEEASISTWKQRMVSRCTYLPEEPALPKGSFLAETFNILNELNILKAEDEHGGSYYLTFDDKVKVFDELFLKKEKVTYKDVAECLNLSAFGPRKTGTKEPEFNNTFTLYHRISKIIPDLAVSTIMEIFDEPEKIQKIEDIILSVNLYSEEISRENYFRKTGFDDTSARQLAKLKSNSFYSFSRKFIFATVIDSENNTLLSKLFSDNSSEYTNEQMTLITRATDTEGNPVNFISNKYVRKLQENNGSLGINLLIDDGKPVIAMSRPVIRALNECMKVYSEMIRVYGVPDRVVVETARDFKDHTEVGQKSERRFKKLEDLYKNLIDQVKDKKIYDNHLEDWDDIKQYLERNSLKIELYLRQNGIDLLTGERINLNKLSDYEVDHILPRGFGDDSKDDKMLISRLANGRKGDRLPLQFIESGEAVGTIKITSSEYVRRVEELFANELISEQKYKRLLLANESELDGFINQNLVDTRYIIREFMSILRAYNEYHGYKTHIVALKSAYTNTYRKAFDMKKNRDFGDQHHAHDAALLVIADRTLSKLYPGYDKRKASKETGKAFATYQDFIRVMLDSKKNSEGAKEDRNKLNAFINYAYYKTFDESASLPGSLLSQIKKTVPFYSVKVEKNYKGKYFEATILSQEKYADPTKPLAIIGVNDDKKIFSGIECAAVDFYKIKTKKGKREHVAVHIPKVIIDSNGNINQEKYLKLIREYYKKPELLDENGNLKTECFRFRAFRNDIIYDTASNCPKLFNIGSMANNKLELKFLSVYSYNDIYVRGNHLKMDLEKKFNIKSKNNKSGIAFNDLSIESMVRYAVKSLWAHHNEMDDAKIKTIIKETKDCKNIYDLSNLLSFYEIYTFNPGLPPTITGQYKPVINYKLIVADEDAQYIKLKYNILGLRFSHNSDGKLLIDSPKEIQGAYSKIRKEEFSWSISKEML

SEQ ID NO: 2241 - protein, 1343 aa, unidentified
  REGION 1..1343: note = Description of Unknown: Cas Enzyme sequence
MTKNVCDIGFDIGITSIGAAVATDHDLKYLGVRVFNAANEASDSRTHRSARRNLARKKWRKQQLGIAFEDFGLLTHDQINSKNFACFTAHSETFAPPLDKTVYHLRKRALSERISERELYLCFMNMLHARGHFNMETYDFSKGTITFEEYKDRFYDSTESYFYVYDDEKSAFEKNILQKIFDGSADTKLLRTVTKHRYTDEESEAALLETLRLLCGYKSKIKQISESFSVDKDSVNITTLKSLDEIDEFFIECIDLYDMGRISRILKEDSYLCEKAVREIDRYEEMFTTVDHNSDQYKEYMKELQSISNNKKRTRAWRNIDNNYPNGLYVKEARAILKKQQEFNDRITDDFIEAVLSIISARIPYYIGPLNVNGKNAWVVKPDEARFKYSYAYTQKHMQTGVDEEASIKAWKERMISRCTYLPDQYALPKGSFIAETFNILNELNILSSEDSDGNEYYLTLEDKIRIFDHLFLLKKKVKYEDVADLLGLKGFGPKRKELRSQLFKSEYSIYHQIAAIDPDLRLISIMELFDEPDKIQKIEEIALRINLYDEEASKINVMVNEFGYLPDAAAKLARLNTTGFYAFSKAFIYSTVIDDDGNTILSRLFKDNSAEGKNEQMSIISSATDGHGNHVDYVSNKYIRKLKDNGGELNINLLMDDGIPVIPMSRPVVRALNECMKMYNEMVKVYGVPGRVVIETARDFRDHSEVGTVPEHRFKTIQNLYENLIQQIKDKKLYDADRNLEDWDKIEQYVTKNAMKIELYLRQNGTDLLTGEKIDINRLNDYEIDHILPRGFGDDSKDDKMLISRTANAKKGNRLPLQFIESGEKINGRFTTTGEYMRRVKELFDARLISEQKYRRLTLASESELDGFINQNLVDTRYIIREFMSILRAYNQVHGYNTHIVALKSAYTSTYRKAMGMDKERGFGDQHHAHDAALVLVADRTLSAMYPNYDQRKNAKSVNSSLKSYQGFINMMLDSKDAASETNKESMKSLNQFIQRAYKKAYGIDYDAPGSFIRQVKETVPFYSVKTEKNYSGKYFEATILPQPTKDKDKMNHEGKPLTILGVNDKTKIFSGVECAAVDFYKFTNDKGKKEHLAVHIPKVIISKDGVINKEKYLSLIRDYYKKPELIDENGELKEYYFRFRAFRNDIIYDTVANDPALFNIGSMANKLIEKKFFDIYSYNDIYVRGNKIRELIVSHFNIKTRNNPNGIQFSELSKEAMIRYAIHHIWIHGDSISDSVEATVIKKTADEKNVYDLANKLSYYELTTKRYDYPPTITGQYSPAVNVTYLKNDEDAQYIKLKYNILGLRFSKTFYGKMDIESPSEIPGAYKKIRKEEFSWRISKL

SEQ ID NO: 2242 - protein, 1421 aa, unidentified
  REGION 1..1421: note = Description of Unknown: Cas Enzyme sequence
MNLRTAKNYSIGLDLGSGSVGWAVVDEDGKLYHVKGKPTWGSRLFPDADTAAATRVHRGQRRRYERRRQRIDYLQTFFMPEMEKVDPEFFIRLRQSRLWQENRNPNFDTTYRWPLFNGEPFTEVEYYDSYPTIYHLRRHLMSSDEKVDIRLIYLALHNIVKYRGNFLHEDEGSSLKASNANAESSVRMLVVALDEYVDVLRAAFDSDDIDFSFAVDVERLSTVLDNAKLPRGQRAQDIQDALGANGKDAKNVAKAIARACVGYKVDFANIFVGVEKGSFNFEVSNEDKLTEFQESCPDEGQSLLEGILACYSSYVLAEILRGHQSISDAMVDSYEQHQRDLKALKGLVRDYLGKKAYNDLFRGPKDERGEYDINKLPSGSYTAYVMGEKRANGKGCSHEDLLKNVRKVCESNEELQGDERFLAIKDRLYAEDSDFLKKQKTRENGAIPYQLHLEEMDVIIQKQGEYYPFLLEHKVELEKVVSSRIPYYVGPLNAGHCDPLGKYPNNPVDDKRKFGWSVRREGMESVAAHPWNVDQVIDTDETAGRFIRRMTGTCTYLYGEPVLPRHSLLYEEFCVLNELNGARWAAKGEKPHRFDTADCQGIVRDLFMGRNRAAVSYQDVKDWICRKHGIANAKVSGAQAENGFESKLTSYHDFCKVFGVRDLEDAPLAYDEIEEIILWSTVFEDRDILKRKLTEKYGDIMTAALAKKCGEEDADALAKKQLKKLANKRYTGWGRLSKKLLTGIRVEAPVPKRRVCIMDVLREGNPFGRCKTMNFMETLRDDNLCFQQLVDKFNEENFDASNGFNLDDMPGSPQNRRAVNQAMRVLDELVHIAGCDPKRICIEVTRDDDKKKKGKRTNSRYKQLKEAVRAYKSDAALCGELEKHKDELDDDRLLLYFQQDGKCMYSGEVLDIRQLNTYHIDHIVPQSYIKDDSISNRVLVKSAYNERKLDGLIPDDVVNARKAWWHELQRCGLISEKKLHNLTRRSFSEGEMRGFISRQLVETSQVVKFVRLLCEKKYPGSEVVSVRANVSHGVRDNLKLVKCRELNDFHHAHDAFLACQVAEFTMRCYPNWQDGQMLTRIRKYVRDLVKPKPGGKMPGDSGLIANGLTSRRYVDEDTGEILWDSEEHDKYIKSALGYKDCYISRMTEEQTGAFWDETVYSPRDSHNGRGLKMPLKSSNRGSEGYLDPKKYGGVSSVKQAYWFIFAANTRKGQYKYFFEGVPIYLADMVKCDAGNGALQEYANEIAQQNGCGEAVILRKSVPLRQKLEIDGTQYYLYGSSGGSNELRSGVEMWAKPSMVGDIASLISGKPMDSELIGAIWSWEVLEAKRVWPQMAVTLKLDERARFDELNVEDRARLARDVLLKLNGTSQTISVTKLGGSAHAGFALKNIAKALPSITWIDQSVTGIFEKRTTFEDLTRGL

SEQ ID NO: 2243 - protein, 1395 aa, unidentified
  REGION 1..1395: note = Description of Unknown: Cas Enzyme sequence
MNLRNISDDYSIGLDMGTGSVGWAVGDVRGQLFHFKRQPTWGSRLFDSANTAAMARMPRSQRRRYVRRRWRLDLLQSLFQDEIEKVDPEFFIRLRQSRLIKEDRAEGHRDYGHPLFNDSDFTEREYYKRFPTIYHLRKWLMETDGQADIRLIYLAIHNIVKHRGNFLREEQKSLSAKTAKPDVALHSFFEALNAWCATRGYELVSDRGYELVNGVTAKILGVLADEKAAPTSKKKDIRTLLGVSMGDDSAANRRCNDALAAGMVGLKAEFKNVFGEFQAEKTAIHLSNDEDVDALREACPDDSIELFNRLCDVYSAYVLQGLLSYAPGETISVNMVEKYEQYGKDLALLKELVRRYASKSYDSFFRGPTYPDTNIYDASKAKGYTKYNLGTSKLSYDDFSKEVKSLLGKTDAVNDERYQSMMEAFDKQQFLRRLKTSDNGSIYYQLHFEELQAILKNQGRFYPFLKTDEKKIESLVSFRIPYYVGPLSSRNAAVDQHGKQRFAWAERKPGQEDTPITPWNWDSVIDRNKSAEKFIKRMTGMCTYLQGEEVLPRCSLLYEEFCVLNELNGLRLTIDGDREHRLDTAQREGIVHDLFHHKRSVSYKQIEDWIIREEGFRYPHISGGQGVSGLESKMGSYIFFCKDVFGVDELDRKDYDMVEEIILWNTLFEDRRILKEKLVQKYGEQAGGPLSDEQIKRICKKRFTGWGRLSEKFLVGLKVKTDIGPKSIMDVLREGDPNSDSRRGHAMVMMEALRDENLGFQKRVDEFNRNYFEANGKLVEINELPGSPAIRRSLNQAMRIVDEIAKIAGHAPANIFIEVTRDDDERKKGRRTTRRYDELKKALEAFKSDDPEIWREICETAPKDLDERLTLYFMQRGKCLYSGRPIDMNRLAESGLYEVDHIIPRAYIKDDSFENKALVYREENQRKTDALLIDQGVRRKMHDYWNMLHGAKLIGDKKYNNLMRSTISEQTMKGFVARQLVETSQMVKLVQSMLEVRYPETKIVPVKASISHNLREAAGFIKCREANDFHHAHDAYLALRVGMFIQKRHPGVYENPIGLTRAMRKYAQSQAEIFRSTHHLPGSAGFIVNSFMSSGFDKETGEIFKDDWDAEAEVEGIRRALNYRQCFISRMPYEDTGVFWDATIYSPRDQKKKPVLPLKNGLDPQKYGGFSREQFAYFFVYEARKPRGNKPLFRFAQVPVWLARRMEGDSSALESYARGLAANEKLEYVGIERAKILKRQLIEIDGDRLIVTGAEEARNGRELAFAFGELALIKQLVEGRELSNDGDRQLCEIWSRLIDLGNRMGSRLASRLNLSSHKEIYSNLDNKSKSEIILGIIKIINATSNVVNLSAIGGAKNTGQMKLTYSKLLSDSNVDFYIIDQSVTGMFERRTRIGL

SEQ ID NO: 2244 - protein, 1059 aa, unidentified
  REGION 1..1059: note = Description of Unknown: Cas Enzyme sequence
MTRIKYRLALDMGANSLGWCVYRLNDDDEPDALRRLGSRIFSDGRDPKTLASKAADRRTARQMRRRRDRVLKRRHRLLEGLAHFGLMPANDAERKVLQGTDPYELRARGLDQPLTPHELGRAIYHLARKRGFRSSRKDGRDPESEKEAGKVHAAIAALKSRIAEAGCRTVGEYLARQHAGRLPVRARRSTDGQYVLYLQRGMVAEEFDALWAAQKPHHPALLSREAHDYLRDTMLFQRRLLPVQPGRCLFESDEYRARLCSPLQQRFRILQELNNLRVKESIGQRPLSLDERNQMLRRLTQVSGPVSFAQLAKAAGLHNAKEFNFGNDEKRHGLKGDVVAASFASDSALGPRWHALNMEVQQALAVLVEQADQTDTLIEALVALPDSIAQAEKILGKQHDAEAILDGLRKLPFRILPGTARVLANFRLPDDYGSLSLKALALIVPELEHEVITYDVAVTRAGYNHHSQFYDGVFHPKLPYYGELLRGYTSPAHKARDESERKYGKIPNPTVHIGLNQIRQLMNAIIKRYGHPHQIVIELTREFGASGEKRRDITKQQAENQQRNERYNAELERLGVRVNRENRLKLQLWEELGKDDALDRYCIYSGKRLSKAALFSDEVEIDHILPFSRSLHDGIGNKLLCTRQANRDKSNCTPFEAFGHTERWAAIVERAERLPAHKRKLFQENALETFLGDKDFLARHLTDTAYLGRAAKQYLSAVCPPNCVWVSSGKLTGMIRGKFGLNPLLSDNSQKNREDHRHHALDAAVIGLCSRSLIQRIATAAARAEDKGEQRLLEGLELPWPSFRDDLRNSLAQIVVSHKPDHGKEAALHNDTNYGWRDGPDKRGNPLMGRRVPLESLSKVSDAENIADEVLRAEISQLLAPLSSTREIKAALLEYSTRTGIRRVLRQERLSVIPIHDHRTGKPYRYVKGDGNYCYEVFRQPDGRWDGEVINLFEANQKSFQTSATRAQNGLPLVMRIHKDDLMAIEDEEQEVRILRVAKFSPGKINLADHNEANVDARNRDPDSAFRYFQFAPSKLRDKKARLVGVDILGYVNDPGFRE

SEQ ID NO: 2245 - protein, 1215 aa, unidentified
  REGION 1..1215: note = Description of Unknown: Cas Enzyme sequence
MKKRILGIDTGTNSLGWAVVDKNEDGLFSLIRRGSLIFQEGVKVEKGIESSKAADRTSHRALRKQYFRRRLRKIEVLKVLVEFGWCPYLSSEALHLWHVKKIYPVDEAFMAWQRTNDNFEENPYYYRHLCLHEKLDLNEKANRYVLGRAMYHLAQRRGFLSNRLEQGDDKETGKVKEGISSLSKSMSDAGCEYLGDYFYKIYKEKGNTERIRTHYTDREGHYKKEFYAICERQSLSKEQVSKLEKALYFQRPLKSQRQGVGKCTFEPKKPRVADSHPAFELFRMLSFVNNIKIKGPHDVELRPLSQEEYEKAKPMFFRKSKPQFDFEDIAKAIAGKGKYQYIKEVGEKEYKFNYRMTQGVTGCPTIASLISVFGEDYVAAITERYTLSAGKTPEQMVNDVWNVLYSFSDKDKVKQWGREKLQMDEEDAEKFSKIKLTHSFASLSLAAVNKILPWLEQGLIYSHAVLMAKVPDIVGKEVWEARGESITKELLSLIANFNPKDIAMQGTLDFCLKDILKDMCDLASGATEKLYHPSMIETYPDATKNTQGVYQLGSPRTNAVRNPMAMRSLHQLRKVINALLREGVINSDTEIHIEYARELNDANKRKAIAQWNKDREALRKKYSEDIRTLYKQECGKNIEPTADDIIKFQLWEEQGHICLYTGDSIGITDFIGPNPSYDIEHTVPRSVGGDSTLENMTLCSSKFNREIKKTKLPTQLANHDAIMSRLEEWHEKIEKLRKDVDRAKTYSGMDKDSKDRQIQKRHLLKQELKYWTEKYKRFQMEEVPEGFARRQGAGIGLVGKYAGLYLRSLFHKADDRTKSNVRVVKGTTTAEYRKMWGIQDEDEKKSRDNHVHHCIDAITIACIEPGEYNATARYYQQLEEYERNESNKPSFPKPWPTFTEDIKAIAQEMLVVHSTPDNMPKHARKYVQTSNGKKLAMGDSARGSLHNDTYYGAIERDGEIKYVVRRPLSSFEKVSDIENIVDPAVKEIVKRAVEEKGLKQAVSEVIYMNEEKGIKINKVRCYAKTVKSPLNIRKQRDLSRKEYKHQFHVQNESNYMLSIYEGEVKGKKKRAYELVKSIEAVEFYKKSTDKVEFPSIVPQSKNNLPLKHKLKIGQHVLLYENSALEIEFSDVRDLARRLYVITGLSYLPVGKGFGTIVMRHHQEARMAKDIKTTNGSFKNTDPYRPSIIQLHTQFKALVEGEDFIITPLGEFKVIR

SEQ ID NO: 2246 - protein, 1065 aa, unidentified
  REGION 1..1065: note = Description of Unknown: Cas Enzyme sequence
MGKKVLGLDLGPNSIGWALVDVGDSKSEASLIDMGVRVFTEGVDSFDSAKEVSRNEGRRTARAMRRQTKRRALRRRRLTEGLVSVGLWPTDPAEQKELLQRDPYELRSRAVDPASDLSPFELGRVFMSLSRRRGFQSNKKTDKGKEAGDLLQEISANEKEREASGAPTLGAWLHQKAISFDHRHRVPNDHVRRRHLSRKEYLDEFDQVWETQKAKHPQLLTDRLRYGLAGENRYPVVPTVRPNPGDRLLDLFGLHGLIFFQRKMYWRTSVIGRCELEPKLKRAPIADRRVQLFRILQEVNNLSYIDPNTKETTLLDEGQRKRLIAKLMTKDKMTFDDIRKALGKLDGVRFNLEKGERSNLKGHRTDHTMAQKKYFGPEWYDLEDSLRTEIVEALLDPNLDEFQFAEKASKTWKFSPQQIERLLAVDLPTGYGSLSSKAIEKMLPYLQKGMIYSSSNPENSALAAAGYLRRDQLKRRLFDFLPSPARTKNTPIGNIPNPVVKRTLTEVRKLVNAIVREYGKPGEIHVEMARDLQMGSVKRKEVSSDMRKREAKREEIADRIKEANERPTRENILRYQLWEEQNRMCIYTGRPISQSQLFSEVGGVDIDHILPRSRTLDDSQTNKVLCFREANAEKGNRTPYEWLAQKDPERYEALTGRVLSLLKSNGYAFSKYQKFLLKELKLEDFIARQLVDTAYITRATAEYLRCMFDADHHVLGLKGRLTSELRWRWGLETLLEELPDSPAWAEANKLRPGEKNRADHRHHAIDALVIALTDRSTLQKLSATLGDRFAAREETQFEPPWKGFRQQIKDKVASILVSHRVERKVSGQLHEETLYGPTDKPGEWVVRKSIESLSLSEIPRIRDHAIRDMVMKKLSAHGIEVGRGKEKDAKKLKELLGNLTMPSGVPIKKVRILKNEETIGPIRSGASTSYVKPGSTHHLCIFEWEEKGKRKRDAVFVSMLEATYRVKTGQPVIDRIPPDNHPTIPSDARFVMSLSSRELVIAKTKDAEKLLIFRTAASTSRQMWFVFHSDARKSSDIKPLSFMPNSFQANKVTVDLLGRVRWAND

SEQ ID NO: 2247 - protein, 1118 aa, unidentified
  REGION 1..1118: note = Description of Unknown: Cas Enzyme sequence
MIKYRLGLDIGIGSIGWAIISGDSKAARIENFGVRIFESGELDQLGKDRKSQQRRGFRGTRRLVRRKKHRKDLVKGHLQNIGLIKIEALNQYFETNNRDIYEIRAKALDEKISPEGIGACLIHFANNRGYKDFHAQESEKNNLDAEEEADYEALNNFDRLYKSSNLRTPAECILAKFKKDGQGYPDFRNNNFKEVHYLINREYIKKEMHQILAEQSKYYGCLSPANIEMLDAIIFKQRDFEDGPGDENEKFRRYSGFLDSIGKCMYYKNWDRGFRSTVISDVYAVTNTLSQYQFLDSATGEYHLKPEAAKELVHYLIKTGNLTMTEVKKILKNYNLILKKSDLSDDGALSKAIKYLKAVKNSIESCGLNWMDFIGEDQFDVANYSRLHQMGELISKYQTPKRRKDELKKLPWMTEPLLKELCSKKISGTSNVSYKYMCEAIQAFMNGETYGNFQANKLKERQENISPEHRRMLLKTLDDPEIKDNPVVFRAINETRKLINAIVRQYGSPECINLEVASELNRSFSERAEIQKNQKANEKNNDKVKKAIADLLQIEVGDVSGTEIEKYKLYYEQECKCLYSGKTLGDIGLVLRDKTHRYEIDHIVPYSLILDNTLNNKALVLGNENQVKKQRTPLMYMGSQQKDDFIARINEMHNKKQKQISNKKYKYLMVENLYDEKTLGMLRDWKSRNINDTRYITKYLIGYLKSSLQFNSNRREPVYGIKGGITSKFRKIWLRDTNWGKDIKDRESYLNHAVDAVVIANLTPAYVEISSDNMKLGQISRRYRNTTNDEYQDYLKRCINKMDEYYHFKPEYTERLLTKTNRVPSFVDQLEKEVVIRFDEENPELFEERVQAFYGDLSDFVIKPHLPIVSQKQERKYRGSMADSNPIKVCEIDGVLMKVNRKSIGDLKPKDMECLRTSDADLIESLEEVFEMFPTVDAYLKAHDLKQFKTKKGQIVNRVSIVQGAISNYYKKEIGDHNYSILGGMKYYCIEVYQNKKDETAIWGIKYTDLINKDKKLWLKETASPEDYGKHVMYLFKNDYIEVFNKKGEQKFSGFYKSIFNINQNLLYYALTTKPLQKRKALSISKKDSLKKYDIDILGNKGGEIKCSAPLSLILAKK

SEQ ID NO: 2248 - protein, 1112 aa, unidentified
  REGION 1..1112: note = Description of Unknown: Cas Enzyme sequence
MLKYRLGLDIGIGSIGWAIISGDSKVARIENFGVRIFESGEDPRQNERKSQQRRGFRGARRLIRRKKHRKERIKGHLQNIGLVKIEELNQYFETNNQDIYEIRVKALNEKISPKEIGACLIHFANNRGYKDFYALEVESLDAEEEADYEALNNFDKLYKSSNFRTPAECILEKFKKDGQPYPDFRNNHFKSVHYLINREYLKNEMHQILEEQSKYYECLSSANIERLDAIIFDQRDFEDGPGDKNDAYRRYKGFLLSVGKCMYYKDLDRGFRSTVISDVYAVINTLSQYRYEDSEPGDYYLKPEAARELVQTLLKTGNLTMTEAKKIVKKHGITMSKSDFSDDSALSKAIKYLKVIKNMIECCGLDWNGFISEDQFDVDNYSRLHQMGELISKYQTPKRRKDELKKLSWMTEPLLKELCAKKISGTSNVSYKYMCEAIQAFMNGETYGNFQANKLKERQENISPEYRSMLLKTLDDPEIKDNPVVFRAINETRKLINAIIRKYGSPECINLEVASELNRSFTERAVIQKNQKENEKNNDRVKKEIADLLQIEVGDASGPQIDKYKLYYQQNCKCLYSGKTLGDIELVLRDKSHRYEVDHIVPYSLILDNTLHNKALVLGNENQVKKQRTPLMYMGNQQKEDFIARINEMHNKKQKQISDKKYKYLMLENLNDENMLRDWKSRNINDTRYITKYLIGYLKSNLQFNSNRPEPVYGIKGGITSKFRRIWLRDTNWGKEIKDRESYLNHAVDAVVIANLTPAYVEISSDNMKLGQMSRRYRNTTNDEYQKYLKDCLVKMSEFYGFKPEYTQRLLTKTNRVPSFVDQLEKEVAIRFDEENPELFDERVQAFYGGVSDFVIKPHLPIVSQKQERKYRGKISDAEPIKVCEIDGVLMKINRANISDLKPKDMVRLRTADTDLIESLEEVFETFPTVDAYLKTYNLKQFKTKKGQTVNRVSVIEGSISNYYKKEISEQNYSILGKMKYYCVEVYQNKKGETAIWGIKHTDLTNKDKKLCLKEKSLPENYGEHVMYLFKNDYIKVFSKKKDEMKFLGFYKSVENVNQNKLKVALPTKPKRKTPLTVSKSDVFKKYDIDILGNKGGEIKCSAPLSLIPAKK

SEQ ID NO: 2249 - protein, 1165 aa, unidentified
  REGION 1..1165: note = Description of Unknown: Cas Enzyme sequence
MIKNIGNYVIGLDIGIGSVGWAVVTMGENARIERFGVEIFDSGEKNDGKDRKSQERRLSRSTRRLLRRRSHRKSRLKYLLKEIGFTTEEKMRAYFESGETDAMSLRVKALDEKVSPEQLAACLINICNLRGYAEFYEKSDDDTEDEAENMQGVQNVREKMSAGGYRTVAEMFVKDAYFSCDQGKHRRYRNREGYAEKFYAPRDMVQKEAESILEKQGEYYPVLKDKKQQIIDIIFSQRAFEDGPGNVNDPHRKYRGFGADNVGKCRFYPEENRGLRFTYLSDMFTLINAVSQCRFVDEDGVVCFPREMAEEILEVAAREATFGKKMLKEIATRHGIKDVIMPQSEKESQLTNSVKYLKQVKNILIKYGYSWESLIKEDVADIKGCFLNELGVTLSSYITPRLRKRWLKEIERIAENPAADALINELCRVKCSGTSAVSYRYMSGAVEAFKSGDIVGVYQDKINKEQEDADGGKRYAKLPPFDKACDFYDNPVVIRSLNETRKIINRIIENYGAPYQINVEVGKDVNVSADNRKKAEKEQKDNEKARAEAKTTIAELLRTEEGNVTENQITRYILGEVQGWKCMYSGEDIEKRAAISGDSHYCEIDHIVPFSKILDDTLNNKVLVLGSENQFKGQRVPLEFITDKAKRESFLSRINDLYKNKKISKKKYEYLRAERLTSELVEGWKSRNLNDTRYIAKFLVGYLDKTLVFADRIKGAGRQPRVYAVKGSITSMLRRTWLNADTWGITDKKTLKEFTYLDHAADAIVIANCIPAYVEIASSYKRLGQILRANQGKPNDEYKQVINAAATSISRYYNMEYQDVYNRLNTRGRVPSLIKNVAEEVDVRLTDVDSYNRFMKMKAEKNGETFEELPPEKVEEIFREKVGRFYCDDAEFANSVKMPFTVLKANRKASGTVTDSNPIRIINIDGKDVKLRHKAVMELKESDFKKIATTDEDLRSSLIAASAGVKDKITFGQIYKNKIDGNEIFVTEKGKKVRRVTLIDDVKRIITVNNNEKSQEKTENAKPNYSYYTDASYYCVEVYKDKDGNIKTFGIAFSDIVKKKGKLWLKENFVYPEGYDKHVMYLFYGDYLRVYNNKGKLKFEGYYKGVKNINRSNYYYFKNNSVPQDDSIFSITKKDIVRKFEIDILGEVKGEVKCGAPLSLIKAGE

SEQ ID NO: 2250 - protein, 1409 aa, unidentified
  REGION 1..1409: note = Description of Unknown: Cas Enzyme sequence
MNKKVIGIDLGTGSIGLSLRNPELSNNIQDQLEWFSVTTFNSGTGSDQTGEYTLASERRSHVQSRRLKEHSRWKRWSTLSLLIEYDMCPMSRESLERWQTYDKHKGLKREFPIDDLAFIQWLRMDFNGDGVSDCTAFQLRRQLVEEQLDLTIPTDRYKIGRAIYHIAQHRGFKSSKGETLSGKDEESEKNTPAIDADNLESAMKKSEEKKSKDLSEYMASHNLRTVGQAFASLEEEGIRVRNSRYQAVRSQNVDEINEYFKFQKGLADYDDLHRRLISTKKGEGTLFYKLPLRPQKGHIGKCSFEKNKRRCPISHPEFEKYRAWAFINNIKYKESVEGNWLELPLALKQELYKEVFTSKVRKDFAFEAIRKFLEKRLGLTLKNVDGAKTINYKDKALVAGCPVTARLQNIANLFDVSIETLKLQGVKTRKSNSDDDKHQVTYDALDLWHFCFEADEIEDVKRFASQSLKFDEKATDCLCKLWASIEQGYTTLSLKALRNINRFLEYGLKTSDSIFLAKVPDITGVFDADKLIHFFNEQVKAPAEANMRIARVANTLIANYKSLALDERFADHNFDYQLQEDDKEEVVRCIQNTDSSFELMDADEQLLLITEVTKLYQSFFADIKREYVKVPRFADVLVSELKKLYPDVKEERWEKLYHPSMVSDFPRNKNNVNLLGSPNIGAIRNPTVLRALNVLRMNINKLLVEGLDPQETRIVVETTRVNNDINKRKAIEKYNEERNAENREIENILKEHYGAASEEDISAARYVLEQSGEDLLTADDPDNRHYRHQIKKYRLWLEQGCQCIYTGRIINLTNLLADNMFDLEHTVPRSLSFDSSDKNLTICDAYYNRHVKQNRIPTELPNYEMDVTIDGHLYTAIKPRLKMWQEKVERLSQNVLFWKNKAKKAQTEKSHNDSMREMLLWQMEYDYWRQKLDRFTMKSKDLTVGFRNSQLVDTGIITRYAVLYLKTLFAQVDVQNGQSTSAFRKIFGIPQKDRSSNFHHAVDATILTMIPSSAKRDRMLKLFYQIDEQRKGGYEVSGLEFQLSKEIASCGLGVGLSGIEDFISQRVMVDFYKKDRALQKDRRPVIRKGKPLMRKTTDGKLEPVTFCSDSIRGELHNQTFYGAVRRRSDDKEFYVVREPLKYKTSTKDKGFKDWKELNKRIVDLYHSDDSEDLKPIVKMMMRQFPEGTTFKEACEQGIYMLDRNGRKVNKIRHIRCYGKNVSNPVKVKRHTYPSDKEYKQHVLAALGDGSVYALCEYGDGRAKEYKRYTYMEISENRKSGLEDIPTIYPGKKGQPLKLVRKIMKGDMLLIFKESPEELLHLDKSELSKRLYKVQFFEGEKGITLFHHLLSTSNIKEQQEGGEKKRNKGESIKDYQKLPPIIRCSINGFHYLQKNVDFEFGKDGVILKRI

SEQ ID NO: 2251 - protein, 1187 aa, unidentified
  REGION 1..1187: note = Description of Unknown: Cas Enzyme sequence
MIRKQISLGLDIGVNSIGWAIVEEDLKTFEDSASHKAPERLAGQILDMGVHIPGIDVTDRELITKGVGETKNSVRGNARQARRQLQRYKQRRERLIKALVDKGFWRKGLAVSEIFAEYDRLSLYELRVKALNEQITLQDFGRILFHLNQRRGYYSNAKSDEGVEKDKTAGEYLIKMKSLEDFLIERDLTPGQFFYQELNNDEHYRIKNKIIRRRQYKAEFDKIWNFQNQFYPEILNNENYAELKDRIIYYHRKLKSQKGNVGICRFEIGVAPKKQNDEKVKYKENAKKVCPKSHPKAQEFIIWQILNNVKITHISEPERGLNEVEKQRLFKNLQKSELIKGEQLLKKDNLNLNQDYIHNFKQGIKGNKTLIKLRKAFKDNNLPFEVFEQNEDNFIALWHFIYSASSNLDLEHYTKSLIKFLSKYYTTPNDKYPELVLNEDTVQKLVAVSFTNDGYSNLSLKAINKLLPKMNGQELAVLEKVDKETGEIVSKVEYKYAPYHIAAEVVYGGHSDSMNRIVYSDRIIIPALKPHELRNPVVTSLVNESISLVNALAEKHLADGQQFNRIVIEMARELNASKEERVNSDKNMRANEKRNKAIETELERLRLKVNKRNRERFRLWKEQNMTCFYSGKSISLIHLFDKGLVDIDHIFPKARYFDDSLSNKVVVYRVENESKGALTAREYIETKGEEKAAELRQLWKSRLSFNKDLDSFTYPIPYSRYTKLLSFKIPQDFVNRQLKDTQYIAKKLSDVLRPMASDYGIIFSSGAITSHIRNEWGLTETFNRLVAKENLREVFSNAELIESLGNSIDDNGNYNTKIEHTEKDKSTETETEQNLAKKCREDHRHHAIDALVLALTHRKDIQKLNTLNASKSKEYWSNNKESKRKAWSIDKPWDGFNKEAILYIHSICVSHKSKRRVLVPRKNKLKKDGKVFHIQNTYSVRGPLHKESVYGKIKHPANLKEVFVIRKPLQSIENFKQAKKIIDPVIKKIVIERLENSENKKKAFEKPLWLNEGKKVQIISVRMAVESEAMISIRTHSEVDKNQYVIPRNNLYTAFNKYRNGKVKIEAMTFIEAVTMTLQGVDPYKYSPAGAEQIMRLQINDMVLIGLDPETLNLNDKKNRSKIKNHLYRVQKCSDYIVYRHHSKSSTPLPKELIAETKIFNSFMSTSYKPNLIYPITFNKNGTMKVK

SEQ ID NO: 2252 - protein, 1228 aa, unidentified
  REGION 1..1228: note = Description of Unknown: Cas Enzyme sequence
MKKRILGIDTGTNSLGWAVVERDETNNQYELIDKGSNIFQEGEKVVLGKNELSKAAERTKFRGIRRLYFRRRLRKIEVLKVLVEYNLCPHLSDEELHLWRFKKQYPMNDDFLLWQRTNENEEKNPYYYRHLCLHQRLDLSVPSERYILGRALYHLAQRRGFLSNRSEENDNDEIGKIKAGISDLSKEMSKSGFDYLGDYFYHLYSTKGNTVKIRQRYTDREQHYETEFYAICEKQQLEKDLVHKLYDALYFQRPLKSQRMGVGKCTFEPAKPRCSESHPDFEEFRMYTLLNNIKVKTSADHDFRPLTDAEIEKIKPLFYRKKKQNFDFEEIAEKLAGKDNYASKEDRIDKPYVFNYRMSQGVSGCPTIAQLRSIFGENWKEAIAETYQNMQTKHGSKTVEDAVNDVWNVLYSFKSRKKRFGSIEISFDSKEKLFEFAKQKLQLDDKKAKSFSEIKLNRGYASLSLKAIRNILPFLRAGYVYSDAVFYAKIPEIVSYQVWERDYEKIMREVTSILHNRDPKDKQLTETIESVIKDTLRNMYELPAGATEKLYHPSIIDVYPDAKANKDGIFQLGSPRTNAVRNPMAMRSLHQLRKVVNKLLQEKIIDQTTEVHIEYARELNDANRRKAIGDYNKILEKKHKEYAAEISKLYKAATGKDFTPNDDDILKFQLWKEQNGKCLYTGKEIAITDFIGANPKFDIEHTIPQSVGGDSTKMNLTLCDSEFNRYIKKTKLPSELSNHQEIMERISDWLTTINNLSKKIDGKRTYNAQSKEKKDKTIQERHLLKLERDYWKGKYERFTMKEVPEGFSRRQGTGIGLISKYAGFYLKSLFHKPNERNKSNVYVIKGVTTAEFRRLWGIQDLYQKKSRDNHAHHCIDAITIACIGKHEYDQMAHYYRQEEEYKNHAGAKPSFPKPWATFVEDIKKLENEILIAHAAPPSVFKHSRKRIRTPKGEIVYAQGDTVRSEINRATYYGAIERDGKIKYVQRKKISELEFSDINKIVDDVVREKVRKAFAGKNIKEARMQPIYMNKEKGILIKKVRCYSHYTTTKHISQQRDLSKKEYKRQFHITNTNYLVAVYRGMNAKNVDETKVLMLDMIDAANAFKRSAKEKQSLIPAQSPEGYPLKYCFKKGQLVLLYEKDPKEIKFDDNQNLSKHLYKITSTEANYVILLHHAESRPVSSLEKKKGAYKNGEEFRPLIGIKYQMINALVEGVDFTIDVLGKIKPIKKN

SEQ ID NO: 2253 - protein, 1395 aa, unidentified
  REGION 1..1395: note = Description of Unknown: Cas Enzyme sequence
MVKNILGLDLGVSSIGWAFVQQDDKNSENNKIIKLGVRVNPLTVDEQINFEKGKPITTNASRTLARSARRNLQRFKLRRANLIDVLKNGNILKEGDLLAEVGKNSTFQTQELRAKSAKEKIDLSDFIRVLLLINKKRGYKSSRKVKNEDEGQIVDGMVVAKKLYEENLTPGEYSYQLLMEGKKQLPDFYRSDLQSEFDKVWNFQKQFNPEIFGDELYKELQGKNKNATWKILEIPFSLVGIKQIGTLQEKKIEKYFWRSSAVRKQLDFESLAIVLQEINSNLNNSSGYLGAISDRSKELYFNNQTVGEYLYQQLKANPHTKLKNQVFYRQDYLDEFEKIWETQSKYYKELTKELKEEVRDVVIFYQRKLKSQKGLISICEFENREIEITENGKTKKKTVGLKVAPKSSPLFQEFKIWQVLNNLQFQNLESKEIFPIDLEFKQSIFDEVNIKGRLSAKEVLDIMGYSGKEWKPNFKDIEGNNTNENFYTAFLKIIASEEKEFPKEFKLTIEDEIKVSKIHSSAEIIKLFVKEKLSELGINTSILDFNPELDGTDFEKQSSYQLWHLLYSYEGDDSPSGNEKLYELLEKKFGFKKEHSKILAEIGFPQDYGSLSSKAMRKIYPYVKEHKYSDACNLAGYNHSKNSLTKEQLENRVLKEQLEILPKNSLRNPVVEKILNQMINLVNEVSKEYGRPDEIRIELARELKNNAEERANMTSEISKATIQHQKYAEVLQKEYGIKVPSRNDIIRYKLYLELASNGFKDLYTGQKIEKENIFTDKYDIDHIIPQSRFFDDSFSNKVLVPRGANLKKGNFTAFDYLEIEGKEQLEKFLNTIKDLFDKSIISKAKFEKLQKKGIEIGDGFIERDLRNTQYIAKKAKEILFGITNSVIPTTGRITDKLREDWNLVNTMKELNLEKYRKLGLTETVINSKGEEKERITDWTKRNDHRHHAMDALTVAFTTHNHIQYLNYLNARKDESHKQHKVISNIENLITKVFEKKNGSKQRRFIEPIKNFRIDAKKHLDEVLISHKAKNKVVTKNINKTKKNGGLVSKVVLTPRGQLHKETIYGSSKFLKTKEEKVSGKFDLETINKVQNEKFRNALLERLQEFGGDSKKAFTSKNILVKKPIYLNEEKTEQVPESVILAWYEVGYTIRKAVNPENFKDYKNLDKIIDKGVKEILKNRLDAFNGNSKEAFSDLEKNPIWLNESKGIAIKTVTITGINNAETLHYKKDHLGKEILDENGNKIPVDFVSTGNNHHVAIYEDTDGNLQERVISFYEAVERVNQGLSIIDKVYNQSLGWKFLFTMKQNEMFIFPSDDFNPKEIDLLDEKNLSLVSKNMFRVQKFTIKDYFFRHHLETNVEDNIKLKGITWRREGLNGIRNILKVRLNNLGKILQIGEY

SEQ ID NO: 2254 - protein, 1376 aa, unidentified
  REGION 1..1376: note = Description of Unknown: Cas Enzyme sequence
MDRKEYFIGLDMGTDSVGWAVTDTEYKVIKFNQKALWGVRLFDGAKTAAERRGFRTSRRRVERRNQRLNWLQNVFSEEIAKKDPGFFQRLKESMFSQEDKRSDFEEQPGRFSLFNDRDYTDKEYYKDYPTISHLKVDLLEKDKKFDIRLIYLAVHHIMKKRGHFLFDDISADDEITFDIGFDSLNDYLEDCGFERITLNNKDDFTKTLIDKKIKVKDKTKLLLEHAGYSKKDKQKEALFTLISGGSGNIADLYDDESLKELKSIKLANYENFEAELSEALGDDFELINRIKMVYDCAMLESIVKSDNNTNHYISVARKNIYEKHAKDLKLLKQLVRKYLTAEDYREIFRVCSTKINNYTAYSGNYSDKSQKSTDDKLKTNPSASREDFYKYIKKKFKPFEDKEDVKAIFSAMEENDFLPKQVGAENGLIPHQINERELKKILENSSKYYPFLNEITDDSGLTTSEKILQVFNFKIPYYIGPLNKNSKFAWLERTDEKISPWNFSDVVDTKKSAENFIVRMTAKCTYTGADVLPKDSLLYSKYMVLNEINKLKINGKPITVEQKQSMYNDLFMRYKTVKIKVLKDYMKNNFGVTDADVVSGIDMETGIKASLSSYHSFRNILENYKDEEMVEDIIRHIVLFGDDKKLIKSYISEKYGHILSEADIKYAASKKFTGWGRLSKELLTKIYHVNKETGEAKSIITSMWEDNKNLMELLSCEYDYMDKAIEYKKQHMPHGANSVKDFIEESYASPSVKRAIIQATGIINEIEKIMKASPKRIFIEMAREKEDPKKKKKNEAKRKPRKDQLIELYKKCKEEEPELFASLQDTSEEKLRKDSLYFYYAQLGRCMYSGERISIERLSSDYDIDHIYPRSKTKDDSLDNRVLVKKTINSDIKKDNYPIDHNIQKNMKNFWNELEKKGMISKEKYKRLTRTSEFTDSELAGFINRQLVETRQSSKVTAEILQSLYGDNSEIVYVKGGNVSDFRKGSVNKKTGEVERKAFVKCRDINDYHHAKDAYLNIVVGNVYHIKFTKSPVNFIQELKKSNQAYSLNKVFDYPVERGGETAWITKSTKYKEKSYAIVERQMSKNNTLFTRLAYEVKGKFYDQQLLKKGFGQAPIKTSDERFDLSRKKYGGYNNCYGAYFTYVEHDNKKKRIRSIEPVFILNKSVFEENPVKYCTEVLNLKNPVVLIKQIKIDSLISIDGFRGHISGRAGVQIILKNANQLLLEDLWHDYVKKLSKYLDRCKDAQKELTVTKFDGITKEENLMLYDVINQKLNTKPYLLKYNTQYNTLKENREIFESLSIHNQTVIILNVLNMLKCNSVTANLELLTGKGSAGEIKITKNISKKIGEEIKIIHQSITGVFEKSVDLLCDFGESTK

SEQ ID NO: 2255 - protein, 1374 aa, unidentified
  REGION 1..1374: note = Description of Unknown: Cas Enzyme sequence
MTYFVGLDMGTSSVGYAVSNEQYEILNFRQKAMWGVRLFDEAKTAADRRTARTNRRRLARRNLRLKLLQDLFAEAINAVDPGFYQRLKDSFFYPEDKDEEQVYSLFADADFTDKDYHKKYPTIYHLRHALISNTEPHDPRLVYLAIHHILKSRGHFLFTGSFDMQGNGQYIETFKDFQAVLSEVFEITLPSELAEPIKNAINDKSLKKREKTEELKKITNWKDANAVAILELLSNRKVKISKLFGDEHKDQSPKDVTFEGNGFEEEKQAELQALLSDNEFSLLLSTYRLHNQLRLDTLLQGYETYSASKIGLYEKHGTDLRKLKRIFRKYFSSDDYKAFFSQSKSKLNNYVAYTGHLKKNKKKVAVNYRCDAINFLDDLRKKLEPVARDNPEDTLLAEILVEIDNQLFLPKQVSKDNSLIPNQIHVEELKAILNNASAYLPFLNEIGEDNHTINEMIIKLAEFRIPYYVGPLNPAHKVCPEKKDGSHHAWITKRSDEAVRPWNFHRVVDEEQSANDFIANLTNKCTYLIGEDVLPKESPSYARFILLNQLNMLSYRGERLPVIYKHAIYEELFMATNAKPRFSKKDIAEFLNIKFGDDFNAADIGGMDLHINNVLKAERQIEAIAPNQLSLQDKEDIVRLITVLPDSNKMLVNRLKNQFLDKLNDEQIKRISQLSFKDWGNLSEKLLSGIRAIGPDGVETNILDAMWNNNLTLMELLSASYGFKEQIDAYNNEIVGEARTLDYQIVDEYPYLSPAVKRMIWQAIKIVNEIVKIQKSAPEKIFIEVAREEGKKERTTSRLEQLKQIYKEAKILDEHLLSELNEQSESSMRRKKIYLYFTQLGKCAYTGKPIDFEKLLEQGDSSDAYYDIDHIYPRSKTKDDSLRNNLVLVESSANRDKGDKYPISLDVQNARRAFWFHLKEKGLISDEKFFRLNRTTELSDEELESFISRQLVQTRQATKAAAEILGKFYPDTRVVFVKAGHVSDFRYNQRDFEFIKVRAMNDLHHAKDAYLNIVVGNVFDTKFTQDVRNYIKTAGKRDYNLARMYDFDVKSRDGKLAWKAGQDGTIQMVSKMMNRNNIATSYQAVLRTRGQSGGLFDQNLLPKGQGQYPIKSTDPRFVGDDGIAKYGGYKNITGTTFFVAEHTLRNKRVRSILPLYLPWVLANGQSKEALQDYCQNTLNLVEPQIILRNLPFNSILRLNGFPLRLLARTGSSLKVAPALQPFFPAEIEPIIKTFTKDIEDDVDDKVLLRTVTEEDLMLAYQVFQHKISSTPYNKLSSYTNQARNLESGEEHFALLSIREKFRVLNQILILFTCDGRLSDLSLLLPKDKNGKSSTKNTQVGMIRIPQNIQEGNQLEVVFQSVTGLYEKTIRISLP

SEQ ID NO: 2256 - protein, 1329 aa, unidentified
  REGION 1..1329: note = Description of Unknown: Cas Enzyme sequence
MAKVKDTYQIGLDLGVASIGWSVVDDNNKLIRKRGQNLWGVRLFDEANTAAERRGFRRQRRTISKRIWRLSLLKNELKSFVIKEDPGFFDRFSKSQIKPEKYMLFDGKYNDATYMREFPTIFHLRVALQSEKKCREYIKRGIYYRLLFLACHDILKTRGNFLSSSSLGGSTGNSKDSINQLINNLVTVIHEIDENSELDYNFIRKALADHLSSKEKINARKSDKNTTFLKAVLGYKFDLNNIVYFSDEKLNFDFNIETWDEQLTNDESIDGILLELFEIYKNIKLNVLIGEHKSLSYAKVAIYEKHKKDLFTLKKDIKKVDNNLNSNHYDDLFLTDGKKVSYTSYVGKLLIDKQKIKIKKETSREDLVKKLVAIRKEYQDKTNDLKLLSYIEEEDFLIIPTNKDNRLIPYQLHFNELEVILNQFINIANSKEAIEHAKNIKILLKFKVPYYAGPLSNHASDEMSNYWLIKKENHKNSKITPFNFDEVVNKRETNKAFIGKMLRKCTYLTNEICIQQETTLYQTYIFYNTINKVKVNDINLTKEQKQILFSNSKSGKTLTKSRIISMLGLPKNSDLTGFSKTDEDKPLQISLSAIKKFEKIFPEYKNNPFYMSFYDDVVNSISLIDSDELDVRREQIQDIIDSYKTIIISNQQVDELASVKSSKWGNLSSKFLNEVLFDDGEGELRTMLETLKDSNLNMMEILYKGDNQLTLDRLNNNDFNLSDSNGLHEYLKTRYISPQAKRTITQANLIIDEIIKIMNGVKPTKISIEFTREKEIYKKETQSRFKQLSEIYKNLESENIQVINELGNLQKNKEEDKLKSKKIYLYFMQLGKDLYSGKSIDFDLLMSNSKFYDIDHIFPQSRIKDDSLDNLVLTSSVINGEKNNIYPLPKEVQDNNKDLWAYLVNKKLISQKKYERLTRITPLSDYELEDFVNRQKTTLDWINLEIANIFNIKYNETNDKNFIIYSKSRHVSAFRNTFNLLKFRELNDFHHAHDAYLNIVLGKAIQKNLYINSEGKFRTYNYERILENTLEDQIKYIQDIFKHNDILVTKKTKINSQGAFWDQNIVSAKEPGKNDGYAPIKNFLEVDKYGGYNGVKTAFFTILDINGKKVIEAIPTVDCSNFYDKEMFNNQKFEHYIASNYSNATIIVPIIPIGQKVLLDGVPLRIAGKSKNNIIYHNSSQLVLDKKTQEYIRKIFSIQRRFKGKKIEENIWLDAGLTKEMNINAFEIILMKVNRLAETHKLYSKHTIDKINGSGDTLDEFKGYSFIDQIETLIMIITKLLKPNSSNQGRLFGTTYGDMPRNKILTSKGISVVKESVTGFYNKIINIDV

SEQ ID NO: 2257 - protein, 1071 aa, unidentified
  REGION 1..1071: note = Description of Unknown: Cas Enzyme sequence
MQYTLGLDIGITSVGWAVLNNDDERIEDLGVRTFQGAENPKDGTSLNTPRRMARGLRRRLRRRSHRMKRLVHLFERRGLITEAQFEDFFARKFILTPYDLRSVALERLVSAEEWLRIIYHVTKHRGFKSNRKSETASGEGGEIRKNIERNQAELKAQGYRTIGEMLSKDVRFADNKRNKAGSYLNTIARVMQEDELKILFAMQRQFGNLFADEKFEADCLIVFNSQRHYAEGNQVLKMVGTCTFEEGELRAPKAAYSAERFTLLQKINNLRLVLSGVRIELTEEQKANCVDLAYKQSKLTYKQMRIKLQIASEYKFNGLRYSGKNGDEDPEGATFVELKNWHMIRKTLEKYSKTYWLNISTQPELLDNIACALTYYKADDQVSRELAAIGIEAPAIDELLNISCDKVMHLSLKAIRKILTYLEQNIRYDVACEQVGYCHYQPKAITAQSLLPVVERADITNPVVFRAVTQTRKVVNAIIRKYGKPEFVNIELARDLGKPKLERDKIKKGQDEYRKFKEDTARSFKEHFAREPHGDQLLKWRLWREQGSGYCAYSQRYLEPLRLFDDGYTQIDHIIPFSRCLDDGMANKVLVTVEENQLKGNSTPYEYFGSNENRWHRYEEWVNSTIRSWTKRQKLLRKEYDRSTAEEMKERHLNDTRYICRFMKNFIEHNLQFSDSDKIKRVRTINGQMTAFLRTKWKFHKVRAEGDLHHALDAAVVAGASDKLVRRLTMFSKANELYHYKYKRLIHIDEHYIDPDTGEILDSGIYQNIDTKYFPKPWEHFCEELKARMSVDPTRAINANSFVKSKYDGVCSEIKPIFVSRMPKHKIGGTAHKETVRSAKKLVERITSLRTEIKKICIKKRKGFELLENMAGKERDYQLYDALKNRLELFGDKAENAFAEPFYKPTNDGSRGPIVRSIKIERKGGEGGVLINNGIADNAPMIRVDVFEKAGKFYLVPIYVADRVKQILPNKAIVQGKSRNEWPEMDDSYRFKFSLFSNDLVRVLAGGKETFGYYKSTDSSNGSIAVDAHDNNPKLCARGLGVKLAKEFEKYQVDVLGNYFPVRGEKRCELA

SEQ ID NO: 2258 - protein, 1086 aa, unidentified
  REGION 1..1086: note = Description of Unknown: Cas Enzyme sequence
MWRLALDLGTNSIGWTALELDNETKPTKILDMGVRIFSDGREAKTGTPLNEARRNARQMRRQRDRKIRRKNAMLNFLVNNKLIPKEREEQHFITQLDPYILRSNALERKLKPFELGRIMMQFSVRRGFKSGRKDQQAESNAEKEGMLGGIEALKTELQGLTLGRWLCNQREAGNSVRFKARTEKTKIIYTFYPSREMYENEFAEIKKKQEKYYKDINWERLHWLIFFQRPLKRPERGRCQFYTNEDRGYKAFPSAHRFRILQDITNLRYYNDENKEEQIPSELKLKLFETLNTQKSISFDRIRKLFGENYTGSFNLEDNKRDKLKGNETSVEFRKPEYFGNIWDEQDIKKQDEIIEKLMIEDDESVIFNFLKPFGLTNEQIQKISGYNIPVGTTMLSSRFMIDCSEVMLKEWMQYSEAVKHMGLHHSKKEQKELRRSLPYYGEVLAGQVSGARGESFKGNDEKQFGYIPNPTVHIAMNQLRKLVNALIRRYGKPNQIIMEVSRDLKLSKTRKDELFREQTKNQKDNERIRKELSDLGLIKISSEDIKKYKLWEELAVEGIARLCPYCGKTISASQLISGNVEIDHILPYSRTLLNSRDNLTVAHRQCNQIKKNYSPFEAFGNNPKGYDWIRITELTAKLPSKKRHKFYPDAMKKFNEEKGGFLDRQIADTAYLSKASEEYLSVICKNSNIWVTPGRLTALLRGFWGLNTLLNRGHDTWYKNRSDHRHHALDAFVIGLCDRNLLSEAARINSGRGYGEIDAPSCPINRGEIEEKLKLIIISYKLDHGKEGKLYAETALSKHSYLEQINSDEIKENEICRIVPKSIQSDISQMVHKEGFKKAKIIFQKKYKYFRIFQDKWVTRAPLESLSERDIPNIADKLLREKIQKFVASNPVKTGQKLQDVLNKYSNKTGISSIRYFPKDQVPVSINSCDNKAYMPGDYYEVDVWQVPQTKGKYKYEGIFISRPEAMQQQLLGDDKVLIKRHDHPAAKLIMRLCKNDIILLQNDNEQEFCRIAGFSTTQNKIDIRPIYASDTIASWKINTNINFSSDFWLSNIEGHNFKSINVLFNEYKIKLVKITVDGKLIYRS

SEQ ID NO: 2259 - protein, 1387 aa, unidentified
  REGION 1..1387: note = Description of Unknown: Cas Enzyme sequence
MQKRLEIPLSIDLGANFTGVFMGCFPENSPLSLEQLTSKASILVIPKDGSKITWSQVSRRQKRHQQRNFKRRKLAKRLIRLLIFKILDKELTPTEIEPIFGLLNRRGYNRLEAEIDWTLLEGVLPDWHAAKFPEFFNKREPLSEQFSRLIQDTNTLRVILEDTPDFWMDPKVIRKSIKEFFQDSNEVEKAHKEMQKAIKQIIASIDTGARHRREYLKNIKEEIKADKRLCKVAEQFPDPDAFYRLIGNVSNFQLRTLRWYFNDKKMAKGDYYDDSRLRQVIIRWLARWRPEEETDKRRRSSLLKDIREADSALTWLISTDPEKTIPPYEDMNNRRPPKDATLWLNPVALTKLYGEKWRFWVERLKRTNIDWAEGINEIIEHTDRKSRRYGNSESSKEEYEDAYFLQRILDRSLSLDPYKLRLLAKGAKSEAATLGKSLLSSDIGKHEVDDFINFCAAYYREIDRARAGLWLHTNSSLLERADINPPMKKRILPQLVGNILGIKSMSKSQFQDFYDNVWIKRIGRSTIRGAAQQVEKIRKKYGNIFSALIKRAKYLESKGVKLNSDEKEAIGALAKAEFAASAIAEYFQHTPTQAIRYANPFSIAQLYNIIETERHGFSRTSLAAHMENSWRMEMIQLPNGRQAARCVRLSADSIRPFDGILARILERQAKEIAKLYCEFVKEHSKSPDHLKLPIIIEENRFSFTQELMKTKGRPVPDQLTKLIDKQTKEWAEKYERIKNASLGICAYTGQPLENTVGEIDHILPRAFSLDEHGTVFNSEANLIWVSVQGNRLKKDRRYTLSDLHDTYLSIQFGTTDRQEIASKIETQLKQIQDDAPFEVLEPEQQKALRHALFMPQDSEAFKLAFSRLATRLKTSVNGTQAWLARRIMELLTKDLQKDGYQNLEFQVMRVPANRTNQIRVQLGEFNEKLAKPEQQGVFSHAVDALCALAAASEIEDFPPIQGISEEMDTLSRLMPLSADIIWIERIKPFKPWKSPQSIKLFKDGLYAENFLPIWWSDRGVRIGFDMKNCLEVSGNEPEKLLQLLSPLLEPEIPDHPPEGQPKAFRIDKKRALALLQRAAKGEISEKEQEIINVLQSLKYVTQKKEISSYFIDSSGKRKKLDRKHFRIKVNLKHPPGRGKKLFKCSGNLLLPSINKWNQIDELAREQGDNVDWQGIGRKLFRPGSKRIHKKARQTFSLPIIATMQGAYRIKRKCPFGNLLQLTMIGDLGTAGFALEESKINWKKTVPLRILDISPNCSSESPTRSGHNSSSFVALDHWVEIEPKGLNGIKKLWACPGTKDRAYVRILQDMNTFVDWMNLEEAGLSTLPAEVKPADKKALKAKFKWLGHPRSNIFMEHIGTEVQYWFIVESTTKALKDAYQKAFFVPSG

SEQ ID NO: 2260 - protein, 1390 aa, unidentified
  REGION 1..1390: note = Description of Unknown: Cas Enzyme sequence
MSEQQNVLVSPVSIDLGAVNTGLYLSQHYLGDTGLSSNKGVLIRTSEKKLMFSMRNRTAKRHQMRSYKRRKLAKRLFRIILKAEYNIEFFDLDPKEQELLNGFFNRRGFSYYQEEFDTSILNASLQLLSDLIPQINPIDDIEVQIATWATDIDKRKAIRSSDVFQWKKSQCNAFMKANCKDYDVGILFDSLSALKAIIDSIDKSVTEGHKPRTEYLENIKHDIRNSWVDLKELSKCGIKPDELANLIGHISNLQLRCLRKYFNNEEWKEEVDGRWDSNRLTKCFGRYVKAWHVDVTDTITQQKRKEMLRQLNDGISALDLWLRTDPSTSIPPMEDQNNRRPPKCKALLLSETALNRLYPMWRDWLQTKAFGLDERFDALNPIRRLQCIFDRTSQIDVVNIRLLSSAISSGKKKDEAISEQIEILKTRIGSDYNSFLECAGRYYKECEMAAQGTWYPELPDSILTICNVNPPHKKQILNILVGHLLGVDFNNIDIDGIKTFLKDKKVKNTSLLGIARKSAELQKTYGQSFNEIYHSVDKDEADIDRLRQLLKDSSPLIADYLKNPNLVERYSNPFIMAQLYNLLETDPHGFSSTCRVCTLDNALRNQIDVGNQGAAFAKRLPSDTNQPFDGLINKVMKRIAYEIAQRKIEQIQSQIDLGRQITSIIIPIIIEENRFEFSNDLAELKEKQMGTPIDKTRLERINKSVEAQWLAKGQRIKSDAAGLCPYCGEPLEDIGPGEIDHILPRSFSKQTFGVVFNIEPNLIFAHASCNRKKGDRRYTIDNLDSRYLQAIFGTADKSKLTDSLKSKVSSYLKKGSVAFSSFHALPANERNAIRHSLFVEELFKDIIGYLNQQSKTRVNGTQRWLVRHIAKEIRKHFSGRDINITILPYRIGADQVSELRQKLNQVNPVFEKKQEQATYSHIIDAFLAYLLWTATNKDAADLLRDISVPDISDVSSWEAFAPSVFDVHTVKAKPIFRKKDISSRSIFSATIYADHYLSFIVRPDGNCMLGFSSRNAVPIDKGSKYLFNTLRIFLKDDTYSSMDFEEVLRSAQNKGMVLILPFSKTKIYRYIFDNKHSADPGIQKTMNILNSISYKTVKTNVITMLTKGKAIITKEKLNSDFSNDSPYFMIKLSLSDKSVPMYAKGDLVLPSISAWLRLANDPEIAECYGKNVPDGFSWDSFLANKFSNNLVTLKDRAHRPVRKVYSLPIINSPSGGFIARRKMQSGEHLWQILKVDGFAYEGFAVSGDNVDFSEPVVLKKLSSSSNLVAIGDKGTTNTSSCYMDEWVQIEVDSSLTNHVLSIEMAPHSSPRQAFRVTFKRDYFENDIVKKDTRLLPSEVKTADWPKDLVKPRDNKFSVVAVNSESVSVEFISESKAHKKLLNAYNMARNK

SEQ ID NO: 2261 - protein, 1048 aa, unidentified
  REGION 1..1048: note = Description of Unknown: Cas Enzyme sequence
MKKYRLGIDLGATSLGWSVLGLDKDNSPKDLIDIGVRIFPDGRDAKTNEPLNVQRREHRSSRRNRDRYLQRRAYLMDTLVIYGLMPKNEDDRKQLEYLDPYFLRAKALDEEISLFELGRAIFHLNQRRGFKSNRKLDSAEKETSRMKDAIKELKQKLDDADARTLGEYLYNLNNDVPENQQHKKRPARIRDFGKDYNFYTDREMYSDEFDMIWEKQSKYHDELIEKKKEYIKRIIFSQRDLKPQPKGKCRFEINEFRAPVAFPIVQQFRIYQEVNNLILLDFDRKEHKLTNEQKDIIITTLLKQKTAAFKSLKKKIVKDNPEEFVFNLESEKRKDLKGDETSYIMRKDEHFWKIWDDLSESEQDEIIRRIINEDNVVEIETTLSTWLQENFDVTEEQALHIKNVRLPQGISSLSIKAIKNILPYLKEGYIYSDACAKAGYHHSDFRTGDVYDECDLPYYGEVMPGHVAFGSNDPDDIDEIQFGKIANPTVHIALNQLRKFVNALVKRYGAPSQIVIELARELKLGQKRVKEIEREQTENRKHNEAVAEELGKIGIENTYQNRLKYKLWEELDADPTKRCCPYTGKQISIADLFSNKFEIEHILPKSKTFDDRPLNKTVSYYLANKYKGERSPYEAFGNSPEDYNWDEILERGKRLPPKKRWRFFPDAMKNFDDSGELISRLLTDTQYMSRMAKEYMSYVSGPNNVWAIPGALTSKFRAKWGLNELLSEDSEKNRADNRHHAIDAFVVACTDRAMLQKVARATEKSRERFIEKMPPPFEDFSYDEMQKKINNIVVSYKPDHGNAKAAIKNDQTVGQLHDETAYGYVSETEDKITLSVRKPIRDLNTIKKINEIADDHIRKTLLKAIEKNKDKKIDEILKDFGSTSGIKRAKIYVEKDKKTVIPVRNIKGEIYKYYLSGNNYCADIYCPDKGKKAGKWQIEIIPMFYAHQKDFEPEWHKKYPTAKKIMRLFNNDNVSYIEDGNRIIGRVRKMTGNTVYLRELNIAKKEKGREDIGEQFRPAKLQDMNARKVGIDILGNVFDPQRYEYNRD

SEQ ID NO: 2262 - protein, 1064 aa, unidentified
  REGION 1..1064: note = Description of Unknown: Cas Enzyme sequence
MKKNYRLGIDMGSTSLGWCMVELDEHKEPIGIIDLGVRIFSDGRDDKSKKPLSVARREHRSTRRNLDRSRDRRKELWSYLEEISFIPKDQDERKVLIDQNPYYLRSKGLDEELSIYEFARAIIHLSKRRGFKSNRKDLAKEKKTKLTDALENLKEGLSESGSRTIGEFLYYKQKGVKEHKRSSVRFNYDEKETDKELIFPTRALIEDEFNQLFDTQAKYHRELTDKVREMLYDIIFYQRPLKAQTVGKCYFESDEFRASKASPAFQEFRLWQEINNLKLINKNTFDELELTAEQKIKLFNELSKVREKTFTAMRRSILGRDQAEQFEFNFEGRSRSGFKGNETNHLFRANKLLDFWEEINEDRKEEVVSLIINSELEDEEVKSRLLNMELPTLTEGQIEDLININFPDGYGRLSVRAIRNILPHLREGMIYSEACTAAGYNHSDDYTGEVFTDGDLPYYGAVLDKEVIELQRKTHDKDADDYGKINNPTVHIALNQLRQLVNALSKRYGAPEQIVIELAREIKHSEKKRKEIDDIIKKNTKENERIAEELDRLGIANNYDNRTLYKLWEELSSNPLERRCVYSGKQINVEDLFNIHNPKFEVEHILPKSRTFDDSFANKTISSREANRVKGERSPYEAFGSNSGEYSWDEILERAGNLPKNKRWRFQPNAMKRFDDESEVLARMLNDTRYMSRVAKKYMNFVSGKNNVWVVTGKLTSDLRRLWGFNSILSDDNIVDIKAKKERADHRHHAIDAFVIAMTSRSFVQRYSTTIKRSKDRFIEQLEKPYSDFSHESFRERVENIVVSYKPDQPNPHKLRSRNQTAGELTLDTTFNFYEEDENDSSRAWYTIRKPIADIKHKDVENIISDRFRDELTALSEGLSEKELTDKLTEWGKKNNVKKLKVKQRFSKKGMIPVLDQEGHPFKYVTSAENIYIDIYQPDPSDLKSRWQMEIVSSYNAHQPDFSPEWKKEFPKAKLIMRLYKNDIVAFDNDAGGRELRRLKKSSGRVVYLRELNVAYKPSHLENIGEQYSARQLQERNACKAGVDILGRYFDPGRKDKIDEYNRN

SEQ ID NO: 2263 - protein, 1026 aa, unidentified
  REGION 1..1026: note = Description of Unknown: Cas Enzyme sequence
MLLLDEKDNPVDVYRMGVRIFPDGREDKSKSPLSVLRREKRGTRRNLDRYLERREQLLKWLDTEGFLPQTEPERTQLFAQDPLALRVKGLDESLSLGELGRAFIHLAKRRGFKSNRKANTNEKDSIMFDAMHHLEQALIETNSRTVGEYLFNRNYGLGLKEQHLRKALRFRYDASNPEEDRIFPTRAMIEGEFDILWEKQVRYQAALTPERYAALREIIFYQRPLKPVLPGNCTFEPGEHRCAKAHPYFQISRIWQDVNNLQLINVANGEIIDLSLEQKHKLFLKLNQSKEASFSSLRKELFKKEAETYRFNFENETRTKFKGNEVYHAVQSKLKKAWENRSEEQQIQTIELLIGDEKDEQAVQLLQRMGYTEGEIEQLIAIRFPDGYGSLSLLAIRKILPYLQQGYRYDEACTQAGYNHSHSGTGEVFQDGDLPYYGALLKQQVLPLQRKSYDPDSDQYGRINNPTVHIGLNQLRHLLNAMCKRYGAPKQIVVELARDLKMGEQEKIDLKKRQRKNLETNERITLELEKLRVSNNYENRTKFKLWEELNRDPLQRCCIYTGKMINMERLFSPDVQIEHILPKSRTFDDSNSNKTLSYAAANRYKGERSPFEAFGESRDGYQWEDIVARAQNLPNNKRKRFQKNAMELFKEEGDVIARMLNDTRYMSRVALTYVKYVCGEYQAWAVNGMLTARLRKYWGLNSILDENDEKNRTDHRHHAIDAMVIGLTSRSTVKLLAEAIRSENDRYLSRLANPFEGFNVDRLREKVNQIIISYRPDQVKPSELQKRNQTAGALMEETAYGLVKIDEKDSERGIFSVRKDIGSIRFKDIESVKSPEIKKQLIELMNNTASEEEFVEQLKAWAKAQNIKKVRMLVRLNFSTMIKVLDKTGNAYKYYSSDENLCADVYNPRPFDPSSSWKVEIINSYAMHQQNFTPEWKKQFPMAKLVMRLYKNDVVAYTNDEGIRELRRVRKMTRGTVYLREMNVASKEKSIDGIGEIFSGNILFKKHACKAGVDILGRLYDPKAEE

SEQ ID NO: 2264 - protein, 1216 aa, unidentified
  REGION 1..1216: note = Description of Unknown: Cas Enzyme sequence
MKERGSKMEKNYILGLDIGISSVGWGLLELDANNNPYKIIDVGSRIFTPGEVEKTGDSRAKERREKRGARRISRRREFRLDRVRNLLYENGYLKGNINSNIVSEKNEELSIIFDNMINNYYKEKNSNPYKLKVEALDRKLTNEELSIILVHYAKKRGYKSNREEASDNDSGKVLSAIKENEKIMNENNYRTISEMYIKDEKFKNKIKNSPGDYKISVTNEMYLKEINMVLNSQIKFGLITDDFKNQYLEIYNSRRSYAKGPGGNSPYGGDLIERMTGKCNFDGKPRAPKRAPSSELYVSLTKLVNLKYKKEDNEYTRLTNEEIKEIIEKAKDKKIITYKDLAKELDGNIEFKDLSLSKKEYGKVIEELKKKLNISKEESINISNLNSNDRELFNTLYNEKLLSKTLIELKGYHALKDSIIKAYSNDIWKKFKDNIELLDELALYCTNYKINEDILNKIKESENIENIFEDIHFIELLPNFKDHLMLSTDLIKKLIPLMLEGNTYDKAMNILGYNHSDINGDKEKKDLLVPIYVDDTITNQRVIRSLTQTRKVINSIIKKYGMPKIINIETARELAKSRKERNEIAKNNVEKQTENEKIKNQLVELGLFVSTDKISSTDLLKYKLWKEQNEFCGYSMKKISIEDLFGNNIVQIDHILPYSRTYNDNYLNKTLVYTKENQEKGNRTPYEWFGKTQKWDEYEAYINNLTISQKKKDNYLLKKLDFDTEREMRDQNLNDTKYISKELSSLIKAYLNVEKVNMYPGAITSKLRARWGFNRLTHSYISKTYRLPEDMKKDINKDRDNHLHHAMDALVIASITPSLQQKITLYEKFSRYIDGLTKKTIENLNIENGKEILGEYYDDTTGEIKDINIIEYIKKQLEEEHIYYNKHNISRLEFPLPYENFDKEAKLRVYEQDLDTLKWNLKSYNTYTKKDIESLHTLVPSIAKTKVSGKMHEETYYGIKEIGKDEDKKIYKTLRTPIEKVKRKDLENIPDRLGGSKDIYESLVEWFGDYEVGEEVLKANGNKYPVSKSDKEHKEIKKLKLYSEYKNTGHMINKSNVEKGGIYRIDVFKSKDKDDDKLYFAAYDILEIKKINTLREKNMVDDNFNIKLDYGQGKNNKIISYTDIINNYDLYCTLNKNDLIKITTKDGKESIAYVVGCSSGMLEVKSKLGDGYDIIVNDYNENNIFSKQRDRYTTTISTIKEIEKLSISVLGEISGV

SEQ ID NO: 2265 - protein, 1205 aa, unidentified
  REGION 1..1205: note = Description of Unknown: Cas Enzyme sequence
MKYNYILGLDIGISSVGWGLLALDENNKPYKIIDVGSRIFTPGEVEKTGDSRAKERREKRGSRRVTRRREFRLDRVRNLLYESKLLSGDVSSSIVSEKNNELTILYNNMINDYYKSNNTNPYRLKVEALDRKLTAEELAIILVHYAKKRGYKSNREESNDNDSGKVLSAIKENETIMATNNYRTVSEMYIKDEKFKDKIKNSPGNYKISVTNEMYLDEINKVLDKQIEFGLIDSEFKNQYLEIYNSRRSYAKGPGGTSPYGGDLIKKMTGKCIFDKEPRAPKYAFSSELFVAISKLVNLRYKIGNESYQSLENAAIVKLIDLSKEKNIVTYKDLVKVLNKENVKIKDLNMSMKDSKVIEELRKKLAISNEQEINIYELSEDDKKIYDSIYNEKLFSKTLIELKGYHMLRKVITLCYSKDIWNEVKNNIEFLDELALYCTNYKVNEDIKKEIKSSKVIDSRFEEDDFIKTLPNFKDHLMLSTNIIRKLIPIMEKGITYDKAMEEIGYNHSDLSGKFEKKDLLVPVYTIQNITNQRVIRSLTQARKIINALIKKYGSPKIINIETARELAKSRKERNEIEKNQQERKAKNEKIKKQLVDLELFSDINKISSNDLLKYKLWQEQKEFCGYSMRKIKIEDLFRNNIVQIDHILPYSRTYNDNYLNKTLVYTNENQDKGNRTPYEWFGKTRKWEDYESFINSLSIAQAKKDNYLLKKLDFDTEREMREQNLNDTKYISKELANLIKAHLKVEKVNTYPGAITGKLRARWGFNRLTHSYISQTYIMPESMKSDIKKDRENHLHHAMDALVIASITPSLQQKITLYEKFSRYIDGVVKSELRKINMENIEESLGEFYDSETGEVKEVEYKEYVSEQLSHGHISFLKHDVSKLEFPLPYEKFVKEAKTRVYEQNIDILKRDLQLLGTYTTEELAKVHTLTPSVAKSKISGKMHEETYYGIKEIKEEEATVKYKTLRTPIEKVKRKDLELIPDCRAGSKDIYNTLVDWFGVAENGTEALKQHEGKYPINPNDKEQKEIKRIRVYSEYKGIGHVIKNSNVEKGGIYRVDIYTSRNENDEKLYFAAHDIYEIKKIKAYKDKKHEDKNFKIKLDYGQGEKYKIIEYDELMKEYNLKMSIYKNDLIRIILKDGRESIAYMVGCSSGMIEVKSKLGDGYDIIGNNNIFSKKRERYTVTLSTISKIEKISINLLGEISGL

SEQ ID NO: 2266 - protein, 1037 aa, unidentified
  REGION 1..1037: note = Description of Unknown: Cas Enzyme sequence
MRYVLGLDIGIASVGWAVLNQDDKRVEALGVRAFNRAEHPKNGASLAAPRRLARSVRRRLRRRAGRLQRAKTLFVDYGLIAPQALDTAFDTAKGKPSPWELRAEGLDRMLNGEEFARALFHIVKRRGFKSNRKNVKDAEDGPVLDNIEANRKRMDEAGYRTPGEMYARDERFATRDERFPARKRNTTDSYLNTVSRDLLEQEIHTLFQRQRELGSAFASPELEHGIVQVFAWQKPFASGDDIIRLVGTCTFEDGEIRAPKHAYHAERCSLLQAVNKLTYSTNGDKARLDERQRKTVVDMAYARPKVTYAQIRKAIGLPEDARFSGLTYLSRQSKAGELTEDPKCESATFFELKGYHTLRKAFSGDGLWERVSNNHDLMDDLAYALTFYKTDEDIQAYLAGRAAPELLEPAQTCAFTKTANLSLVAIKNILPHLENGMLYNEACAAAGYNHTGKGGGHKTEKLPPIPTDLIRNPVVLRALTQTRKVVNGVISRYGSPYEIHIELARDVGRSYEDRRKTEKQQQENRKQREERERRFREEFNREPVSADLLKWRLYAEQSGRCAYSLKPLDLDRLFEPDYAEVDHIIPRSRSFDDSLSNKALVLTDANRNKKNRTPHEWFGHDAARWAEYEAWVRGAIRDPRKRGNLLKENYDARQEEERKERCLVDTRYASSAFASFVRDNLLFADPSHKLPVRCLNGQVTAWVRALWGLHKDRQDSDLHHAQDAAVIAAVMPHQVEMLTRYAQVVETREPVVDTETGEIIEWKENQRPRLPYPWKGFRREVLDKTGEVVVSRMPLRKTGGALHKDTLRSSKHQAENRTKVRKPLAELSAADLPNLVALDEDRKLYAAIERRMAEFDNDAAKAFAQPLYKPLKDGSNGPVVKTVKVWQTLGVGVPVRKGMADNASMIRIDVFRKQNNKGKWQYYVVPIYVAHVMSGKLPDMSADHEFLFSIHPYDLVRVAGADWSMLGYFRGYNVNTNSLELCEPNNVRSCKGSIGARNLLCFEKFEMGVLGDYYPVRKETRRGLANDSDLEPGEAEG

SEQ ID NO: 2267 - protein, 1231 aa, unidentified
  REGION 1..1231: note = Description of Unknown: Cas Enzyme sequence
MNELISPNTAWKTQSEYWLQHEFYRTAVVLGIDIGLEGIGLYLRKGPQEIFARSLILDLPQAEALAERRAKRAWRHCRKNRKRRLHRLQLLFAKYRLSWLPAERMSRSNPFKERLRAVTTGVASREALSICLRSCVAHRGFDYGGTEEGQYPWGGSSKLSDATQWLHTAVVTNELKDLIEDKLDELEADKSPEERRAAFRDLLRERLDWSLHHDIEMILREHAKGGHDNLRPRARGVNFPRKEVWKHIEKIVRHPRHREFLPDPEAFLKELGIDPNKAGGASPKERLANAARARRKAIFFYNRKAYPEMERHWAKKVNDCPYGQRLDPGLQGSKITCGEKGELPIRKWSALEFSATRRVEMETIFGKGKEKTIRRSLHSLSGGAVGKILKAIEQHDRALKSGDKSAAPSWDEVKAMLVEDLPTLANAKVKLATSKKGDWNETFLEQLRNLTLPSLANRKQRASLSALAAERLFALATQDGRDIDPAQFAPRLKAIGFYDWRRAATVDFNPYRQVEVLLGRRIKRGKKHGQLAESCQGWLRRIFADQSEALDGCTAPDYCVIEVIGDAPRTSRQAQEIKSAQDERGQKRRELFAAHNLEDSGIASKRRRISLWDQQKGVCPYTGKELPKDPLDPALELEHIFPAEMGGLSTDENLVLTWRTVNGDKGKHTPLQFASKLGVPFDQLVAHTKEMRWSGKKREIFAWGTLREAKDDQKSHYLPDGVTLRVPDFGKTTRTAQLARQLRAEVMRWMQVEDQPDEAARRIGTPSGWLAAQARKSWLAAIDYQKVRNNLTHHLIDAAVLAHIPPREGMNSVICKGIFYVEREPVRDEATGITSHRFVTKALPELSALPRIKQWLPDNGEYAVCPVLKPRRQSKTQSLGDATFWRQVRQGEPTLAQRTVLNPENITDADELHATLQRMRVDWNKQKQQTESKIPSRDALQDWLDAATPTTKADKNRPIPTLKLTDGTPIKSLWKFDSKGSLSSPVGWSGKRNADGKLRELRSISLKYDRLELWLGYDHREAERARKSKTLDWEQSGWVYQKRLIPDARALRHLKQMGFSFGRDKRRKAPAFMQGKPDKPETHLSVRDLVLGGRLLPFSCRVGAIKKGDEFLLHLLPDGSVRKRTPGGEAEPAAAFSTFYAVTALSHEGGNPRVELKSRLFKEKEGTPLERFPGDLTTRKVAVSSDLAFLLGLPPAWIAAQQRGLRPPSPQIEHAKTTTERNSRDPNPRLL

SEQ ID NO: 2268 - protein, 1192 aa, unidentified
  REGION 1..1192: note = Description of Unknown: Cas Enzyme sequence
MLMSKHVLGLDLGVGSIGWCLIALDAQGDPAEILGMGSRVVPLNNATDAADFSIGKAFTANQERTARRTMRRGFARYHLRRYRLRRELEKVGMLPDAALIQLPLLELWELRERAATAGECLTLPELGRVLCHINQKRGYRHVKSDAAAIIGDEGEKKKDSNSAYLAGIRANDEKLQDEHKTVGQYFAEQLRRSQSESPTGGISYRIKDQIFSRQRYIDEYDQIMAAQRVHYPDILTDEFIRMLRDEVIFMQRPLKSCKHLVSLCEFEKQEKVMRVHQDDGKGGRQLVERMVKFGPKVAPKSSPLFQLCRIYEAVNNIRLTRPDGSPRDITPEERAKIVAHLQSSASLSFAALKKLLKEKALIADQLTTKSGLKGNSTRVALAAALQPYPQYHHLLDMELETRMMTVQLTDEETGEVTEREVAVVTDSYVRQPLYRLWHILYSIEERDAMRRALITQLGMKEEDLDGGLLDQLYRLDFVKPGYGNKSAKFICKLLPQLQQGLGYSEACAAVGYRHSNTPTSEEITERTLLEKIPLLQRNELRQPLVEKILNQMINLVNALKAEYGMDEVRVELARELKMSREERERMTRQNGERKKANDKVAEKIQKCGLFPTKSRIRKYRLWEEAGRQCLYCGRSIDEKQCLNGDDMEVEHIIPKSVLYDDSYGNKTCACRRCNKEKGNRTALEYIRAKGWEAEYMERINGLLDKKAISYSKYQRLRWLKEDIPSDFLERQLRLTQYISRQAMAILQQGIRRVSASEGGVTARLRSLWGYDDILHTLNLDRYDSMGETERVSREGETTEKLRIKDWSKRKDHRHHAIDALVVASTRQGYIQRLNRVSSESEREAMSGEIEVQKATKTDKLSLLERWLMQRPHFSVRAVSDKVAEILISYRPGKRVVTRGRNIYRKKTADGREVTCVQRGVLVPRGELMEASLYGKILSQGRERIVKRYPLYALKGEVVDPRLRELIAEYNQEITSKVKAKGSPLYLDAAEKQEVRSVRCYVDKPSVAKAIPIRFDEHGRAITFVKSGSNHHLALYRTPHGKLEESIVTFWDAVDRARYGIPLVITHPREVIEQVLLRGDVPESVLRLLPPSDWVFVDSLQQDEMVVIGLSDKELQRALEVQDYHKLSEHLYRVQKMSSRDYWFRYHLETSVADDKNTSGRIPKFHRVRSLSDYEKRNIRKVRVDLLGRISLH

SEQ ID NO: 2269 - protein, 1215 aa, unidentified
  REGION 1..1215: note = Description of Unknown: Cas Enzyme sequence
MLMSKHVLGLDLGVGSIGWCLIALDAQGDPAEILGMGSRVVPLNNATDAADFSIGKAFTANQERTARRTMRRGFARYQLRRYRLRRELEKVGMLPDAALIQLPLMELWKLRERAATAGECLTLPELGRVLCHINQKRGYRHVKSDAAAIVGDEGEKKKDSNSAYLAGIRANDEKLQDEHKTVGQYFAEQLRQSQNESPTGGISYRIKDQIFSRQRYIDEYDQIMAAQRVHYPDILTDEFIRMLRDEVIFMQRPLKSCKHLVSLCEFEKQERVMRVQQDDGKGGRQLVERKVKFGPKVAPKSSPLFQLCRIYEAVNNIRLIRPDGSPRDITPEERDKLVAYLQTYEAPKPPKRKPAKAKPVKLAHPKLDLDKLKELLCIEEELFADKLLEEGLKGDTTRIALSIILQPYPQYHHLLDMELETRMMTVQLTDEETGEVTEREVAIVTDSYVRQPLYRLWHILYSIEERDAMRRALITQLGMKEEDLDGGLLDQLYRLDFVKPGYGNKSAKFICKLLPQLQQGLGYSEACTAVGYRHSNSPTSEEIAERTLLEKIPLLQRNELRQPLVEKILNQMINLVNALKAEYGVDEVRVELARELKMSREERERMTRQNGQRKEANDKVAERIRQCGLYPTKPRIQKYMLWEEAGKVCLYCGRSIEEEQCLNGDDMEVEHIIPKSVLYDDSYGNKTCACHECNQTKGNRTALEYIRAKGWEAEYMERINDLLKEKKISYSKHQRLRWLKEDIPSDFLERQLRLTQYISRQAMAILQQGIRRVSASEGGVTARLRSLWGYGKILHTLNLDRYDSMGETERVSREGEATEELHITNWSKRMDHRHHAIDALVVACTRQSYIQRLNRLSSEFGRGNKKMEDLEAQEQQAKETGRFSNLERWLTQRPHFSVRTVSDKVAEILISYRPGQRVVTRGRNIYRKKTADGREVTCVQRGVLVPRGELMEASLYGKILSQGRERIVKRYPLHDLKGEVVDPRLRELIAVYNQEITSKVKAKGTPLYLDAAEKQEVRSVRCYVDKPSVAKAIPIRFDECGRAITFVKSGSNHHLALYRTPHGKLEESIVTFWDAVDRARYGIPLVITHPREVIEQVLLRGDVPESVLRLLPPSDWVFVDSLQQDEMVVIGLSDKELQRALEVQDYHKLSEHLYRVQKMSSRDYWFRYHLETSVADDKNTSGRIPKFHRVRSLSDYEKRNIRKVRVDLLGRISLH

SEQ ID NO: 2270 - protein, 1073 aa, unidentified
  REGION 1..1073: note = Description of Unknown: Cas Enzyme sequence
MDYRLGIDLGSTSLGWCILKLHDNKPAGIENLGVRIFSDGRDAKSSEPLCVARRNSRSARRRRDRYIARRKNLMQCLIKNNLMPDNIAERKKMQDLNPLELRVKALDKKVSLHELGRAIFHLNQRRGFKSNRKVDRKNSDKGAVAGGINKLKEIMAENNSRTLGECYFRLNQVDDIHKHHLKKHIRIKPQSTKNNKNLYDYYPERSMYENEFDKIWEAQSKFHPELTSELKEQLKNIIFYQRDLKKQDVGRCSFEQDEERAPLAHPLSQKFRILQEINNLSLISEKGDPSALTQDQKNTLKNFLLEPTSKKNEIPFDKIRRDLKIDSVYKFNLESEKRKGLLCDLTARIMSSNDCFGKQWFSFSPEKQDEIISKCLTEENEQELIGWLCEKCRVNEETAKNISSADLPDGYGRLSIKAMQKIIPYLEQGYIYSDACRMAGYHHSDFRPDKLLDTLPYYGEALPNRVIGGTKNANDKPGPNSPLAQFEKYYGKINNPSVHIALNQLQKFVNELIKTYGHPKEIAIELARDLKLGRKKLQELEKQQTENKKTNERIDRELIGNGIKPNYEWRIKYKLWEELSKNPEQRCCPFTGKTIAVHDLLSDRTEIEHILPFSRTYDDTIANKTLSFTEANRIKGNKSPYEAFGHNPEGYKWEDILARSQNLPKNKSWRFLNNAMEKFSQQDTVIARQLTDTQYMSKIAKEYLQFICNPDKVQSIPGKLTALLRNKWGINLHNVLGDGDNEKDRTDHRHHAIDALVVALTTRETLRKVSEAAEEPIRHRLIERMPDPFDKFQSDGREKLKNLLENMVISHKPDHKGAKEAVKLHSTTGPLHAETAYGFVKELNKDTFVLSVRKKLADLDKKDIKNIADPLVRMELNELAGSCTDNEFKNRLCEYAQKNNITRIKILEEKSKDSVLGIKNKEGSFYKWYASANNYCAEIYCPKRKICDGNCRECKFKNKGVWECEIITAFDAHKKEFIPQWRKNHPYAKLMMRLFINDTVAYEENGKTEIRRVKKLSKTDRLIYLRDHRISEEKGDEKSRRLSAKQLHIKNARQIAVDILGRVKDPCRKPKCR

SEQ ID NO: 2271 - protein, 1032 aa, unidentified
  REGION 1..1032: note = Description of Unknown: Cas Enzyme sequence
MAYRLGLDLGTNSIGWCLLNLNQQREPDRLIRLGARIFPDGRKPKDGTSLAVDRRLARQMRKRRDRFLRRRGRLLDALIRHGLMPGDDAERKKLVRLDPYSLRRRGLDEPLTLAEFGRALFHLNQRRGFRSNRKIDKGADEESGKIRSAVTATRGLLDREKARTVGEWLAQRHEKREPVRSRLRGLGAKATYDLYVDRDMIAQEFDTLWEKQKSHHPQSLTDAVRVELRDILLFQRPLKPVRPGRCTFEPDDDRAPLALPSQQRWRIYQELNNLRLLNEGFSETALSLEQRDTIAADLLRGKKRSFDQIRRALKLNTRFNLESEKRKELKGCSTANILGHKTRFGPAWHDLSLTRQDEIVEKLLATESEADLTAWLERECDISEEAARAVANANLPDGYGRLGRKALSKILPRLAESVATYDSAVKAAGYASHSDFYTGEYHDFLPYYGKWLERHVSFGTGNIDDSDEKRYGKIANPTVHIGLNQLRKLVNAIIEKYGPPDEIIVEVARDLKLSYAKRREIEDEQAKRQEENDKHRRKLLEQGLQDNAENMLRMRLWTELNRDDPANRCCPFTGEPISVTKLFSPDVEIEHLLPFARSLDDSIPNKTVSLRRANRDKGNNTPFEAFGHSPEGYDWTAILERAQALPANKRWRFAENAMERYLRDEKDFLARQLNDTAYLSRTAKEYLSAICPPAHIWVTPGRLTAMLRAKWGLNSILSDTNRKQRDDHRHHALDAVVIAVADRSLLKRVADAAGRAHDAGLERLLSDMPQPWDGFREAVASGLEHVVVSHKPDHGQQDKLHNDLAYGFVEQPGEDGVARVVRRRRIDEINPSHLGPEGEDGVRDLALRNQLREAIGNETGTELKKRLLAFSEKTGIRRVRVTEKLSVIAIPDSPFKAYKGDSNYAFEIYRDEKGRWRENIVTTFEANQVKPPERLRDRQLAMNGKPLVMRLCKNDLVAIDDEGKRRIMRVAKFSPGMIALAEHQEANVDARNRDSDDGFAYVYKTAGSLFTTRGRRVFVDLLGQVLDPGFRP

SEQ ID NO: 2272 - protein, 1083 aa, unidentified
  REGION 1..1083: note = Description of Unknown: Cas Enzyme sequence
MSYRLGIDLGSTSIGWCILQIADGEPIDIIDMGVRIFPDGRDDQSKKPLAVTRRQKRGERRSRDRRKLRKARLMKYLILAGMMPEDRNQAKELEKLNPYQLRKDALDKKISLHELGRALFHICQRRGFKSNRKSDKKENDSGNLKSTIVELADKMEKQSARTLGEYLFALGEFDKEGIPRKNPKQAPQHTPVRVQVTTKGVGGNVYSLFTSRQMYEEEVSIILSSQKEYHPELTDGVIKDIKGTIFFQRNLRPQEAGPCRFESGEKRMRKAYPLFQHFRILQEVNNLDLERFAEHEKSLNRDQRFKIIAELKKSKDLSFKKMRKLLGLSDGAKFNLEAENRDRLQGDITAYAFTDKKKGGFGKAWFDLSPQQKDEIVKKVLEEENEAALVSWLIEKFKLDEQQAESVANASLDEDYGSLSSKAIEKIMPHLEEGLIYSEACARADYHHSDFRTGEIFDQLPYYGQLLENSVMGGTSLEKDKDLPEKFYGKIANPSVHIALNQLRRLVNAIVEKYGHPAEVVIELARDLPLGEEGLSKLKSDQAKNKKRNDRINEELAKLGVNQNYANRLQYKLWEDLAADPAKRCCPFTGRMIPLHQLFSGEFEIEHLLPFSHSFNDSPANKTLSHRDANRFKNNRSPYDAFGSNPPGYKWEEISARASNMPDNKRWRFYPNAWEIAKGKEEDIIARMLVDTQHMARVAKQYLSYVCHPDRVWTIPGKLTAMMRDKWGLNDVLGEEDGRKERGDHRHHAIDAFVIACTTRGMLKKISGAANRMFKNDTLYNKRLKLVEKMPEPFAGYYQRIENLIESTIVSYKPDHGNAQSAITAKRPFTVAPLHKETAMGYVGKGKKKGTSVFVTRMPLVQMLTKGDVECIADAKIKERLLAKLDGHDEKSDSWKTVLQEFSDEWNIRRLRIHIPKTDETMVGIRNRQQPDVEPYKYYTMGSNYCAEIYCIAKGEDAGKWDIEIIPDYYAHQKNFMQQWRKMHPTAKLIMRLQISDMVAYEEDGKTIYTRVKKMTGGRVYLRHHNIAKEKSDQESWAASPNLLQQKNARKIAVDILGNVKDPMGKHDRADHRNHKGRLSSGD

SEQ ID NO: 2273 - protein, 1183 aa, unidentified
  REGION 1..1183: note = Description of Unknown: Cas Enzyme sequence
MAYKFAFDLGSTSCGWSVVEIDKNDNVIGIKDIGVRIFPDGRDDKSKEPLQVARRIARGARVRNDRILQRRHKIIDLLKQNGMIYNNNNKDKNSDERKNPYELRAKAVSEKVSLTEFGRIMYNLSLRRGFKSNRKELQKEGSGKTKQAMEKLKQELNGSTLGQYLWNKMQEYQGKAKIRFSNLFDGNKIKDGLVYPSREMYEDEFNRIWSKQTEFYDILKNEDLKNAFHNAIFYQRSLKPQTRGFCEFEDGEFRIYKAHPLFQKFRALQTINQMAVDDEPLTQEQLQILKDELLKKFQYTTKQGKLSFDKIRKILNLEKSAKINLESSGKKERTDIDADKTAYLLSRPECFGDKWFEIPFEDQCSIAEMLIGDAEDEAVKQFLQEHYDLDNEHCENIINANLEPSTGSLSKKAIEKILPYLEEGLLYDDACKMAGYHHSWFDGDIKTLPELPYYGEVLKKSCVFRGKPGEEKDPKKYQITNISVHVALNQLRLVVNELIKKYGNPDCVAVEIARDLKMGTKELSKLNSNQTKNQNENKRIIAEIQKKVSIENPSREDIQKYKMWEMLSKDETKRCCVYSGKPISIHNLFSPQVQIEHILPYSRTFDDSIFNKTLSYREANAYKGNRTPYEAFGESKDGYSWNEIMERVANLPKPTQLRFNKKAMLKIEEDLKEFGLKDMIARQLNDTRYMSRMAVQYLKHICKTECYTDKTGKEHHKTNCYGLPGSQTALFREQWGLNDWKDKENDEKYRASHIHHGIDAFVVACMTRAQLQTIASNADKIERSGNYENQKAERKALFENCNTPFKGFDRAKFNEICDKMSISFKPKLKNPKQENSTVGALHDETAYSLLEFEKGLKGVFVKREELSQFDEKKKKQKENNEDEVVEDNEQKNEGEKKKDNKKKKIDFIKSVIDTQAEQLIKEYGETEEAFNKFKEYCNKNGIKKIRCKSFAGVSAYIPIFKTKEERDEYHKAYENWFVFEGRSPENETKEQKKERQNKEQVLLEILQQKALKAYKWFVGGNNFCADVYQINPKDKIYTKERGKWQVEVLSNYMATLNKGQALWKKKHPTARLVMRLKIDDMVMCEFSKDDEKLPKGIKELVLHRCEKHKTDKIEILFRVKKISSDGSVYIRPDFITKEKSDTKSVCLSASTYQKYKIRKVFVLPAGKLIDNGFSYKWNDTKCD

SEQ ID NO: 2274 - protein, 1346 aa, unidentified
  REGION 1..1346: note = Description of Unknown: Cas Enzyme sequence
MNNKKYFVGLDIGTNSVGWATSDENYQLLHLKHKSAWGVNLFDAAETAEKRRVYRTTRRRLQRRRQRVLLLQDLFKDEMHKIDQYFFLRLNNSAYFSEDKNELLNSSRFNLFSDKDFTDKEFFKKYKTIYHLQKDLIENKDTKFDLRYIYLAVHHLVKYRGHFVLADQRINIDEFEYEQINLIFEELNDYLLTAELPVIFSSNHIESFNEVVRKTSGVINTSSRLETLFECSDKSIKAAFRLISGGAVKTKNLFSHLILSETVEKETIDLSSPTYDTEKYPLLAKELGDDIVFLDSLKRLYDHIVIVRLMKGKKLVCETMVERYEKHSEDLKKLKLLIKSTRDKELYFSIFRDTKSKNANYPSYVGSNKSNTKKTSVNKKGYQDFLDYIKKVIIDRNLETILAKEILSDIEEKVFMPRLDTKDNATIPYQFNEYQLDLILQNAAKFYPFLNDIEEGINVIDKIKSLISFRIPYYVGPLDNRSKFSWVVRKSDEQVKPWNFGSIIDIEKSAQAFIMKMTNKCVYLKGEDVLPKESLLFEEFVVLNTLNCLKVNGKLIDYDTKQLIFNFVKQKKTVTTNMIMKLLMANNIVVEALSGIDETAKLSLSTYHKFLPIFGESIDKYKELIEKIVFYSTIFPEGIVFKNKLYSDFKNILTKEQLSTISKMKFSGWSSLSRAFLTGYSKLQEDNVLTNLKTGEIISIIDIMRDEQLTLQQVLYDKRFNLQELLYKYNLTYSENMTINDYIDEMYISPSVKRPVKKAIHIIDEIISITNSKPNKIFIEVTREEGKPERKISRQQKLINLYKPILKDNEHLKVLYQEIVSRKDADFKPKKLLLYFIQQGKCMYTGQSISINELMTDKYDIDHIIPQSKIDDDSISNLCLVTNKSNKDKADVYPLNYEIIQRMKPFWQSLLKENFIDDNKYNRLIRVEPLSDQDLAIFINRQLVETSQANKAIADILKKYYPESEVIYSKARNVTLFRGKFSIYKYREINKAHHAHDAYLNIVVGNYFHSKYGYKYYAEQGKTNFNPNMFFEEKNLSFWNLNRDINTVKKMLDRRDILFTRSYNFGSGEFYEQNLSKAGTNLTPASLTSPLADTSKYGGYSGKTTSSFALIEVKKGNKLERKLFPLSSIDKLMCDKQGVQLRDFISKDLGLEVRVLIDRLPINSLIIRKGTTRYLSGKDTVSTLIAHKHDEPYFSNDFCRYHRLLSKVDFNNIDDFEKNVIIVLPTNHDTEASNVSLEKNIIHFDEIVQQYSKKIYKGIYEDISQTLIDHRDVFLNLPILKQVAILIDLVKLLQTGPILKLDLASIGIGSSINRGRLATNIQQDDCLITQSITGLHEKKTKIWNVK

SEQ ID NO: 2275 - protein, 1204 aa, unidentified
  REGION 1..1204: note = Description of Unknown: Cas Enzyme sequence
MDFVFFGGGIVNNITEIEYKKIKNKLGNNDYRLGLDLGVGSIGYCAIALKDDDNGEKSVTDNVVLLGSRIFKASSGAVDRRQKRGQRNNHRHNRERKRFLWNLLASKNLALEIPKNIGKKEDSSEEETSKKRFPVETLKKDPYTLRYKALEEQLENYDLGYVVYHIANHRGTASVRTFLEDDETTRKDNTETARIADNIKSVMKSNGYRTYGEFLYKEYIQKTSQDKRVKVTNSNNKVFAVTRDLIIEELKIILKKQRDHANLTDEYIEKLIKAVDYETEKLIPEIGTCPYFREERRLPKAHKLNEYRRIYEALNNSRFFVPVTNLETGEITSFTERHFFDDIVDNKFPFKEKERDVLFNYLLGNKKLTAAKAQSLLKLPYGTEIQLQGKDKSKQEIKGYTLNTLEKMSFWNRLSEELKDEFLYDWNSSPDERQLKKKLLEIYNLSEQEIDECFKKLVISSSYADIGKKAMKIILPYIKKGLSYNEAIGKAIEDKKLPSFSKDVYDLLPYYGKILQESTQKVIAKGFSNQFKNKNYKIPNTNKDELEYGKIANPVVHQTLNELRKLVNEIITIFGKKPYDITIETSRELKKSQQARIELVNEQKDNEKKKKNIYDTYIVPHIAQIKSKKENPLNYILRFELLDEQNKRCPYCLKTLRVDDIISGKAEIEHIFPLSLSEDDSKNNKVLACSDCNATKGERSPYDAFAHLTEGKFVWNNILANLLDENNNKNFRNKAWRFYQGSFEKFLENKPMNKRFTTDNSYISKTASKYLNSLYDKPTKIFPVKGFLTSQLRLAWGINGVLIPFAKELLTEKEQEKLQKELSQNKKIRIDNRHHALDALVLAFASRGYHNFINTINSNGYKINYKEKNWLSKILLPPANKTVEEFNDFIKNKIPETNISIKHDHDKNGQLFKETIYQTYYLNDSKSILVSVKNVKDIDFPSEKEPKERLETALCKYNIKDTDNEKLKEKIKHNAEKYNQIIKILSNIKERLERENVMLKNEGKKEKKITEQLIFKSACEYVSGKYYQIETKLNNKFYSAKNPIQNKTGFGYDTGDNLCLDLYYDSEGKLCGEVIRKANFLAGQIPEYKKNGYTLFERIYQGDILEVDQSDKKWSLKNKTNSAPKNRVFVKIATFTELNAYYEKGKKDQIQIYFCNILKADQKHDDSFYISSMQEYNPRKVILSSLGIIKYRSSVLKDKNVENN

SEQ ID NO: 2276 - protein, 1187 aa, unidentified
  REGION 1..1187: note = Description of Unknown: Cas Enzyme sequence
MNQIYEQQATKLKQKLDGKDYRIGLDLGVGSIGFAIVSMEENSEKVLLPKEIVMSGVRVFKASDGAAGRREKRGQRNNHRHNRERMRYLWKLLAQEKLALSVPPDLVKKENSSEQETSSKRFLKEVLQKDVYELRVKALDKKLELQEIGYTLYHISNHRGSSAIRTFEEDDENTQKENTENKKIAGDVQRLMQKENYRTYGEYLYKEFFASKEKHDRDKVTNTTNNHKFSPARDFAIKEAQLILDKQSEFYKELTKDYIEKLIKAINYETEKLIPESGYCPYFKDEKRLPRSHKLNEERRLWEALNNAKYSEHVVDYSTGDIVNFEEKTFTQEQKQKLVDYLLTGKDLTQDQTNKHLLLKNVYNEDIVLQGRDKKTQKIKGYKLRKLEEMPFWARLSEQQQDQFLYDWNSCPDEKTLTDKLLKEYKLKDEEINEAFNKIVLSSSYAPLGKTAMKIVLEKIKNGLSYTESIEEALKEGKLTKDKQSVKDKLPYYGVIIPESTQAVIAKGFSRQFEGRNYKKPHTNKDELDHGRIANPVVHQTLNELRKLVNEIIEIFGKKPCEIGLETARELKKSIEARAQLSREQNENEKYRNDIYETYIKPRQQYIASRQENPKNYVLKFELWEEQKVICPFCLKPINSDDIIENRVDIEHLFPISESEDNTRNNLVISHVGCNQNKATRSPFDAFGSSPTMSLDGKQHKYDYNEMLSNAKKHIPKKAWRFNQGAFEKFIENKPIKKRFETDNSYISKVAHKYLSCLFEKPNIICVKGSLTAQLRLAWGLSGVLIPFAKRLLDDKEIEDFNNDVNKSKKIRVDNRHHALDAVVIAYASRNYGNMLNRISAQSYKINYKEKNWLSKILVPPNNKNRNELEADLQSFETSIKQALTDAYVSIKHDHNDNGQLTKDTMYKIYGSNKGYTLTTYKNLSGLKLTDKKKTPKEILETALLKFEGREDELKNAAIKNAVSNNKKLFDLIQNNLKRAEELLKEENQRAKTEGKKEKITNDVSICQKAISLLPSNTYVQLSKKEPSKFFAVQQPTDTKTGYGYDTGESLCVDLYYDNKQKLCGEIIRKIDAQRNVTPNYKNQGFALFERIYGGDVLEADFNNDKKSLSNNVTSMPMDRIFVKVTTFTEIANNNIQIWFSNVLKSRNSPDDSFTIGSMQKYNPRKVILSSAGLIKYRSPILKDKES

SEQ ID NO: 2277 - protein, 1429 aa, unidentified
  REGION 1..1429: note = Description of Unknown: Cas Enzyme sequence
VSKKYLEKFKKYENNYTLALDIGTHSVGWAVLDKYYKIPVVKGNKVFGVATFEQGQTAEERRIKRGARRRIRRRKQRIKFLQEIFQEEIQKNDPNFFATAEILESIDTQQYKENLTKLSLQKVLKYIDTSKEYPTMYHLRKDLMEEQNQFDIRLIYLALHHIVRKRGNFLYTENVANIGETGGIGEISSHKLKDVIEKIYNLNQVDEAMLDLPDEIYAESIKILCNSKSTKNDRKIAVKKINKELEPFAAVLVGLKVKLTKLFSLDLEDELTIDFSNEEAITKILNELNDEQAELFEELHTLYLTLLFKEIIGDARTLSEAKVVAYEKYSQDLQALKKLGQQNRQFKSAVLKSTTNSLTLWEQKRNKKSDTRCLVDKYQTNAIKQEEFYKELKEKLKVFDVDSPAIIAIKEEIEKNTFMKKLNTRDNSAIPHQLNIIEVEKILNNQKQYYPELFTDEIIERIKRIIDFRIPYYVGPLSNYHPADNAGFNWLAKQAGKEQEPIRPWNFTEVVDELTSAENFIERMLNRCTYLDEEVVLAKHSMYYQLFEVLNELNVIKVDEKRISKEHRNKLLPLFLKNKKIAVKRAENELQLHNGKVAISGTQQEKTFATSLSSFIIFQEIFGIEKLSIAEILTPHTKELQEKIKMMENFIHWKTVLPEGEIFMDKVEATYPQLSKNIKKKLAGLKFSGWGRISKKLLLGIPPKSDYTKATNILELMYEGDAQNRLYNFQEIMTDKKFGYPEKIKKINNQENKKDTIEYEDIAALAGSPAIKRGIYQAIKIIDEIENIFGKPQNIVFEMARSDELSRRTQSREKRIEKFISKGVFKGTNLEYLKTKKDIPELNERVMLYIMQLGKCMYTGENLEFSMLSTYEIDHIIPRSLSSDDSMDNKVLVKKLEGNQAKSDYMMPLELIENTMPGKKQAILSFWDTLRTKGLLSPVKSSRLHIPKLSEAQQEGFVNRQLVETRQITKHIITLLEQKYQGEVKVAGIKARLNDTVKAALGIEKIRELNNKHHAVDAYMVGFIYQFLAENNKDSYIDGTINWKAYSKKTMKSWNRDVSWVVNDLATGKIVDEQGEIFSGMSAIYNMICKQIDDTRYLVTRKIGYSGKDGSSKKFWNENVLPLNAKELIGVGKQYLGKVTGEQSMKAALVLYKNKRGKVVKELISIPVHLYMRYANMPQKERENKCVEIVLQNQKQQGTRHKIITVLEKNHKVLIDGVPFRVSSFGERGRVKEFQLPQRIQKLYSRRLDINQQASDKFVQLVNKEIRFLEEMKNEIKVQMSCYYESDIKFIEKSINHYIELLQQAIFNDVEDNIEAIATQINETVVWKRGTDESEKKEYKKLDAKFEYKNFYSLISLFEIYCKNYLFKFLKADAGRIEAWSDLGRFVGFNLNKVQSLILIEESITGIHQRKKILIKEGKVKGEDTWDFE

SEQ ID NO: 2278 - protein, 1136 aa, unidentified
  REGION 1..1136: note = Description of Unknown: Cas Enzyme sequence
MSNEKIILGLDIGVASVGWGLVKLAEEKYTDEKEDGTIEEKYKICGGEIIGAGVRGFQLPQDRQKKSLAKQRGQARRSRWTIHRKARRLKRLISLAKEYNLIGDDFDRDEVLKPKKGVNKKEKWDIWYIRQQALERKLEDIELFRILYHIAKHRGWYFHTKAEEAQKEDPKSEEGKAKAGLARIEKLLESKWKTVGQMFWETLKQTDKKRKRNAKDKYENSIRRLLLKKEIEEVFKEQRKLKNDKAKPEFEQRYIEDILMYEEGPDDKKLQKTMSRCEFEGELCAPKESYTAERFTLFNRLNTLELYDTQERNGQLSLDEPQRRKIEALAYNNAKVTFSQIRKELGLEDELHIQFNLCSYAEKNPEYKARLECEIKEGRLQFDEKHKVTIVDINTGEENVLDEEIKKIFNSKKLWAKAKKVHVYYSDIRRQLNLSESFRFTDVKGYTQSVAEFEREARLKAEKKGKKTNNFHGEAAYIKQFEEDTFVELKGYHKIRKVMEGSGNGLWDQIRCEPAQLDVIAEALTYCKSDETRSDYLRRNGITDEKVIEAVLTINMKQLASYSKEALRNLLTHMEKGNLFDEAKKECGYDHVAYDKQAILKPYSDFFEKNPVVARVISQSRKVINAIVRKYGNDYPIDSIHIEVATELANSEKRKQEISQGQERYKEDKKRARERCLEFNLDPEEGQNLLMFRLAEQQRNICPYSRKAIVYRATGADNEVYIRDCEIDHIIPMSRSFNDSLNNKVLCTQKSNQDKRDRIPFEWFEERSGKDSRRWYEFERYIKQLYSMPYPKRKNLLRKSWTEEDKEKFISRDLNDTRYAARHIADYLRRYFDFSRSRRNDIKEVSRIQLRSGGVTAFLRHMWGLNKVREENDLHHAMDALVVACSTYGHVYLVSKLSREIERKGQNWYKNFGRDKFRPWENVREDINNAVGEVFVSRMPRHTVTGGAHKDTIASLTTRPRTKRVLEVNNGYAEMGDIVRADVFVDKDGKNYVVPIYAVDFARNKPLPDRYVPDKSLPYEQWPSVNDNGLEFKFSLFKDDLIGVNDKMYYVSFFEATTTSVNVKNIDGSIFPDKKDAKVPDTRKMTYRPQKKTSKFVLKKYSVNMLGNYREIKQERRRLGNRNFEAKRRFYHEDCS

SEQ ID NO: 2279 - protein, 1129 aa, unidentified
  REGION 1..1129: note = Description of Unknown: Cas Enzyme sequence
MSQERIVLGLDIGIGSVGWGLVKLTEEAYPDEKADGSIETRHKIVGGEIIGTGVRTFQLPQDRQKKSLALHRGTKRRSRWTIRRKARRLKRLIQLGKEFELIPKDFDRDQALKPKPGDKENTWDIWYLRNEALERKLEDIELLRILYHIAKHRGFYFHTKAEELEEGDSKSEEGKAKAGLRDMKRLLQESGYQTIGQMFWKTFNQRNTEEAKRRKRNAKDQYGKSVKRLWLKDEIATIFQTQRKLGNVKAKEELARRYIEDILMKEELIDDAKLQKMMSRCEFEKDESGKGKLCAPKESYTAERFTLFNRINTLELYDTQKRNGRLPLKELQRGEIEALAYKNVKVTFSQIRKELKLEDQVHLRFNICSYKENDPEHNKKLFCEVKEGTLQFDERHKVKIVDIETGEVKTFDEEIRKIFNSKKLWPKAKKIYVYYSDIRKQLNLSEGFRFADLKGYTKTEKELGSEEKYIKQFEKETFVELKGHHKIKKAMEESGDGHWDSIRSETFKLDVIAEALTYCKSDKTRTEYLRQHGIDHEAIISAVLTINMKQLANHSKEAMRNLLVHMEKGKLFHEAKEECGYGKTEYDKQAILKPYSGFFDKNPVVARVISQTRKLVNAIVRKYGETYPIDQIHVEVATELANSEKRKNEIVWGRNRYKEAKDTARERCREFGFNPEEGQNLLMFRLAEEQRYRCPYTQKAIVLRDTGAENEVNIRDCEIDHIIPMSRSFNDKLTNKVLCIQKANQEKRDRIPFEWFEARYGKESQQWREFENRVKKLYMPYPKRVNLLRKSWSEDDKKKFISRDLNDTRYAARHIADYLRKYFDFSNSKRDDINEVSRIQLRSGGVTGFLRHMWGLDKIREENDLHHGLDALVIACSTTGHVYLVSNLAKEIERKGKNWYKHFGRDKFKPWITIREDIENVVKNIFVSRMQRHTVTGAAHDENPESLVEKRRIKKAKRKNNKKIVDSIPIKNRIIKFNKGYAEMGDIVRADVFVDEKGKNYVVPIYSVDIFSNKILPDKYLRISASPYDEWPSVKEDDIEFKFSIFKDDLISIDGSMYYVDFVGGTRSNISVRNIDGSNFESTNSREREFGYRNVELKKYSVDMLGTTKEIKQEKRLGNRFENKKMAQS

SEQ ID NO: 2280 - protein, 1126 aa, unidentified
  REGION 1..1126: note = Description of Unknown: Cas Enzyme sequence
MSNEKVVLGLDVGVASVGWGLVKLTEEKYTDEKTDGTIEEKYKISDGEIIDTGIRAFQLPQDRQKKSLALQRGSARRSRRTTKRKVQRLKRLIRLAREFNLITDGFNRDSILKPKKGDKESKWDIWFIRKEALERKLTDIELFRVLYHIAKHRGFYFHTKAEEIQEEDTKSETGRAKAGLANIRKKLQDSKWETVGQMFWEVFKQTGANNKRKRNAKDKYENSIHRLLLKDEIETIFNKQQKLGNLKAKEELKQRYINDILMKEEEIDEEKLQKMMSRCEFTGQLCAPRESCTAERFTLFNQLNTLELADTQNKDGHLHLDDKQREKIEALAYKNAKVTFAQIRDELELADKLHLRFNRCSYSEKNPEYNKKLECNIKDGQLQFDEKHKVPIVDIETGEIKILVQEIKDIFQKKLKPNYTHVTLYYSDIRKELQNLADFKISDFRFQKLQKEYTKPAVELGSEGKYIKQFEDDTFVELKGYHKIKKAIEKTDGNSKWEQIKNDCDKLDTIAEALTYCKSDKTRTDYLRKNGISDEGIIEAVLTINMKQLATYSKEALSNLLKHMETGALHNDAKEKSGYGKIDHKKQTILEPYSGFFEKNPVVARVISQTRKLINAILRKYKDRYPVDQIHIEVATELANSEERKKDIAWGQKRYQEDKKRAEERCKEFRLDPEEGQNLLMFRLAEQQNNKCPYTGKAITFYQTSANNEVYIQDCEIDHIIPMSRSFNDSLNNKVLCTQKANQDKRDRIPFEWFEEIYGKDSEQWREFENTVKKMYGVPYPKRKNLLRKSWTDKDKEKFLSRDLNDTRYAARHIADYLRKYFDFSVSERDDIKSVSRVKVRSGGITAFLRYMWGLNKDREANDLHHALDALVVACSTDGHVYLVSNLAKEVERKGGNWYKHFGRDKFKPWVNVREDIQKKVENIFISRMPRHKVSAAAHKDTILSFKDAPTKNRVVKINDGYAEMDEMVRADIFTDDKGKNYVVPIYAVDIFSKKPLPDKYVPDDGKLPYDKWPSVFDKKLTFKFSLFKDDLISINDKMYYVSFFEAATANVNVKNIDGSIFPDKKDAQDPYTKKICYRPKSKTRKCILKKYSVDMLGNYKEVMEKERIGNEGVKRTKRYKKMAKE

SEQ ID NO: 2281 - protein, 998 aa, unidentified
  REGION 1..998: note = Description of Unknown: Cas Enzyme sequence
GDNKKEKWDIWLIRKEALERKLTDIELFRVLYHIAKHRGFYFHTKAEEIQKEDAKSETGKAKAGLARIKKKLKDGGWKTVGQMFWEEFRQTNSENKRKRNAKDKYENSIHRTLLQEEITEIFKKQQESGNPKAKDELKQRYIDEVLMYEEGIDEDRLQKMMSNCEFTGGLCAPRESYTNERFILFNRLNVLELVDTQNRDRRLPLGDEQRKKIEALAYENTKVTFDQIRTELKLQNDLHLRFNLCSYNEKTPEYNKKLGCEVKDGQLRFDEKHKVSIVDIHTGEVKIFDEEIKKIFSGKKLWANSKRLQVYYLDIRKQLNLSSDFRFKDLSGYTKSAAEFGSEAKYVKQFENDTFIELKGYHKIKNAIEKNDGNGKWEQISGDIAKLDAIAEALTYCKSDETRGEYLHQNNITDKEVLDAVLTINMKQLANFSKEALSNLLKYMEAGALPNEAKEKCGYGKIDYKKQVILEPYKGFFEKNPVVARVISQTRKLINAIVRKYNDKYPIDQIHIEVATELANSEERKNEIAQGQRRYKDDKKAAEERCREAGLDPQEGQNLLMFRLAEQQTNKCPYSGKAITFYQTGAKNEVYIKDCEIDHIIPMSRSFNNSLSNIVLCSPEANQNKRDRIPFEWFEDTYGKDSQRWAEFENTVKKMYGMPYSKRKNLLRKSWTEKDKEKFLSRNLNDTRYAARHIADYLRKYFDFSKSQRDDINPASRIQVRSGGITAFLRHMWGLNKDRGENDLHHALDALVVACSTYGHVYLVSNLAKEIERKGKNWYKHFGRDKFKPWANIREDIQKAVEKVFVSKMPRHKATAAAHKDTVQSFKKAPTKNRVIKINAGYAEMDEMVRADVFTDDKGKNYVVPIYVIDIFSKKPLPDKYVPDDKLPYDQWPSAAADHLKFEFSLFKDDLISINDKMYYVSFFEAATANVNVKNIDGSIFQDKKDAQDPHTKKIGYRPKRRTGKCILKKYSVDMLGNHKEVKEGKRLGNRFEKMAKR

SEQ ID NO: 2282 - protein, 1122 aa, unidentified
  REGION 1..1122: note = Description of Unknown: Cas Enzyme sequence
MDKEKVVLGLDIGVGSIGWGLVKIREEEYCDEKADGTIDNKHRIISGEIIDTGVRAFQVPQDRQRKSLALQRGTDRRSRKTTRRKVRRLKRLIKLAKEFNLINNNFDRDEFLKPKKGDKEHGWDIWFIRKKALEKKLTDIELFRVLYHIAKHRGFNFHTKAEFLPEEDEKKLKKDKKQKKEQSEEEKEKEKVKKGLRIIQKSLKDSKYKTIGALFYETFKNERKRNAPDKYEHSIRRELLRDEIIEIFKEQQKFGNTKAKPELAQRYINEILMKEEGIDEEKFQKMMSRCEFTGGMCAPKECYTAERFTLFNRLNTLELVDTQNKEKHLMLDDKQREKIEALVYKNKKVTFNQIRTELGLQDNLHVRFNLCSYREKNPEYNKKLVCTVKDGRLEFEEKHKVPIVDINTGEVNVLDKEIKRIFKSKKLWPNSTKLHIYYSDIRKQLNRSGDFRFADLKGYTKSAGELGSEAKYVKQFEDDAFVELKGYHKIKNTIEKNCGKDKWAVLSSDTNNLDIISEALVYHKSDETRAKYLKEKGIVDEDIINAMLKINMKQLANHSKEALKKLLQYMGRGDLFNEAKKKCGYGKIDCEKQRILEPYSGFFENNPVVARVISQTRKMINAIVRKYQNQYPIDQINIEVATELASSKKRKNDIAQGQRRYREAKEAAEERCRENGLDPEEDQNLLMFRLAEQQNYFCPYTGTKITLYTTGAVNEVYIKDCEIDHVIPMSRSFNDSLNNKVLCIQKANQDKRDRIPFEWFEEIYGKDSQQWMEFENKVKKMYSVPYSKRINLLRKRWTDKDKEKFLSRNLNDTRYATRHIADYLRKYFDFSKSQRDDIKDISRIQLRSGGITAFLRHMWGLNKNRGENDLHHATDALVTACSTYGHVYLVSNLSRQMERKGQNWYKHFGREKFKPWDNIREDIQKDVENVFVSRMPRHTVTGAAHEETIISGEERDKNRTLEVRGGFAKMGNMVRADVFVDEEGRNYVVPIYTVDIFSKKPLPDKYVPDDYSLSYEKWPSIKDDNLKFKFSIFKDDLISINGTMYYVSFFEASTVNVNIKNVDRSIFPDKKDAKDPYTKKICYRPKTRGKKCLLKKYSVDMLGNYKEIRQETRLGNRFKGWV

SEQ ID NO: 2283 - protein, 1111 aa, unidentified
  REGION 1..1111: note = Description of Unknown: Cas Enzyme sequence
MNKERIVLGLDIGVGSIGWGLVQIREEEYCDEREDGTIDKKYRITDGKIIDMGVRTFQIPQDRQKKSLALQRGTASRSRKTTRRKAQRLQKLIRLAKEFNLIDNNFNRDEILKPQKGDKEAKWDIWFIRKEALERQLTNTEFFRVLYHIAKHRGFFFHTKAEEIHKEDSKSETGEVKKGLARIRKKLEDGGWETIGQMFCDEFKQTNKKYKRKRNKQDKYENSIHRSLLKEEIEKIFEEQQKLGNSRAKDELKQRYIDDILMKEEGIDDERLQKMMSKCEFIPGKLCAPKESYTAERRSFFDRLNTLELVDTQNKDKHLKLDDKQRDKIEALAYKNSKVTFAQIRKELDLENDLDKQLNLCSYKGKDPEYNKKIKCEIKNGRLKFDEKHKVPIVDINTGEVKVIEKEIKKIFNSKKLWPNSKNIYVYYSDIRKQLNLSGDFRFADLKGYTKSTAELGSESKYIKQFEDDTFIELKGYHKIRKAVENCDKNKWYELAGDTNKLDIIAEALVYHKSDETRTDYLKENGIIDEDIINAVLPINMKQVANHSKEALKKLLEYMETGDLFHEAKEKAGFGGIEYEKQAILKPYGGFFENNPVVARVISQTRKLVNALVRKYQKQFPIDQIHIEVATELASSEKRKNQIRQGQNRYREDKKAAAERCREWKLDPEEGQNLLMFRLAEQQNNKCPYTGKAITFYPTGADNEVYIKDCEIDHIIPMSRSFNDSLNNKVLCSPEANQNKRDRIPFEWFEDNYGKDSLQWMEFENRAIKMYGMPYPKRKNLNRKSWTEKDKEKFLSRNLNDTRYATRHIADYLRKYFDFSKSQRDDIKDVSRIQLRSGGVTAFLRHMWGLNKNRGENDLHHAIDALVVACSTYGHVYLVSNLAKQIERKGKNWYKHFGRDKFKPWDNIRGDIQEAVDKIFVSRMPRHTVTAAAHKETILRKAEATKKRVIEINRGYAEMGDMVRADIFVDEAGENYVVPIYSTDIFTNKPLPDKYVPHDRTIPYEQWPSIFDNDLKFKFSLFKDDLISINDKMYYVSFFEATTVNVNVKNIDGSVFPNKKNAKDPYTKKIGYRPKSRTKKCVLRKFSVDILGNYKEVKQEKRLGNRFENRN

SEQ ID NO: 2284 - protein, 1135 aa, unidentified
  REGION 1..1135: note = Description of Unknown: Cas Enzyme sequence
MNREKVILGLDIGIGSVGWGLVGIKEEEYCDEKPDKTIDKKYRIIDGKIIDTGVRTFQLPQDRQKKSLALIRGLARRSRWTTRRKAQRLKRFIKLAKEFNLIDDNFDRDAILKPKKGDNESNWDVWTIRKEALERELTDTELFRVLYHIAKHRGFFFHTKAEEIQKEDSKSEEGKEKAKVKAGLSRIRKKLKDGGWETVGQMFCEEFKQTNKTANRKRNAQDKYENSIHRSLLQEEIETIFERQQRLGNNKAAEGFKQRYIDEVLMREKGIDEDKLQKMMGECKFTGERCAPRESYTAERFTLFNRINTLRLIDTGDKERTLQLDDEQRKKVEALAYKNAKVTFAQIRQALKLENDLDKRFNLCSYKEQDPEYNKKLICEIKDGRLDFEGKHKLKIVDIDTGEIKNIGEDTKEIFRKRKAAWPKAKKLYVYYSYIRKQLNLSDNFRFADLKGYAKSAKELKREAQAKAEKKGKSLEHFDGKAAYIKQFEGKDVFVELKGYHKIKKAIEKYCGDSKWDELSADKGKLDVIAEALVYHKSDKTRTKYLQEKGIVDEEIISAILTINMKQIDNHSKDALTKLLGYMEKGDLFNEAKEKCGYGKIEYEKHAILQPYSGFFENNPVVARSFSQTRKLVNALVRKYQKQFAIDQIHIEVATELANSKKRKREIWQGQNRYREAKEAAAERCRENRLDPQEGQNLLMFRLAEQQNLFCPYTNTKISLYPTGAVNEVYIKECEIDHILPMSRSFNDSLNNKVLCTQKANQEKRDRIPFEWFEDNYGKDSRQWADFERRVKKMYVIPYPKRRNLIRKSWTEKDKEQFLSRNLNDTRYAAKEIANYLRKYFDFSESKRDDIKEVNRVQLRSGGITAFLRHMWGLNKNRSENYLHHSLDALVVACSTYGHVYLVSNLSRRIERKGKNWYKHFGRDKFRPWGNIRNDIQDAVSKIFVSRMPRHTVTSAAHKDTINSKQMKPGKRTIKVNKGYAEMGDMVRADVFVDKVSKNYIVPIYSVDIFSKKPLPDKYIPDDNTVPYEQWPSAKDDNLKFKFSLFKDDLISVNDKVYYVSFFDATTPNVNVENIDGSIFPDKKDAREPYKKKKCYRPKRKGRKCVLKKHSVDMLGNYKEVKQEKRLGNKFGNKR

SEQ ID NO: 2285 - protein, 1160 aa, unidentified
  REGION 1..1160: note = Description of Unknown: Cas Enzyme sequence
MNKEKVILGLDIGVGSVGWGLVKLAEEKYVVENQDGTADEKYKITGGEILDAGIRTFQLPQDRQGESLAIHRGAARRSRWTIRRKAKRLKQLTKLAREFNLIGDNFNRDEILKPRKGNNKKEKWDIWRIRKEALERKLTDDEFFRVLYHIAKHRGTYFHTKAEFLPEETKGEPKDKDREAEKSEKDKEKEKVKQGIRRIQKMLEERGYRTIGQMFWEIFKQTNADNKRKRNAKDKYANSIRRELLQKEIIEIFKSQRDFGNPKAKDELKQRYIDEILMFEEGIDDERLQKMMSPCEFTGKLCAPKESYTAERFTLFNRLNTLELVDTQNKNKHLSLDDTQRTQIVALAYKNSKVTFAQIREELVYADRLHLRFNLCSYNEKNPEYNKKLECEVKNGELQFEDKHKVPIVDINHGWKVLDVEIKNILRSKKLWPKATRIYIYYSDIRKQLNLSGDIRFGYYKKDGVIKELEGYTKSAAELGGKEKFLKQFEENDTFIELKGYHKIRKAIEGKGSNGKWEQIREDIEKVDAIAEALTYCKSDETRAEYLRQHNIVDNNIIEAVLTLNMKQLATYSKEALGGLLKYMDNKKEWMLFNDAKEKCGYGKTEYKKQTKLEPYSGPFEKNPAVARAISQTRKLVNAIVLKHNSRTPIDQIHIEVATELANSKKRKNDIAQGQKRYQEDKKRAEERCKEFNIDPEEGQNLLMFRLAEQQNNKCPYTGKAITFYPAAANNEVNIQDCEIDHVIPMSRSFNDSLNNKILCAPEANQNKRDRIPFEWFEDTYGKDSQQWSDFENTVKKMYGAPYPKRKNLLRKSWTDDDKEKFLDRNLNDTRYATRHIADYLRKYFDFSKSQRDDIKDVSRIQLRSGGITAFLRHMWGLNKNRKESDRHHALDALVVACSTYGHVYLVSNLSKEIERKGKNWYKHFGREKFKPWSNIREDIQKKVDNVFISRMPRHKVTSAAHDDEIWSFIEERRIKKAKKKNPQKKIDSMPMPTKRVIKTNGGYAQIGDMVRADIFADKNGKNYVVPIYATDIFAKKPLPDRYVPDDRLLPYEKWPNINDGDLGFKFSLFKDDLISINDKMFYISFFEATTANVNVKKIDGSIFPDKKDAQDPYTKKIAYRPKSRTKKCVLKKYYVDMLGNYTEVIQEKRPVKFIKKTAN

SEQ ID NO: 2286 - protein, 1139 aa, unidentified
  REGION 1..1139: note = Description of Unknown: Cas Enzyme sequence
MDNERVILGLDVGIGSIGWGLVKLKEEKYPVEKPDGTTGEKYKITDGEIIDTGIRTFALPQDREGKSLAAKRGQARRIRWTIRRKARRLKQLIKLAKEYKIIGSDFNRNEFFKLKEGDDKEKWNNWRFRKEALERKLTDEEFFRVLYHIAKHRGFFFHTKAEFQIDGKEKGIRGNKEEKETSERDREDEKVKQGLRRIQKLLKESGYTTVGEMFWKIYSDEKTHNKRIRNAEGKYENSIYRPLLRDEIEEIFKAQQRFGNTKAKNELKERYIKDILMKEEPIDEDKLRKMMRQCEFIPDKECAPKESYTAERFTSFNQINTLELIDTKNKGRIALDKEQREKIEALAYKNAKVTYSQIRDELGLGDKLHIRFNRNIYTEKNPEYDKKLKCEVEEGKLQFDENHQITINTDTGEIILDREIKNLFQKRFRPNYNHVTLYYSDIRRELENSEDFKIKDFRFKKFQKEYTKSEKELKSKAEYIKQFEDETFIELKGYHKIRKAIEKNCGEEKWRQISSDREKCGEMIDMIARAMTYCKSDETRTKDLKDNGITDQGVIDAVLSINMSGLANFSKEAMSNLLKYMDKERMLFNDAKKKCGYGKIEYKKQAKLEPYSGFFEKNPVVARVISQTRKLVNAVMAKYNRQTPIDHIHIEIAKDLANSEERKAEISRGQDRYKKAKEAAIEECRKKGLDPEEGQNLLMFRLAEEQNYFCPYSGKKITTYSTGAANEIYIGDCEIDHIIPMSRSFNDSMNNKVLCSPKANQEKQDRIPYEWFDVQYGKDSQEWSNFENTIKKKYGMPYPKRKNLVRKSWTEEDKEKFLSRNLNDTRYAARHIADYLRKYFDFSVSEREDIKEVSRIKVRSGGITAFLRYMWGLSKDREENDLHHAIDALVVACSTDGHVYWISNLSKATERKEKNWVEHYKSIKSKFKPWPSVREDIQNKIDKVFVSRMPRHKVTGGAHKDTISSLKEMPSNKRVIKVNKGYADIGEMVRADIFTDDNGKNYVVPIYATDFFANRPLPDKYVPDDRLMPYEEWPNVVDKTLKFKYSLFKDDLISINGTMYYVSFFEATTTNVNVKNINGSIFIDKKDAQDPYTKKITYRPKKGKCILKKYSIDMLGNYKEIEQEKRVGNIFENGTKRGP

SEQ ID NO: 2287 - protein, 1118 aa, unidentified
  REGION 1..1118: note = Description of Unknown: Cas Enzyme sequence
MSKNKVVLGLDVGVGSVGWGFVRLTEEKYTDEKADGTIQERYKITDGEIIDTGIREFQLPQDRQKKSLALQRGSARRSRKTTRRKARRLKNLIELAKEFDLIGQDFNRDSTLKPKKGDKESIWDIWLIRKQALERKLTDTELFRVLYHISKHRGFYFHTKAEEIQKEDTKTETGNEKAKAKAGLARIKKLLEESKWKTVGEMFWEEFKQTNDKKKRKRNAPEKYENSIHRLLLKEEIEKIFEKQQELGNSKAKEELKRRYIDEILMQEEGIDEEKLQKMMSRCEFTGEICAPKESYTNERFVLLNRLNTLKLVKPNKKNNHLLIDGKKRSKILALAYKNTKTTFAQIRTELGLKDDLHLRFNLCSYREKNPEYNKKLECKIENGQLKFEDNHKIPIVEIHTGEVTILDKEIKDVFKSKKLWPKAKKIYVYYSDIRKQLNLSGDFRFKDLSGYTKSVAEFGSEEKYIKQFENDTFVELKGYHKIKKAIEGECGEEKWERFSKDNGNLDIVAEALTYHKSDETRIKCLRENGVTDKNIIDAILTINMKQLANHSKEALKNLLVHMENEDEPKLFNEAKEKCGYGKNEHEKQAILKPYSGFFENNPVVARVISQTRKVINAIVRKYNDKIQIDQIHIEVATDLASSKMRKGQIAQGQKRYREDKKAAEERCRNFGLEPEEGQNLIMFRLAEQQNNFCPYTGKAIKLYPTGADNEVYIKDCEIDHIIPMSRSFNDSLNNKVVCTQQANQNKTDRIPFEWFENMYGKDSREWADFERRVKKLYGMPYSKRRNLLRKSWTEEDKERFISRDLNDTRYAARHIADYLRKYFDFSKSKRDDIKDVNRIQLRSGGVTAFLRHMWGLNKDRDLNDLHHATDALVVACSTCGHVYLVSNLSKEIERKGQNWYKHFGRDKFKPWETIREEIEDAVSKVFISRMPRHTVTGGAHKETIASLKQEPEAKRVIRVNKGYAEMGDMVRADIFVDEAGKNYVVPIYTVDVFQNKSLPDKYVPDDRTTPYDQWPSIFDDGLNFRFSLFKDDLIGVNGKMYYVSFFEATTTNLNVKNIDGSVFPDKKNSQDPYTKKICYRPKSKKKKIVLHKYSVDMLGKYKEIVQEKRLGNKFGSK

SEQ ID NO: 2288 - protein, 1064 aa, unidentified
  REGION 1..1064: note = Description of Unknown: Cas Enzyme sequence
MKNDSTTYELETGNVWSFDMGTGSLGECIRNLDDIKHLQSNLFPANFAEIKTAAGIRRQKRTRDAHKAREAWLDSCFKEFDLETLQRKTVSKTDNSWDISQKADERLEREFPAKNDDTYYNSIGLRCKLLLGEKLEVWQLYKALNSAIQLRGYDASDLAWKKSDSKKNDSGEESESLSKFKNELDKMPCDEKYKLPAFFKAWKMGIWNPEKPNEVKNKINCTSQRAAGYTLPRQLVEKEFIALIDNASIQYPALKNKSMYILYGPSEKAYASYYPNLRKEFSLKQGATTDWQGVLGQKIPRFDNRIIDKCSLIPRLNVCAIKSVADSKTENDFLYHDITLMMKLLNMRFLRLSDNTISELSYEEFLTAYEIGKKQSYKFTKTQWKKFLKSIAASEMPNHEEVEEPRKSGRASLSRPAMRLMKELLLSGKSPKDFYNIKKSEIKNTDIKKGLVEKDLDFLKFLEDISWTGIYLPDMKNIAKLNISAEEKDSVITKFIGQQNDPIVRHRLFYFYIRLKFLEQKYGTPYRVILEFVRDDFLGATKKKELSLAMSKNRKEREQSAKELDAENITGGNKILTKYMLLKAQKGVCIYTGEALSTTSLDSYEVDHIVPRSKGGSDSKFNYILTSRKSNSEKADRTPAEWLKNSNKWQAYLDRVKSCFASLGKRRVSLLTSDNAYELIDKYTSLAETAWIAKLVQTVVSMYFGWNIGIHENKRKVLVVSGNTTAMFRGMYKLNKILLPEDFKDEDSKNLSYTNKLQLKNEIDKKNRGNKKHHCLDALAISYAPEFMKALKKRGSINFGKNVGLDPYNFFKENVDKVCPRYVAFEKSKLEETIYGSRNLGIETVMTVKRMLKDLAYKNVNMKSVYAGKDYIEKSAKKILDKTLQNRVIEFSKVDPSEEDWISWCDSLYVINKDGTNGARIIKTRFITGEPTEYKEMSKDKTGSWRKGASHQGQIVWKTKNGKYLVEPIYAHSSKNELIEKLKSREDFDSIVDIFKSGCLIKLDSDVIDSKGEIKAKKGIYILNTILADGRAQFTSQNGLKTKTPIALNYLIKAGFRVYTPDKE

SEQ ID NO: 2289 - protein, 1079 aa, unidentified
  REGION 1..1079: note = Description of Unknown: Cas Enzyme sequence
MNKYVIGLDLGINNVGWSVVDAENNSILKSGVRLFSVANTAVDRRNFRSVKRRKKRKHNRVRDILSLFSSIGFPNTNTCDSELLEKRVLGLNKKISEQDIVNICCFIATHRGYIPFGDEERNLVDLGDLYPCEYLSQLKINTGRYRALEDVVIDNKDLIKEAEKILDTQVTFYPSLKNISKMLIEIINRKRKFYEGPGSENSRTDYGRFKTEEYKNRTGKTEDLEYLYDDLSSKCSICVGEKAAPMANYYYEVFNLLNDFINTSIVKTDNLINQSAVELDNKSGYYKLTSESLEKIITYCKENKNVKYDKLYKELFGLKKEDLTGYRVEKDYKPLFSTMNYYRSIRDAFEGFPNEWIRDVEQYNELIRILAVSPGIVETKNMLEKSLVINKEFSEEELEILKNVANKLKSKTAFSYGSLSEKALKRAISDMLSTRMNFMQVSREFNYDEEMTKDFINRYKETDGILLMDDQFVDEIIASPQVKKSLRQSIKVINSIILENGCYPEVIAVESTHEMNGSKKKKQIEKEQKKNEELRNEAEQFLIHEFGNEYVSEKNIMKVMLFNELDGRCPYCNESLNGINQIINGSLEVEHILPLSKSYNDSYNNKTLSCVKCNQEKLNNTPYMWMGPERFEEFSNRIKKMKFSDEKILNFLETKDLDKYNTRFFNRNLRDTAYATSELINQINIFNKYLDNRLKDFNKIKTLSTPGQLTSKIRGNVGIDKNRDIGRFHHAVDASIVASIALDDKLGKILIESQNDLSFWKRKKYLGERIDYMMLNFKESVLDGELRKIKSDDDIKISDQVTKDPNKSIANANVYKYLKLDGEYYKVDQISDIYSENIKDELLKKLFDDSNTGFNLMIKDNNKKMYEKLKSIYFEYKDRGSSTNPFVNYCLEVNGIAKEKFNYIEHGIKQENGPVIKKLRYYTNVNDPNLLEKSNLKMKSNTYIGLDSVGQAYTKVYWDNDVKKFIFLPIYTTSVDLNTHKLNKKDKTYQLFYDKYLRGKNYTFVADLYNGNYIEVEKRDGIIKGFISGYDKDGNRITLKKKNNNQKSPDRFSASDKSLKVYDVDYLGNKKIRLTCPSK

SEQ ID NO: 2290 - protein, 1197 aa, unidentified
  REGION 1..1197: note = Description of Unknown: Cas Enzyme sequence
MSKKYILGLDIGISSVGWGLLELDDNNNPYKIIDVGSRIFTPGEVEKTGDSRAKERREKRGARRVSRRREFRLDRVRNLLYEEGYIKCNITSNVVSEKNEELSIIFDNIVNNYYKNKNTNPYKLKVEALDRKLSNDELSIILVHYAKKRGYKSNRETESDNDSGKVLTAIKENEKIMHDNNYRTVSEMYIKNEKFKNKIKNSPGDYKISVTNEMYLEEINKVLDNQIKLGLINKEFKDEYLKIYNSRRSYAKGPGGNSPYGGDLIDRMTGKCKFDGKLRAPKKAFSSELYVALTKLVNLRYKFNDGEYTRLMKSEIEAIVEKAKDKKNVSYNDLAKLLNNNISFKDLSLSKKEYGSLIDDLKKKLNIKKEIKINVNELNDEDKEIYNNLYDEKLLSKTLIEFKGYHALKNSIIKCYSKDIWEKVKDNFDFLDELALYCTNYKVDEDILNKIKESEIIDSRFEDIHFVESLPNFKDHLMLSTDLIRKLIPLMYEGNTYDKAMEKLGYNHSSIDANIVKKDLLVPICIDESITNQRVMRSLTQARKVINSIIKKYGTPKIINIETARELAKSRQERNEITRSNLEKQGENEKIKNHLVELGLFANTDKISSNDLLKYKLWTEQNEFCGYSMKKINIEDLFQNNIVQIDHILPYSRTYNDNYLNKTLVYTKKNQEKGNRTPYEWFGKTQKWDEYEAYINNLTISQKKKDNYLLKKLDFDTEREMREQNLNDTKYISRELSSLIKAYLNVERVNMYPGAITAKLRARWGFNRLTHSYISKTYILPENMKKDVNKDRDNHLHHAMDALVIASITPSLQQKITLYEKFSRYIDGLTKNELNNLNYENAKDVLGEYYDDETGEVKDIDIKEYIKEQLLEEHIHYNKHNMSRLEFPLPYENFDKEAKLRVYEQDLNTLKWNLKSYSTYTKSDIDSLHTLIPSIAKSKISGKMHEETYYGIKEMVSDDDKKVYKTLRTPIEKVKRKDLENIPDRLGGSKDIYETLVEWFGDFESGDEVLKANGYKYPVSKKDKEHKEIKRLKIYTRYEYKGHTIKNKIVKKSDIYAIEIFKSKEKNDDNLYFAFYDIYNIKERKLSKNFKIRLESKNTKIMFLDEVLSNYVSYKLLFKNELIKIKSKDDKILIGYVVGGTTGKLEVRSPIGDGYDLFGEGKIFEKKDSEDRYRITLSKIKEIEKLSISVLGEISGL

SEQ ID NO: 2291 - protein, 1108 aa, unidentified
  REGION 1..1108: note = Description of Unknown: Cas Enzyme sequence
MKKRKKKKDKKDCHYTLGLDIGIASIGWAVLGNDEDGTPNRIIDLGVRVFESAEVQKTGESLAAPRRDARSARRRLRRHRHRLERIRYLLVQQGVLTQEEMTHLYDKSDLVSPYQLRTEGLDRLLNAQEFSKVLIHLAQRRGYQSNSTAEEAKNEKENGVIKSAILENQQRMEQGGYRTIGEMMYRDGAFWETINGIRYHCTRNKAGDYRFTVDRASILAEVSLLFEVQRRLGSPWASREMEDAYTAILSSQRSFDEGPGGDSLFRKGIVDRVGNCTLEPTEQRAAKADVTFERFKLLQDLNHMRLVDNNGSHPLTPQQRDDLETAAFHTANLTYGQLRKKLGLSDEMRFAGLYYGTDPIEKAEKRKWAQMQSYHKIRTALDKVSKDAFRALTQDQDRLDAIGEILTAYKADAARIEHLQSAGIPKEYHNALLSLSFSKYGKLSCCAMRKLIPLLQQGMRYDEACREIYQDHRTKEASERKQRLSLNDIDEITNPVVRRAVSQTIKVVNAVVRIYGNPDAVRIELAREMSHSFDERNKMKKRQEDGRQKNEQVKAQILETKAGDRVTGLDIVKFKLYREQDGVCLYSGKGLDLQRLYEPGYADVDHIIPYSRCFDDSYSNKVLVLASENRQKGNCTPYEYFGENEQRWHEFSVRVGASVRDFKKRQKLLNTSFGEEQGKDFIQRNLNDTQHITRIVYNYLRNNLEFADSAYAKAPVQAVNGAVTAMLRGRWGIEKMRGNGDLHHCKDAVVIAATSRSMIQRLSDYYKEEEQLFMGKPHFVDPATGEVLTRKEFPQPWPRFREELEARLDPVNPKEALMALNLSTFEVDPEEKIPPVFVSHMPKHTVTGAAHEETIRRKTETGTVVKKPLTDLKLNKNGEIEGYYNPQTDPRLYQALVERLRQFDGEGKKAFAEPFYKPRKDGTPGPRVDKVKIAEKASLSVSTGRGVADNGEMIRMDVFRVPNERKPDDSYYFVPIYVADTKKATLPSKAVVQGKSPEAWKQMKPEHFLFSIFKGDLIYVESKKGISLALAKEAVGEKTIQPKSGLFYFCGANISNGSIEIETHDRRYGKESLGIKELKAFEKRQVDVLGKVSKVRLPETRLEFRGRK

SEQ ID NO: 2292 - protein, 1289 aa, unidentified
  REGION 1..1289: note = Description of Unknown: Cas Enzyme sequence
MLKKGLKMKTLGLDLGTNSIGWAIIERQNSQTKLLAKGVQIFEKGVGEDKNNEYSLAAERTGYRSARRLKFRRKLRKLKTLKVLKDHDFCPGLNDKDLEDWKYHKKYPLSSEFRNWLQTKEAVDQTEPINPYYFRWLAVTQKLNLDTTHDRYRLGRALYHLAQRRGYKSNRISGSEKDGAVNKEINKLQELKGNRTLGQYYYEECLGNKRIRGEGHYTSRKDYKEEFDRICEKQQLDSELRKDLYNAIFYQRPLKSQKGTVGKCLLESNKPRAPISYPLFEQFRALQFLNNIRVRPPRENIVRPLNDNERLIALKWIYSRKKQDKFDKLAKKITPKKAKLLFKSFENNEDNNNAWTFNYRKDTTVSPCPTISRLSSLFGDNWQKTLGERYKKAAGKTQDQIISDIWHAMFSFDSPECLKSFAEKQLGLNNEDAQKFAEPLPQGYASLSLKAIKKILPYLEKGLIYSHAVFMANMPTVLALSGKNWQAEASIVEKAFEDILAKHHLKACCERVINNNLQKLQNAEINTKNHWSIKENIASQESYVEKEISKIFRVDNWLNISETERRTIVENTASRIREQAKKNIDQKEFVRILSIEDRICHFLADKYKVGEKELKHLYHPSAIETYPAVQMDSENKLRLGSPRIASIKNPVFMRTMHRLRCVVNALLDKELINQDTRIRLEMARDLNTTNERAAIYRWQRDQKNKREEYREAINQHPEYRPASDSDILKYQLWEEQEKRCVYTNKTIALSDFLGNNPVYDIEHTIPRSLRLDNSQSNLTLCDRQFNREVKRNRIPQQLENSDEILNRAIKLWGDKIKNLEVIVEKKKAAARAAGDMETKNKARANFHYYRMQSQYWKNKLDGFKIKEAPEGFTNNQLVDTRIICKYAMLYLKSLFSKVYSIKASALADIKKVWGLEAKSRDSHIHHCIDALTVACLSPKFCEKIGEYFHKYERYEKENDHKPNAPEPWLGFAQYMNEDIGKDLLIVHHHKSKLLKQTFKKLRKRGKILKDKAGKPKISRGNSARGQLHEETNYGKIILPHHFQDAGEKSCVIRRKLTDLKATEFDKIVDPVVRAIVIDNKEAIGKKPLWFNKDKGIEIKTVRVIAHYKPEKVIPLTEHRDVSKHDHKRHRYVSSGNNYITALYRGKDKEGNIKGDWKLISNYDAVKASRENNWDKILPEVNEKGYQLKHILKSGTQVLFYQNSPDELKKMIPEKLNRRLYYVAKMNGSRITFNHHKTALSAKDLGNGVSVIDWTSKIQQNRLLMSVNNIKILVEGADFILSPLGIIEWL

SEQ ID NO: 2293 - protein, 1088 aa, unidentified
  REGION 1..1088: note = Description of Unknown: Cas Enzyme sequence
MEFAYGIGLDIGIASIGWSVVALDADARPYGLIKLGSRIFEKAEQPKTGESLALPRRTARGMRRRLRRKALRKQDTYTFLEKYQIADRDTMQRLFDAGHLEDVYALRVRALDEAVTKEEFARILLHLMQRRGFQSNRRNAGGEDGELLRAVKENRACMEQNGYRTVGEMLLKNERFAAHKRNKAENYLSTVGRDMVTEEARILFERQRELGCAWASPEAEAEYLSILLRQRTFDEGPAAPSPYAGNQVEKMVGRCTLEPDQPRAPKSCATFERFTLLQKVNHIRLIVQGKTVPLNEEQRQIVMELAYKSADVDHAKIRKALNLAPEVRFNDVRYQGEEKDFAKCEKKEKLPALKGWHAICKTLGKDAAEKLSEETRDEMIRILSLYKNDTARIERLMQLGFDRAAAEALCELNFSGFGHISLKACRKLMPYLEGGMTYDQACTAAGYDFRAHTGNDKGKFLPAVIPEMEDITSPVVRRSVAQTIKVVNAIIREQGHSPVYLNIELARELRKSFEERAEMDRSMQKNAAYNEQLMKEIRETFHIISPNGQDLVKYKLWKEQDGICAYSGEKLHAESLFQAGYAEVDHIIPYSISFDDSYNNKVLVLKRENQQKGNRLPLEYLKGEKRDEFIVRTNRMVRNYRKRQNLLKEKLTEEEQQGFKLRNLQDTQQMARFLLNFIRDYLQFEEHPAAGKQRVTALGGSITAHLRKRWGLSKIREDGDLHHALDATVIACATQGMIQEISNYSKRNEMRFEREYIQDFDGNGSIDRRTKEHFPAPWQHFRDEVDIRLSDAPQEGLLHLNPRFYAEYCVENVKPAFVSRMPHRKVTGAAHKETIKGAKALDQGIVTVKRALTELTLDKKTGEIANYYMPQSDALLYNALKERLQAFGGNAEKAFAEPFYKPKSDGTRGPLVRKVKLCEKANLMVPVNGGSGVANNDSMVRIDVFYVPDDGYYWVPIYVADTLKPTLPNRAVVAYKPYQEWQEMKDEDFIFSLYPNDLIEVEHKRKLKFTIANSESSRPKTLEVGKALVYYVSGNISVGSITIKTHDGSYVIASMGIKTLKSIKKFEVDVLGNYHEVKKEKRQTFRKK

SEQ ID NO: 2294 - protein, 1426 aa, unidentified
  REGION 1..1426: note = Description of Unknown: Cas Enzyme sequence
MQLNNQEKLYLGLDIGTNSVGWAITNQDYNLLNFKKRTLWGVRVYSEAQKATDRRLHRSNRRRKQRQKQRQYWLKEIFKEEIQKIDKNFFKRLEESNLWYEDKTVKSKYLLFNEKNLNDKFFLKNNPTIHHLKKELIESTEKKDLRIIYLALNHYMKNRGHFLNQNKIDSVEDINIKELFININKELERLEINESFKTDKIEKIKTIIKDKNYTNETNRQKALQEVLGDGKVLKELIKAITGSKANFKKLLNEDKYDFNAIGLDKSFSFKEVRYEEELEEKLKINLNDDFLIIVYAKQLYNWSELYKTCNGEKYVSYEKVNRYEKHKEDLEILKDFIKENYSKETYRLIFNDFTKKIDNDNKFLKKYLNNNFSEEIVNFVSTTQKNKLNNYAVYISNADKKSDFYSFVKKVIEPQKETEGYNYIIDEIEKDNFLPRQRIKENALIPHQLYKNEIEKILNNASKHYKFLNEKSEGFTNKEKIIKTFEFKIPYYVGPLNNQHKAKNGGFSWVERDTSVKITPWNFDNVINKAQTAENFITNMTSFCTYLKDEKVIPKCSLLYSNYEVLNEINNLKINNEQLSIDLKEKIINNLFKKYKTVSLTALKRYLVKEGVFENIKQINFSGIDNDVKSFKSSLKAYIDFKNILQEKIQNYNVQQAVEDVILWATLFTDKNILKDKIKENYSNLFNSEEIIKMTSFKYTGWGRFSKKFLTSIKTNENYVNKQTGQTKLSIIDLLKYTNFNLMEIINNSDLGIKQQLDNFAMKQIKENITYKDIEELYCSPSVKKQIWQTVLIAKELKKTLKTSPNKVFIEMARAEGTKNRTLSRRKRLEAIYNEALKMHSEYKKELTETKEQLQNIKDDKFKIKKLYHYFMQMGKCVYTNNPIDLDDLMNDKYNKMYNIDHIYPQSKIKDDSITNTVLVDQTANARKADVYPINLEIQNKCKNGIWLTLKKCGLFSNEKYARLIRKTKLTAEEKMKFVERQLVETRQTTKEVAKLLKSIFPNSKIVYSKSENIGLFKQNFAPPTKKSIELGKINKNKVWDYGLVKCREVNDLHHAKDAYLNIVVGNVYDTKFSKYFYTNKTNSKDYKNYNAFGTREERLEHFSKLKYHIKNMYDYNVEGAWVKDDNQTISSVIRNINKNNILFTKESQFKKGELWAQNASKKEKNLIPIKKQLSNTLKYGGYKSVKASHFAVIEYENNKGVKETKFETVPIYLTNKVKKDNQVLIDYFKNKLQAKNVKVIMDKIKIGSVIELDGAPFIVTGNNDNVVLGCVASQLIFPKELVAYIKKLVKFKSKVEYVKKLKKQISITDSDEISKSENLELYNLFIEKLNKKQYANIIRPLLKENLIKLKDKFINLPIEEQAVCLINILPAFQANASSANLKLLGKGDNVAKVQPGKKSMYEDYKSIKVIDYSITGLFKKERKIK

SEQ ID NO: 2295 - protein, 1184 aa, unidentified
  REGION 1..1184: note = Description of Unknown: Cas Enzyme sequence
MEDKNTSFNDKSEIILGLDIGKSSVGFALVDKANDYKIINAGVRLFDAPEKPKEQTSLSKERGEFKRARNSNKNEFFRTKNVVKCMLKYNILDAEVIRKYDKSPKVTKCPKSKKKHLFYIKTAEYLFYKKSNNQDVLSLRVKALNQKISDLELARILYNMNNHRGVTYDEIREIPDGSNKTLSEDQKNLKDGFQRYNNEYKSKENDYLTVGQYLQENYNTKFRNTDKWKNGKKVGKDYLFSIPRDDLKNELEIIFEKQRALGNIVTTQKFQDEYLEYFLWEKASPKYDTLVSPCIYNPNEKSANKHHFASQLNISLEKLYNTRYREIGTKEYVPFLSEQKMIILENSFDKIKGLSYKDIKKILQLPNIEFKGVLEEGKNIVTNFDTFIQIKKIVNLEFNPLEEFKKDDGFIQNDYKTIINILAYETKDSMKKIELEKLNISDEQIEKLLKISIRGHLSFSLGVVDKICNYMLNGYTPYESRQKIEDEYGVKSIDKKAYLPPIMDTDFPLKNNHTVIRALSQVRAVVNDILKYYRKESGNSNWTFDMVTIELAREMNSKKQISNINKSINQNTKANQEAKEFITEKYNINNPTQDQILKAKLWKLQDGIDPYVWIQNDENKHIDSYTLGRITAEKLFDEGYCEIEHTLPYSRSLDDSQSNKTLVLSSTNQNKGDKTPYELLSKEQFEKFEKYLREKKNWLSYGDARIRKLLNKDFKGMDGFKQRDIVDTQIISKYAGLYIDNHLAFWNNPNFKAKRRIYANNGKITSILRKAWAVGKKNRDTHLHHAEDAILIACSTPSLIKNISTFVGIQTYLTSGILTLEKFERVLNKHKTLKEYILIALKKQEIDIEKLDLKDKKVADEFTSILFKILANKNYPYDAFREDFKNTIDNTPVTRYVKHKINGSIHDETISQKKSENDKGVEIRGGVSRNGAYVRYDVFKIVNTKGKIPKITYEFVVLTAQYNGAKVEELPIPKDLKENEKATFMFSVYKNDLLRYSLKDKSVIVCNFLKVDGSIVVREPKNKETELFKKQIKGFYNSWLKTDDVEELKVMMSDKDILKELNLKLEKVTKLSSQVEKVTHLCDRVSAIIKTKYDINTVFTMEKMNSIQTKELRDILVQKNRVQEDVELTSNLTKTLFITLSESGYIPSSRADGQKKLIDLVKLKVDCLDNITDEIRVETRKPLK

SEQ ID NO: 2296 - protein, 1110 aa, unidentified
  REGION 1..1110: note = Description of Unknown: Cas Enzyme sequence
MKYSLGLDIGISSVGWAVVDLDPTNRRIVDMGVRCFDAAEVAKTKEPLAKERREARSARRRSRRLRGRKESIKQLFIDFGLVSLENNDTVYRADTDKYSPWELRCESLDRLLNSEELARALYHIAKRRGFKSNRKTDKDGENGKVLEAVSKNKLYMEEKKYRTAGEMLSKDAQYSEKKRNSNDNYINSIDRDTLLEEIKLIFECQRVLGSDIATEKLEKEYTDRFLFQKHYAAGGHLDKIGYCTFEKSEKRAAKSSYSVSYFRMLQEINNIRIFKERDEVSLNDEERTAIIEKALSLKKFNYQQLRTLLEKSFKYPPNSIFKNVTYVKDIDGYIVDTEKPEKTKFISDFTEYKNIEKIFNEHGLWNEIKDNTELIDDIAFYTTAYKTDDEIKDAIKEKYASLKEEILNAVTEVPTSSKFVHLSAKALRNIIPYLEMGMRYDEACTEAGYNHSQPNNEKQRTKKLPVLNNRDEQDENDKNRSMPPLYVSPVAFRSITQARKVLNAVIEKHGSPVYVNIELARDMSKTVEERNQISKENEKNQQAKEQARELFINTMAEKNINVKEEDVKPVDVLKLRLYKQQNGKCVYSGKDIELGYLENYQIDHILPYSRSFNDSFTNKVLVTATENQNKRNMTPFEYFGNDTEKWNEFEARVNTINDFKKRKNLLTTNFNEREAEMTEANLNDTRTICTKFAQLLDEYLDFETYTRTSKSGEQSEVKKHVRTVNGMLTSMMRGVWGLKKIRSENDATELEDMESYIGDLHHAMDAAVIACINDSDIKRMTRFYKAKEDYDKFIEKDHYIDEETGEEIQTIRAGGKRNEFLPPWPTFRNELIKKLHIEEGEEGHITISRMPQRGTTGAIHKETIRSTRIYDETGLVISRKSLDSLKLEDFNVLDRLDDYTEQEKGLVDPKNNLKLYSALRERLREYDGDAKKAFKDPFYKPRIDGTDGPRVKTIKTAEPSSGIRLNRGFVENGSMIRIDVFKKDKKYYIVPVYTIHTYTKELPTRAIKINKPENEWTIIDDSYEFINTFYPYDLVKVIDKKGDIIWGYYRGTDRSTAWINVSTPNSKEKGIRCSVQTAQLIEKYEIDVLGKYHKVRKEKRSGLEKRSNKK

SEQ ID NO: 2297 - protein, 1084 aa, unidentified
  REGION 1..1084: note = Description of Unknown: Cas Enzyme sequence
MLHYSLGLDIGISSVGWAVVDLDPNNRSIIDLGVRCFNVAEVAKTKEPLAKARREARGARRRIRRLSGRKANIKLLFVDFGLVNEKDIDNIYETAHGKASPWELRTKALDEVLTGEELARSLFHIARRRGFKSNRKNEEKSGDDGKVLEAVSTNRVYMEENGYRTAGEMLYKDDKYQEKKRNSSDNYINSIDRIMLLEEVEKIFKMQRKLGSSIAGEKLEEEYIAEFTEQKHYASGGYLEKIGYCTFEPTENRAARSSFSAAYFRLLQEINNIRYFEGNKEIKLEGDVRQAVIDKALSVGEFTYHQLRTLLKKEVGFSEETRFKNVQYIKNVDDYIIDVEKAEKARKISDFKEFNKIKKTFVDGNIWEKVKDNIELLDDIAFILSAYRTDEDIETKIKEKYPSLSADIVEIITKLPTSSKFVHLSALALRKITPFLEEGMRYDEACQKAGYNHSQLFIDGEKSYKLPVLKNDELYVSPVAFRALTQARKVLNAVIDKYGSPVYVNIELARDMSKSADERREEERKQSANLAAKDQAKDLFREELRKNGLPDVLDPTPLEVLKLRLYKQQNGKCVYSGESLDLGRLSDYQIDHIIPYSRSFNDSFANKVLVLARENQHKKNRTPFEYFGHDQDRWAEFESLVLTINDHRKRRNLLIENFDEREQEMTEANLNDTRNICKKFAEEVRNKLKFAEYTRLNKKTGETSEVKIHVRTINGALTSMMRGVWGLSKNRDENDLHHAMDAAVVACINESDIQRMSRFYKQKESYEKFTEEEEIVDESTGEIISLIRADGKRKQFLAPWDNFRSELLAKIYTPYGEEGHITISRMPQRGVTGALHKDTIRSARIYDETGLVISRKSLSDLKLDLFKVLDNLQDYDEQQTGLVDPKNNVKLYTALRDRLLEFNGDAKKAFATPIHKPRIDGTAGPVVKSIKIAEKSSGIRLNRGFAENGSMVRVDVFRKDNKYYAIPVYTSHTVLPMYAIKQSKSEREWIYMDETFNFVHTFYPYDLVRIIDRKGEEVFGYYRSTDRVNAQFDISDTNTNDLVKPSVAYSGAKSIEKYDIDVLGNYFKVKGEKRRELEKRSNKK

SEQ ID NO: 2298 - protein, 1137 aa, unidentified
  REGION 1..1137: note = Description of Unknown: Cas Enzyme sequence
MRYRIGLDIGIKSIGWAVIEDNDDGEPIDIIDLGVRIFDAAEVAKTGASLAETRRIKRSTRRRNRRKIFRINRVKQLLLDNNIIINEELDDLYNNHENIYKLRVDALDNKISNIQLSKLLINFVKKRGYFSNSKSEELISTESDKSAVKTCLNDNSTLVEKYRTVGEMYYKDEKFKYKDANNEIILYHNEPILKTRNTTENYITTVERKYLVKEIELILNKQKEFNPLVTDKFIEEYLYIFLSQRNFDEGPGLPSKYGGNLIESMLGNCTFLLNEKRAPKATYTFEMFKLLQDLNNIKIEKLNINITNSGNIYHKVNNDIRILTIDEKKKIIKHFTKSENITFKALRKLLNISYDYIFNMVKYNFKIENINNKDKELIKQIDEQESKLKIQEMQSFHKMRIALNKYKKDYIIDLLEMDKGITINKIATVLTLYKGDEKRINELKILNLNNEIINCLLPLYFNKVSHLSITAMNELIPLLEQGLTYDKAATQIFGDYRGLINTKKKRKIVFNELEKIYNPVVNRSVSQTIKVVNAITNKYGNPELINIELAREIGKNRKDREALDKDMKKNSEANENAVKEIKSAYNKENITGIDIVKYKLWKEQNEICMYSGEHIDITDLFTKAVDVDHIIPYSKCFDDSYNNKVLVKANENRMKSNRTPLEYLNGSNRNIDEYIVRVQNTYKNNYKKRNKLLKESITSEDYDKWKNRNLKDTQYIARFILDTFIDKLQIAPNNNISENKRVMAVKGGITAEVRKLLQLNKIRDNDKHHAMDAAVIAITTENMTHQITRYFQNRETNANDRTKTKEEIKQKFLIPNYPEFKDELVARLQNTDEEVKNAITLLNKTSYKLKTMPKAIFVSRMPKHKVKGSAHKETIMGMGNNNKLIKKVSLAELKLENWDKQNQNSNGKGEVEIANYYNKQDDTLLYNALKNRLMQYNNDAKEAFKEPFYKPRKDGTPGPLVKKVKLEEKSSSNLYLNKIKGIACNGDMVRIDIFYVEDEGYYLVPIYVADIIKKELPNKACVAYKDSSEWKEMNDKNFIFSLYPNDLVYMKHKKGIKLNNIFDKAKESIIVNEFLGYYNSANITTAAIKIENQDKTFNQDSIGIKTLLEMKKYQVDVLGNISEVKLPEKRMKFEIKK

SEQ ID NO: 2299 - protein, 1073 aa, unidentified
  REGION 1..1073: note = Description of Unknown: Cas Enzyme sequence
MRYTIGLDIGIASVGWAVINNDENRIENLGVRIFKKAEDPKTGKSPNFDRRLARGSRRRLRRRAIRMQKIKDLFLKYGLVNSEELKNLYTINESTIDVWELREIALDNKIDRKSWARILTHIAKRRGYKSNRKIDIEDKEVGKLSKGTIENKKLLEENNYRTIGEMFYKDEKFKTNKRNKSGEYTNTVLRSMLVDEVKILFAKQREYGSQYAKEEFEKEYIDEMCFQEKYLTEELLEKMLGKCTFEEGEVRAPKNSYTFERFMLLQKVNNLRIDMLGEEIKLTEEQRMKIIEMAYKQSEVKYIQIRKLMQLPEKAKFSDLNYYIRNNKTDQKNEELSESDFNKKIEDKKFVKLDGWHSIRTALNKIDKAEKFKLLEANHDLQNIIADALVRNKTDEDIQKYLIDRNIDLDLINAAKQISFSKFGHLSYKAMKNIIPELEKGLTYDKACEEAGYDYKGEEKTKQYKLPALSELDEVILNPVVLRAVTQTRKIINAIIDKYGSPMIINIETAKELSKSFDERNKIRKEQEENNSKNEEIKKNIKNEFNIDAKPQDIVKVKLWREQQGLCAYSQRRIEFDKLFDDNYVQIDHAIPFSKCFDDSYNNKVLVLTDENQNKRERTPYEYFGEDIEHWHKFEEFVNLMYKNNSKKKQKLLIKNFSEDKSREWISRNINDTRYIAKFMQNYIRENLLFAESENKKKVFNINGSATAVLRRFWGLSKNREESDKHHAQDAVVIACATPGNIQRVSNYSRRKILHKDSIIDKETGEIIDLTIKEPWPNFRKEVEARMEDADNNGELYLLKHGIFYNYNDIDINTIKPIFISRMPEHKVTGAAHKDSVKSLKYKEKNFTTIKKPIISVSSAEIRTIVEDERCRDLYISDRIMYDYFYQRLVIEKQKASVVFKEGYRKNSNNGIGPIVRSIKVPSLGISGVELKNKGIADNDNMVRIDIFEKDLKFYMVPIYVSDFTKQELPNKAVVAYKDESEWKEMDSTYSFKFSLYPNDLVKIKKKGKKEEFLYYNSANRRIASITLITPNEGHKVENIGIQGLEIFEKYNVDILGNISKIKNEKREGVKKL

SEQ ID NO: 2300 - protein, 1104 aa, unidentified
  REGION 1..1104: note = Description of Unknown: Cas Enzyme sequence
MQDAVSVPLYRLGLDVGATSIGWCMLPLTQKGEPQAIMAMGVRIFSDGRDAQSSEPLAVERRTARGMRRNRDRTLSRQQHLMQVLTDIGLMPAERDQRKALLDETGALENNPYAIRARALEEAVPLHHLGRALFHLGQRRGFQSNRRADGKSKDDDKSLMKGAFNKLANAMIETKARTYGAFLYQRLKAGDGVRIRPVKKNNKNDYAFYPQRSDYQHELTMLWQAQQRHYPALLTEENHAKVFDAMFYQRPLMKPDVGYCQFEEGEKRAPKAYPVFQQFRILEDVNHLMINTLTGEKLPLSPEQRLGIIALLNKKKDVTFDTLRKNKTLGFSQNTTFNLETEERKGLKGNTTASRLSGKDAFGEPWFALSAAQQGEIVTNLLEEDNEDTLIAWLQQHHNLSWDTAEHVSKIALEAGYGRLSLKAMKEILPHLEYGMTYDKAVAQVYPHHSDFRPTDLLDELPYYGKAMPKRVMPAPKATDPHEKRYGKINNPTVHIGLNQIRKLINELIQCYGRPTQIVVELARELKENQEQANLSAKRRKENQKLNEEAEREIARLGYIPNHRNREKYKLWITQAKDATQRQCPFTGQQIRLEDVFREDSPFEIEHLLPFSRSYNDSLANKVLACRTANREKTNQSSYEAFGGHVTHYADIMERVKLLPYEKRWRFQPDAWDIARGKGEDVIARLLNDTKYLRRLTKEYLSHICQDVYVVTGGMTALLRGKWGLNDWLGDKDQTKERKDHRHHAVDAFVIACISRGMMQRISAAAKYAESQFSHRLVDQMPPPFEGFQWDEGKHTVEQIVVSHKPDHGNARRAINPPQGQRPYTTAKLHEETAYGLVNPKNADGDIELVTRVPLASLESLKHIREIRDGAIRTRLLDYMQDVPVDAKGKPAKTDIPQWQDKLQQFGDIHNIRRVRIVIAKTPNTVIGMATQEEKERATAENRPPLPYKYYPTGGNDCAEIYCPDRGKKAGQWQVEIISTFDVHQKDFVPQWKRQRENATTKLVMRLKKNDMVAYEEHGETVIVRVKKLNIDGRMFFEKHSVAKAIKEPNATSAKQLQLKNARKIHVDILGRVHDPLAQTHVNRVQIDVDDGYVRSARGDGDGA

SEQ ID NO: 2301 - protein, 1017 aa, unidentified
  REGION 1..1017: note = Description of Unknown: Cas Enzyme sequence
MKKTSQRILGLDIGISSVGWAVIDYSKGDFTQNKIVKSGVRIFTQAENPQDGSSLAQPRRLARGARRTLKRKRQRMKAIKKMFMEYLSFSREDLFLGEADETIYSKKRRIDVWQLRSEAVGRPLNKEEFARVLTHIAKRRGYKSNRKAEEKGDKESKKVLGSIKHNTALLNEYETIGQAIYETTKDTGRRRNKEKDYSHSVSREMLLDEVEIIFKKQHSFGNIWATDKLKEEYVSIAFSQRDFASVDGMVGKCTFEKNEMRAAKRTYSAEEFVTLTKLINTKIELEDGSYRTLTKEELQKIIFLCKQSEKPSYIKIKETIGLESTSRFKNVEEYEIDKKTGEVLKNKPTKFVSAFKGYHELRKVVQKTFTKTHWHNISQDTKLLDEIATIFSLHKSDTKIREALDDLTFSMLDENETEVFKDALVESISFDKFIYLSLKALDKILPHMREGKRYDEAVADVGYKKDVGTKKMYLRALNQEEQNELTNPVVKRAIAQTRKVVNALIREYGQFDTIHIELTREIKRSHKDRKKIEDGQKEYQKFKEAVVADFIEIFEREPRGNELLKYRLWKEQGGYCAYSGFMGKHGYIDPKKLISDVKYAEIDHILPYSRSFDDSLNNKVLCLAKENQEKKNRIPYEYFNDTGRDWYQYETFVTNMLNNIKRAKRQRLLKKNFDENSEKEFRERNIRDTAYMARYIKNFIENNLELKGEGKNNVVTINGALTSMLRHNWGVGHKSRLTHLHHAVDAIIIAFATRSEIQKLSTYSAKRDGFTYEKSEEKSKKFSFVPPMENFRDKVQKSIDDIFVSFAPRRKVTGAAHEATIYSSKTFVANKKSDKPSILTGSSRKKAVVLNGGKSLAKNDTMPRVDIFQHKKTGKYYVVPLYVSDFVKKELPNKAIVQGKNKDGTPKEWLEMDENYQFRFSLFKDELVEIQTKKTPSKEAKNIIGYFVSADVSSAKLKFKSHDNAENYFFKRDSSNICLIGLGIQNVEYIKKYQVDALGNRHEIKQEQRIMTAKKKR

SEQ ID NO: 2302 - protein, 984 aa, unidentified
  REGION 1..984: note = Description of Unknown: Cas Enzyme sequence
MIERILGLDIGIASVGSAIIDYDKENSKNNKIIFSGVRIFTQAENPENGKSLALPRRLSRGARRTTKRKRKRMREIKKLFISYLGLTKENLFISNNGEDNTIYRAKKKSRVDVWQLRDEALKRVLDDIEFARVLTHIAKRRGYKSNRKVEESGDKEGKKVLGAIEENKKLLMGYETIGEAIYQTTQKSLIRRNREGNYAFSVSRDMLEDEVKAIFEKQRKLGNQQAVEEFEEKYLKSFLEQRDFASVDNMVGMCTFEKSEKRAPKRALSSEEFVTLTQLINTKIVDKNDIERSFRQEELEKAIVLCKKSEQPTYLKIKETIGLADGDYFKGVDFYEIDKKTGEVTKKVTKFKSAFKGYHELRKVTEKVLSKSHWHNLSEDKKLLNEIAKIFSYHKRDDRIEEELQALSFSSLDKEEKQKLIKAFIEKINFQHFLYLSIKAIDRLLEHMQKGIRYDEAVELVGYKKEEGTKAKFLRVLSKEEANELTNPVVKRALSQTRKVVNALIREYGQFDKVHIELTREIKKSHKDRKKVKDAQEEYQKFKEQVVAEFVEDFGRTPRGNELTKFRLWKEQGGYCAYSGHLGNKAYIDPQKLISQLKYAEIDHILPYSRSLDDSMSNKVLCLAKENQDKRARTPYEYFTEEKKDWYEYEVFVNGLKTIRKSKRQKLLKKNFDENSAQEFRERNANDTAYMARFIKDFIESNLELKSKDKNRVLTRSGTLTNMLRHNWHVGQKSRETNLHHAVDAIIIAFSTQSEVQRLSTLSAKKEGFIYTKSEKKAGALKFEPPMENFRDEVQKSIDNIFVSFSPRRKVTGAAHKETIYSKKLEKQKGKFEVNGGLAENGEVKRVDVFKKENRYHFVYLYPADFEKSELSNITIKGIEIDESFEFVFSIFKDELIEMKQKGKESIQGYLKFSLSDGRFAIANHLDGNFNATRNRFSTGSLEYLKKYQVDILGNISEVKKETRVGTKKVLRDLKRQAMKNRKE

SEQ ID NO: 2303 - protein, 984 aa, unidentified
  REGION 1..984: note = Description of Unknown: Cas Enzyme sequence
MGQKILGLDIGIASVGWTVINYDKEDATQNEIIKSGVRIFTQAEHPKDGSSLAMPRRLARGARRTLKRKRQRMKGIKRLFMNALSLSHKDLFVGEVDETIYSKQGRLDVWQLRAEAIKRSLTAEELARVLTHIAKRRGYKSNRKSIEKNDKKSDSRVVLNAIENNEKLLEKYETIGQAIYETTKETGIRRNKKDDYLHSVSREMLLYEVNVIFKIQQSFKNTLATEALKDAYIGIAFSQRDVASVDGMVGKCTFEKEEQRAAKRTYSAEEFVTLTKLINTKVVLEDGSERGLSKDELEKIILLCKQSEKPSYIKIKETIGLESTSSFKNIEDYEIDKETGEFLKNRTRKFVSAFKGYHELRRVVEKALSKTHWHNFSQDTKLLDEIGTIFSIHKSDEKIQESLDALTFSMLTNDEIAKVKQALIGSISFDQFIYLSLKALDKLLPFMREGKRYDEAVTLVGYKKEVGTQQKFLRALNKKEQNELTNPVVKRAIAQTRKVINALIREYGQFDKVHIELTREIKKSHKDRNDIKKGQERYQKFKEEVVQDFIKLFGREPKGSELLKFRLWKEQDGYCAYSGYMGEQGYIKPDKLMADVKYAEIDHILPYSRSFDDGLNNKVLCLAKENQDKKNMTPFEYFESIGRDWYAYEVHVNAMKGIKRVKRQRLLKKNFDENSEHEFKERNISDTAYMARYIKSFIEDNLELTSSSKKKVISINGTLTNMLRHNWGVGNKSREDTHLHHAVDAIIIAFATDSEVQRLSTLSAKRDGLVYKKSEEKSKKFRFTPPMENFRDEVQKSIEEIFVSNAPRRKVTGAAHKETIHSKKLEKVKGTFEVNNGLAENGEVKRVDVFRKEDKYHFVYLYVADFEKEELPNVTIKNLEIDNSFEFQFSIFKDELIEIKQKGKDAIQGYMKFSLSDGRFAISQHLDSKFNSTKNRFSTGSLEYLKKYQVDVLGNIQEVKKEIRVGTKKELKKEKEAILKKKSE

SEQ ID NO: 2304 - protein, 959 aa, unidentified
  REGION 1..959: note = Description of Unknown: Cas Enzyme sequence
MIEQILGLDIGIASVGWAVVEHDIDNEENNKIVDCGVRIFTQAENPKTGESLALPRRLARGARRTLRRKSKRMRDIKLLFRQYLDIPYNRLFGDDETIYHDRGRKEVWQLRDEALKRKLSDDEFARVLTHISKRRGYKSNRKSEEKKDSEGKKVLGAISENEKLLEKYETIGQAIYQTTKDEEKRRNSDGNFKFSVSRKMLLDEVKIVFEKQRFYKNEKASHEFEDAYQEVFLKQLGFASVTDMVGKCTFEKKEKRAPKQSFSAEEFVTLTEIINNKMIDEDGKELFFTKEQIAKILNLCKQNKSVTFNKIRQTFNIESSTLFKSVAYHDKNGEFLVSKEAEKQKLKNGFEKGYHAIKKVVESSLSKTHWHTISQDRNLLNEIAVIFSYHKSDEKIKKYLQELFAKHDYLSESEKTIMIDALIENISFDKFIHLSVKAVDKINPKMKNGLTYDKACLAVGYENKEGKKEKYLRPLNRDENNELTNPVVKRALAQTRKVVNAVISKYGQFDKVHIELTREIKKSHSDRKKVEKGQKEYRDRKSIVVEKFKSIFDREPRGQELTIFRLHQEQNGHCFYHDKYMELNKISDFDNFEVDHILPYSRSLDDSMNNKILCFKSENQNKRDQTPYEYFTHEDRDWHRYEEIVKTSKLSYGKKKRLLKKNFDENSSNDFKERNKNDTSFMSKFIKNFIENNLELTTKGKQNVFTRNGSLTALLRHNWGIGAKNRDNHYHHAQDAIVLAFATQSQVQKLSTISAKHEGFIYERKEDKSKRVRFDPPFKDFRDEVDKSISEIFVSYKSRKKVTGAAHKETVYSKDDKKGSFPVNGGMAENGEVKRIDVFKKDGKFHFIYLYPADFEKSDLPSKTIKGKEIDDSYIFLFSIFKDELLHLKNKNGEYFGYFKFAESDGRFNMQRHFMSISDKKVDRLSTGSLIDLKKYHVSPLGDYHEIKQEKRLGTKRSK

SEQ ID NO: 2305 - protein, 971 aa, unidentified
  REGION 1..971: note = Description of Unknown: Cas Enzyme sequence
MSERILGLDIGISSLGWALVDYDKENSLNNKIIKSGVRIFTIAENPKTGESLALPRRLARGARRINKRKKQRVKAIKSLFIKYLNLSKDELFGEDNIFNGKKQKDVWQLRDKALKRELTNVEFARVLTHIAKRRGYKSNRKVDELGNSDGKKVLSAIEENKKLLDGYTTIGQAIYQSTKETHIRRNKKDDYNHSVSRDMLVDEINIIFEKQKEFNNTFLNDIFKDEYLELFLNQRDFASVDEMVGFCTLEGVSEKRAAKRAYSAEEFVTITKLINTKIIDKDGKERAFTKEELQKIIELCKQEVKPKAQIGKPSYLKIKELLALDENDHFKGIEFYQIDKKTGEYTNKPTLFESGFIGFHKLRESIQKSLSKTHWQNISNDTKLLNDIAIVFSYHKSDEKIKNELEKLEYKFLTEEEKSILINSLVENISFDKFLNISIKAIENILGFMRDGYRYDEAVEKCKYKKIDGKKQKFLRALNKNEQLELTNPVVKRAIAQSRKVINALIREYGEFDRVHIELTREIKKSHGDRNKIKQGQEEYQKEKKEVVEHFIENYEREPKGNELLKFRLWKEQNELCAYSGEHINTKRLINDYNYAQIDHILPFSRSLEDGMYNKVLCLSKENQDKKDRTPFEYFTSIGRDWNKYEVFVKNILKNIRKSKRDRLLKKNFDESSEKAFRERNANDTAYMARFIKNFIEDNLELKGKGNCVLTRSGTLTSMLRHNWGVGNKSRNNHLHHAVDAIIVAFSTQSEVQRLSTLSAKIKEFQYKNSEEKARLFKFQAPIEHFRDEVQKSIDDIFVSFAPRKGVTGAAHKETIYSKKLEKQKGSFEVNGGLAENGEVKRLDIFKKDEKYHFVFLYSSDFLKDNLPNKTIKNILVDDSFKFVFSLFKDEFIEIKQKGKDKIKGYFKFCLSDGRFAICDHIDAKFNPTNHRYSTGSLEYIKKYQVDPLENKNEVKKEIRLGTKKQINKKR

SEQ ID NO: 2306 - protein, 960 aa, unidentified
  REGION 1..960: note = Description of Unknown: Cas Enzyme sequence
MSERILGLDIGIASLGWAVIDYDKENSLNNKIIKSGVRIFTIAENPKTGEPLALPRRNARGARRTIKRKKQRLKTIKNLFVKYLNLTKDEIFSSVNIFNEKKQKDVWQLRDKALKRELTNKEFARVLMQIAKRRGYKSNRRVEENGNSEGKKVLSSIEKNKELLTSYLTIGQAIYQSTKESKTRRNKKDNYNHSISRDMLVDEINIIFEKQKEFKNPYINNTLKKEFLELFLKQRDFASVDKMVGFCTLEGKSQKRAAKASYSGELFVTLTKLINTKIVDKDDKERFLTKEELKKIIELCHQSEQPTFLKIKEIIALEENSYFKNVSFYQIDKKTGEITKKTTKFESGFKGFHSLRKVIEKTLSKIHWQNISQDKKLLNEIATIFSYHKSDEKISQELQKLEIKCLNEDEKQIIIKALVENIHFDKFLNLSIKAIDKLLEYMLNGQRYDEAVKSCGYKKLGGEKEKFLRALNKEEQLELTNPVVKRALAQTRKVVNALIRTYGQFDKVSVELTREIKKSHSDRKKIEKAQGEYQTLKQGIVKNFIENFGREPRGNELLKYRLWQEQSELCIYSGKHINPKNLINDVNYAQIDHILPFSRSLEDGMVNKVICLSKENQDKKNRTPYEYFTQENKDWHWFEEFVKGLKNIKKSKRNRLLKKNFDENSEIAFRDRNANDTAFMSKFIKSFIEDNLELKSKDKLKVFTRSGTLTNMLRHNWGIGNKSRNNHLHHAVDALIVAFSTQSEVQRLSTLSAKKDGFTYEKSEKKAGQLKFVAPMEHFRDEVQKSIDEIFVSFAPRKGVTGAAHKETIYSKKLEKQKGSFEINNGLAECGEVKRVDIFKKDNKYHFVFLYPADFLKKELPNITIKNIQIDDSFEFIFSIFKDEYIEIKQKNKVKVDGYFKFCLSDGRFAICNHLDAKFNSTNNRFSTGSLEYIKKYQVDPLGNKSEIKSEKRVGTKKQR

SEQ ID NO: 2307 - protein, 1004 aa, unidentified
  REGION 1..1004: note = Description of Unknown: Cas Enzyme sequence
MIERILGLDIGISSLGWAVIDYDKETNLNNKIIKSGVRIFTIAENPKTGESLALPRRNARGARRTIKRKKQRLRAIKNLFVKFLSLSKSELFSDQNIFNEKKQKDVWQLRDKALKRELSNREFARVLMQISKRRGYKSNRKVEENGSTEGKKVLNSIEKNKELLTNYLTIGQAIYQSTKSTKIRRNKKDDYNHSISRDMLVDEINIIFEKQKEFKNPYINDDLQKEFLELFLKQRDFASVDKMVGYCTLEGKSQKRAPKASYSAELFVTLTKLINTKIVQENGVERSFGKEELSKIIDLCKQSQNPSYKKIREVINLVDTSKFKSLDYLKVDTNGEFLNPEKEQFKSSFIGFHHLRKEVEKILSKIHWQNISQDKLLLNEIAKIFSYHKSDEKIKNELEKLNFNTLNEDEKKILINSLVESIHFDKFLNLSIKAIDKLLVHMQNGKRYDEAVRSSNYKKLEGEKEKFLRALNKEEQLELTNPVVKRALAQTRKVLNALIRVYGQFDKVNIELTRELKKSHKDRNDIKKKQEEYQNVKEGIVKNFIENFDREPKGNELLKYRLWQEQGERCIYSGKEIDIKRLISEANYAQIDHILPFSRSLEDGMINKVICLTKENQDKKNRTPYEYYSQENKDWHWFEEFVKSLKNIRKAKRDRLLKKNFDENSEIAFRDRNANDTAYMSRFIKDFIENNLELKSRDKQKVFTRSGTLTSMLRHNWGIGNKSRDNHLHHAVDALIVAFSTQSEVQRLSTLSAKRDGFAYEKSEKKAGQLKFLAPMEHFRDKVQESIDDIFVSFAPRKGVTGEAHEQTVYSPKDFKANKKQEKISELTGGSIVRNVKLNDNKKIAKQSSMPRVDIFKDIKKGKFYVVPIYTVDFIKDKLPNKAIVAGKNKDGTLKEWLEMDDNYKFLFSIYKNELIEIKTKKTPSKESKIIQGYFISADSGTAKIIIKSHNNKEEYTFKKDSSNLCSYGTGIQNAEYIKKYQVDPLGNKSEIKSEKRIGTKKER

SEQ ID NO: 2308 - protein, 1115 aa, unidentified
  REGION 1..1115: note = Description of Unknown: Cas Enzyme sequence
MLLIGNLGGTVTWRLGIDLGTNSLGWAALELEKDREVWKPSGLMDSGVRIFSDGRNPKDRQSNAAKRREPRSARKNRDRGKRRSARLMRQLTMHGLMPADPTERKKLEGGKNMPLVDTDPWILRARALEEKITPHQLGRAIFHLHQRRGFKSNRKTDSGDSESGKVYDAIKRTKKALESKGARTLGELFGRPRLEVAKHNETAPKGQRLAQPLARVRSRGAGAKAYYDYYPTRELILDEFDQIWESQKRFYPDLTSEAKVRMEKARKELRDTIEWQHPLKSPPVGKCTFIAELRALGYGGDGSGSDEDWRLRKQLERAPKALPSSQRARIYQEVNALKIMPSGKAGYTLGKEQRDLVANSLLNSTKRTFDQLRKLLKLSEYDRFNTESEKRKHLDGDLTALKMKHKDRWGASWFDLDLQTQDEIVDRLINEEEEEKLVVWLCNTYGLEKDQALRIADCPLVAGHGNLSKLALDRILPHLETGLIYSDAVVAAGFSSHSQFGTGEVHDEKLPYYGEILERSVAFGTSDPNDMHEKRIGKVANPTVHVALNQIRAVVNDLMRRFGAPEQIVLELARDLPLSARGKGELESRQKQNQDANDVRRKRLAEEFKQPDSYDNRMRLRLYEDLEALDKRCVFSGEQIGAHNLFSPDVEVEHILPFSRTFDDSYSNKTLSMCRANRDKKNQTPFEAFGHSPNGYDWEQISLRAAALPANKAWRFAPDAMERYENEERDFLARQLTDTQYISRLAKGYLEAIYGGQGHEGSKNHVWVINGRLTADLRHIWGLNSVLRGHNEPESVAQKKNRNDHRHHAIDAIVIACTDRAMLKKAADKAKENEQMEKGALMKGVPTPWGNDKTFRIDVENSVRNIVVSHKPDHGIQGAMHNDTAYGIPEGKEGEPDKKGVRLVVTRKSLDSESFKKPDDLEKIRDHTIKMKLLEETYGLTGKEFKEALLEAARAMVPPVYKVRIEENLRVIPFKDRSGKEYKAYKGDGNYCYDIWVNEKGKWTGEVISTFQAYQLSRKDPKWWQKPVGRNGQKLLMRLRKNDYLQIEHDEKRMIVQVYKFSEGKINMAEHLEANVDARVRAKELKSIQKAPSALQKSKAKRVTVGPSGVVKIYQ

SEQ ID NO: 2309 - protein, 1112 aa, unidentified
  REGION 1..1112: note = Description of Unknown: Cas Enzyme sequence
MKCMRYTLGVDLGPTSVGWAVLDHDRNKIEALGVRLFPGAENPKDGSSLAEARRLARGARRSTRRKQRRMKDIRKLLVSSGVLTQDAMDRVSKTVGEHTPWEYRVEGLDRLLKPDEWTRVLIHMAKRRGFKSNRKEAPEGVQKADKNDDEGKMKAGVAENSLILKTGNNGRGYRTVAEMFVMDPKFGEHKRNKDGQYINTVLRAEIEAEVQELFKRQRSLGNPFAGEDLEKTYLEIFNRQLPFASGDIIEKMVGHCTMEPEELRAPKASWTAERFILLSNIRNMRVVVDGRTGELGPEKSAKLLQYCYDHTKVTYKQIRNLLDPAPKKSKKKGHPEEQQPQQAPNWHFAYIPAAKKKVSRKKAADKDAENPQAESTQEYDPEEATFAELKAFHEFRKAVTKALGEKYWTDLTANNPRVMDDLAFALTFRKNEEDIRNCMAERNVPKELIEAVIGLNFKGTVNLSLKAMTKLIPFMEEGSDFTEACGQAGYSSFDPRSGSNRSILLPVPDKGKVRNPVVFRAITQTRKVINEIIRKYGSPERVQIELAKELAKPIEVRKAIKERNDENYRQKQVLRDEFENRFSHRPSDSQLEKYRLWKEQDGYCPYTGEQISLDMLFSVKSGTYADIDHIVPYSRSFDNSWTNKVLVMTHANRDKKDMTPYEYFGQDSEQWNTFLKNVEKYIPDKSKARRLMTKDRDFDEIKLRCLNDTRSITKYVADWIESSLVFSDPEIRNPVVRINGQATATIRKQWGIESCKRRDESDLHHALDACVVAAATPAIIDRISKYSAADELGELREEDPTDSRKRLPEPWKDFAREVRARISEDPAGLIKSYGITSYTEEELQELRPIFVSRMPDRKARGEVHEATVRSLRYADEGKGTVVKVPLKKIKLKRLENMVGKDRDKILYEALRKRLKEHADKPLKAFAEPFYKPSKDGTPGRIVKSISLFDASVCGLKIREGMSGNGNGSMVHVNIYRKDGKHYIVPYYIEDIARKRTRMHAIVAGKPESEWLEIDNTYEYMFSLYPNDILRVKNNNGEEIFGYYRGCHRTTGGIGIISHDSAKTEKMIGIRNAAVLEKYTVDVLGEYHKVKSEKSACGKLFRKAEKKKARTAA

SEQ ID NO: 2310 - protein, 995 aa, unidentified
  REGION 1..995: note = Description of Unknown: Cas Enzyme sequence
MIERILGIDLGISSLGWSVVEYDQDNETNNKIIDCGVRLFTAAETPKEKESPNKARREARGIRRIIKRRRVRMNEIKRLCQKYELIDKIDLLDNEGMFHSNQNRTDVWELRHDALYRTLTGKELARVLIHIAKHRGYKFLGDDESDDESGKVKQAGAALKDKFYVAHCQSVGEWLWKERGKNGKKRNKSGDYEISIPRDFLVDEIQTIFDAQRRFGNCFATQELQQAYTDIAFYVRPMQSIEHMVGKCTYFPEEPRAPKASPTAEQFVALGKFYATVVIDKEHKEQKISELTPVKELMEFAISKEKLTYKELRKFLALDDEHIFKGLAYKGKPKKARKGEEDKPQEWEFDKAEAEKKVWINLKGHAKFKEVLGDEKFLELLKTQDLADEVAKVLTYHKDERAKKEELAKLHLDSSTIEKLSKISFTDFNQLSLKAMKTILPEMMQGKRYDEAISILGKPSYEKSIFLPPLKETNIAILNPTVIRAFAQFRKVANALVTKYGAFDKVHFELAREVNTKGDIEEIKEAQRKNEKERESAKVWISENFGASIPVTRKNILKKRLYEQQDGRCAYTGEVIALERLYDEGYCEVDHILPRSRSADDSFANKVLCLATANQNKRNLTPFEWFGKDTAKWNYFEARISSPSNFAKMGKGKISRLLKKNFDENSQKEFLARNLNDTRYMSKAIKTYCENYWKLSNDDDKLRIQVRSGKLTSTLRHQWGLGNKDRDTHTHHAMDAIMIAFSTQSMVKKLSDYFAKKEKKDEKDKPVMPTPMNFFKEEVEKATALERQERIQTKAGETKILNRLLISRPPRASVTGKAHDDTYYSPRTRIVKKSNGKVDYLSNNELRKAIFTRSGLAKNGDMIRRDIFIIGNRISIVPLYISDLSSTNELSNKSLNGTPIDLNNALFYCSLFNDDLIKVGVKDNEYFGYFKFFETDGRINIESIDGSQKLRFSINNANFIKKYTIDPLGYYHEVKGEKRLGTIPQEAKQHPKRQK

SEQ ID NO: 2311 - protein, 1123 aa, unidentified
  REGION 1..1123: note = Description of Unknown: Cas Enzyme sequence
MFPQSSDPWHLCHGSSYCIMKSMKYTLGLDIGTSSVGWAVINNEKNRIEDLGVRLFESAENQKDGESLAKPRRDARGMRRRLARRGYRLDKIKTIFETEKLLTREQMEGIHSRPNNPYEIRARGLDKPLTPEELFIAVYHLAKRRGYKSNRKKVIEGEGEKANENKAVLGSIDNNKKLLAHGGYRTVGEMLFKDKNFESEKRNKQGSYLHACSREMLQEELEKLLKTQQTLGNKDITDKLIVELSEPKTGAFGYQRHYAQGEQIKKMIGTCTFEPTEMRAAKATFSFQYFNVLQRLNNLRIINKDDQSERPLTKEEREKVLSRVFSTKEVKYSQIRKDFGLKPSERFNMVQYFIRQKDAIGKTDEEIVDLIENKTKFPSMTKYYELKKALNENDWEILKKQPTVLDAIATALTVYKTDEDIKKELETIALDNGDKLSEKIITGLLALSFSEFGHLSLVALRKIIPSMEKGMLYDDACRQVYPDHKGYKTERSNKLRPLDVNDHSITNPVVRRSISQTIKVVNAVIDKFGAPTEVHLELGRELAKNHKERTQDHKKQKENADRNEKAKAQIEELGIQTRGGQDIIKFKLWMEQGNKCAYSGNRIDELRLFEDGYTEIDHIVPFSRSFDDSYNNKVLVLKKENQEKGNRIPYEVIGNDADAWVRFENIVNSMNINPRKRQNLLLKKYTGGDITTRSLNDTRFASRYLKNYIADTLLFAENAPKQKVVTVNGQATAYLRKRWGLNKDREENNRHHAQDAVVVAVTTQGLVQKVMRYSKTGEIVDYLHAHKGAKIIDPETGKEFDDETKREVNEQYIAQHNRRIKFVEPWTNFTKELDARMKDDVIERLKLLKHTLGLDGYPETEDMNFVRPIFISKMPRHKVTGRAHQETLRSPKRFKDEESVVRKQLSGLTLKTLESMAGKESDAKLYEILKARLTTHGDDPKKAFAEPVHKPMKDGTDGPIVRSIKIVSEGQKSGLLVNEGKALADQDTMVRIDIFSKESKKGKKQFYIIPVYAYHFAKRILPDKFITPGKAEKDWEINDDSFKFEFTAYPNDLIKIIKGDDVRFGYYSGCNRALGAIHILPHDQNQPLVNNGVKTLDNIEKYSIDILGNYHLVRNEKRQEITK

SEQ ID NO: 2312 - protein, 1005 aa, unidentified
  REGION 1..1005: note = Description of Unknown: Cas Enzyme sequence
MTERILGIDLGISSLGWAVVEHDAEHEENNSIVGCGVRLFTAAQTPKDHKSLNEARRNARGIRRVIKRRRVRMNQIKKLCIDHRLLQKNDFDLDNGMFNSPANRTDVWQLRHDALYRLLSGNELARVMIHIAKHRGYKFIGDNETDEESGKVKTAGKALKATFEAAGCLSIGEWLWRERQHNGKKRNRNVYDPKQKKKIPDYELSIPRDFLENEMKVIFDKQQKLGSTLATNELLSAWKVIALYVRPMQSIENMVGKCTFFPHEKRAPKSAPTAEKFVALGKFFATVVVDHEGKERKIIELKTVNELMHFVITKATIDYKQLRDFLGLKNDFSTIFKGLSYKSKKSETTEWKNVIKETETKPWISLKGHATFKKVLGDEGFNHFIANNDLADKIATVLTYYKDEGQKKEELAKLSLDPHFIETLYPITFTDFNNLSLKAMRIISSIMSDGYQRYDEAVHYAMDNGLLPKITQEKAIFLPPLKATDIAILNPTVIRAFAQFRKIANALVKKYGTFDKVHFELAREVNTQADINAMKEGQLKNEKERDATKRWMAENFPLIPPTRKNILKKRLFDQQGEFCPYTNEKILVESLFDEGYCEIDHILPRSRSGDDSQANKVLCMTQANQEKTNRTPYEWFGHDALRWEHFEARMNTHSNLAKMGKGKVSRLLKKNFDDNSQNEFLSRNLNDTRYMSKAIKSYCERYWKLAHDDDKLRIQVRSGKLTSELRYRWIEGYMKDRNIHTHHALDAIVIAFATQSMVQKLSHYYKAKETRHEKAKPIFNPPMEHFRHAVEEALTLERTETIITKDGREIPFNRLLISRPPRASVTGAAHKETIQRPSDYKGRGVSVNSGKGMCDNGDMPRVDVFTKRGKYYLVPIYVVDFAKKALPNITAYGEELAEDAQFLFSLYKDEIISISTKATANKPAKEVKGFFMQLIGPSILLNTIDNGAKEFFINTKINGKYTCQLNVLNALKVKKYTIDPLGYYHEVRGEKRLGTIPQETQKRKR

SEQ ID NO: 2313 - protein, 1048 aa, unidentified
  REGION 1..1048: note = Description of Unknown: Cas Enzyme sequence
MVEKILGIDLGISSLGWAVVEYDKDNDENNKIIDCGVRLFTAAETPKEKESPNKARRDARGLRRVIKRRRVRMNTIKNLLITYKLIDKTLLDEEMGMFHSQSNRVDVWKLRHDALYHLLSGDELARVLIHIAKHRGYKFLGDDESDEESGKVKKAGAELKKKFLEAGCQSVGEWLWKERGLQGKKRNKSGDYEISIPRDFLVEEIQRIFETQQKFGSTFATSELQKAYTDIAFYVKPMQSIEDMVGYCTFYPKIKSKNQDGEKRAPKASPSAEQFVILSKIFSTIVIDENKQEKKLIELKSIEQLIQIARSKETLKYKQLRKELNLAKDISFKSISDEEKTWINLVGNAKFKKILGLNYETFLKNTEISDEIAKILTYDKTFEQKETKLKNLLVNIDWIDNNHIAELAKLSFSQFNQLSLKAIKIISKIMIEGYARYDEAVQYAFENNLLPKPSHEKSILLPPLKETNIAILNPTVIRAFAQFRQVANALVSKYGSFDKVHFELAREVNTKEDRKRWEKDRDKNEKMHRQITEKLVEEGVKPSYKNILKSKLRSEQKDTCPYCQKNLHYPMIFEDGYAEIDHILPLSQSQDDSYVNKVLVHSACNQNKKNRTPFEWFQDEKKDWDTFKSYILMESTLGEKKRNYLIKENFSDPQSRKEFISRNLNDTRYMSKAIKTYCENHWKLSHDDDKLRIQVRSGKLTSTLRHQWGLDNKNRETHTHHAMDAIMIAFSTQGMVKKLSDYFAKKEAKVEKDKPVLITPIKQFKEAVEQATTLERQESIQTKAGDTITLNRLLISRPPRASVTGAAHEQTAKPYPRIKPIKNKYKRRRIPIDEDKFELFRNDKVASGNDKNFYNSSTIPRVDIYKKDDKYHVVPIYLSDMTKAEVPNKSLGTNPEGMDEKYFCFSVFKNDLIELETKATPKKPSKKLLGYFKQLNGANFILNSIHNGIIDGFVCSPITLFKQQKDMCKKCLPEDRAIGNCSQETLEFWEAENIKVPKKDFECDQGIKFAIAVRKYTIDPLGYYHEVKGEKLLGTIPQGAKKHPKRQK

SEQ ID NO: 2314 - protein, 1109 aa, unidentified
  REGION 1..1109: note = Description of Unknown: Cas Enzyme sequence
MRYSIGLDIGIASVGFAVMKLDEYDLPCRIERLGSRIFDVAENPKDGASLALPRREARGSRRRIRRRKHRKERIRELITEQGLLSQDGLDSLYNGDITDIYQIRSEAIDRQLTNEEFARVLIHLSQRRGFKSNRKTEKNAEEGKLLKAVSLNQIIMTENNFRTVGEMFYKYADFAEIKRNKADSYSNTVRREDILNEAHEIFKRQREYGNTLCSEDFEEKYCDILSSQRSFDEGPGEGNKNSPSPYSGDQIEKMIGSCTFEEGEKRAAKASCSFEIFSLLQKINHIRLENGGKATPLTNEQCLKLIATAHTSAELNYHKIRKALNISDDMRFNDIKYGNDSDNETAEKKIKFNFLKAYHDMRKALDKVSKGRMNVLSIKQRNEIGHIFTVNKTDDKIRAALNSTDLDTYDIEALIENLGTFSKFGHLSIKALDKIIPWLEQGLTYDKACTEAGYNFKGRGGEKSGLISLKHLAEEYKYTVTSPVACRALSQCGKVINAIIREQSPNYNGDLGNINSPVYINIELSREMSKDFDERNKLDKGMKENHAQNEKLKQEIQNTFKKLNPTGLDIVKLKLYKQQSGICLYSLKQMDISQLFDPGYADIDHIIPYSDSFDDTYKNKVLVLTAENRQKGDRLPLQYLNGKKRDDFIIWVNNSHLPMSKKRNLLKEELTETDLSGFRERNLQDTKTISRFMYNYLADYLKFSIFLSERKRHVTAVNGAVTSMLRKRWGLNKIREDGDTHHALDAAVVACTTQGMINELSRYHKDKERIYCDETGFEISKRTGEVLKERFPQPYVHFTDELTARLSGKPREAVERLKLYGESDLARVTPIFVSRMPSRKVSGAAHKETIKGIGENNTAVKRVALTALKLKDGEIADYYEPAKISDPLLYNALVKRLIEFEGDASKAFSEPFYKLKSDKSKNPDEPPQPVKKVKLCEKSTLNVSVHDKKGVADNDSMVRVDVFHIPNDGYYLVPIYVADTIKSELPNKAIVANKPYEDWKEMDEKDFIFSLYPNDLIFIRPKKNMVFSKVNKDSRHPEKSEKKSAFVYYKSTGINTGSMTVINHDNSYKIPSLGAKTLLEFEKWQVDILGNISKVGRETRQGFDGKRRH

SEQ ID NO: 2315 - protein, 1065 aa, unidentified
  REGION 1..1065: note = Description of Unknown: Cas Enzyme sequence
MQYVLGIDVGIASVGWAVYNLDLPRIEDLGVRAFNAAEEPKTKAPLAESRRLARGTRRRLRRRAGRLKRAKELFVQTGLIKASGIETAFTAADGRPDPWQLRADGLDRLLSGEEFARALFHIIKRRGFKSNRKKDRSAEDAESKKVLGCIEENRKRLTTGGYRTAGEMYFRDAEFQYRKRNSTGFYGFSVDRALLEDEIRKLFAAQRNLGSAFATPQLEQELLHVFTWQMPFAKGDQILKLVGPCTFEPAEMRAPKAAYTAERCTLLQHINRLIITDGGTERRLSPEERATAEQMAYTQADVKYAQLRKKLGLKDSERFKGLTYSRRVKDETVEEMSCEKAVFSKLTGYHAIRKAMGDNGLWEQVKNSPGTMDTLAFALTFYKTDEDIRQCLQDAGLPPEIMQAAENIPQFSKVGNMSVLAMRKIMPFLEQGMIYSEACEAAGYNHSDFSARVQKGSKLPVIAPSDVRNPVVLRALSQARKVINAIVRKHGLPCRVHIELAREIGKSAQERKEIDKRIEENRAEKQREREYLREEFHQEPSEDARIRFRLYREQNGRCAYCQTELDTQRAVLESGYVEVDHILPYSRSFDDSLNNRALVCSRCNQQKRNRTPHEWFGQDAARWELYEAWVRASIRHPRKRANLLAKDYEKRQSDWMQRNLNDTQWIARFLAGYIRQHLQTADPSDKAPIMCLSGRVTAIARGLWGIAKVREENDLHHAADAAVIAAMTPAMTKRITEYHKALENGWLHTETDTETGEITEFLRGHKFIFPEPWQGFRREVLARLSDDPAQAIAQLSPVSYAEDAPEIRPVIVSRMPVHKAGGALHAETIRAVRVEEDKRVSVVRKPLTSITAADIANLCDESGLLAKALREQLDQYGGDAKKAFAEPFYAPRPKGENRLVKAVRVKQTQPSGIQVRHGVADNASMVRVDVFRKDGKYYLVPVYTSDVAAGVLPNRAIVASKPEEEWLEMDRTYEFLFTLRPYDLVRIVTSKTEFQGYYRGTHRGTGNITLSSANKNDDENVFGPRRALSIEKLGMTVLGDTYPIPKEKRHGVADSSDNQPREAPG

SEQ ID NO: 2316 - protein, 955 aa, unidentified
  REGION 1..955: note = Description of Unknown: Cas Enzyme sequence
MGKIILGLDLGITSIGWALVDYDKENLDNNKIIDSGVRIFTVAEHPKDGKSLALPRREARSARRTTKRKAQRIRSIKRLLIKSKIITQKELEALFIGNKGQKDVWQLRRDALYRELEPKELARVMIHIAKHRGYFSNRKSEQPSDSEGKAVLGGISKNKEILEQKSFLTIGEYISTKEKKRNGKDKNGKLVYDNSIERYMLSDEIKMIFGKQKEFGNSYVSDEILDEFIHLAFEQRPLKSVADMVANCPFETEEKRASKSTYTYEYFRALQKLKNLRIITQDGEIALSQEQIQQAIVKAKEVSKFTYKTLKKLFGFDEILFKGLTYFDHKSGEAVKKDPEGEAVIDFSAYIKIKKVVQNADNLYWNSIENNAIVIDHIATVLTTEKNDKESFKKLMEVVENQKVCEALLSLSFSKFGHLSVKAMQSIIPFLEKGLDYDKSCDEVGYDFKAVFKGEKSIFLPPLSKQENLEMTNPVVKRAVAQMRLVYNAIARKHGQIDAVHVEFTRDIKNSHDDRRRIEKEQGKFRDAKEEAREHATEILGHEPSPKELLKFRLWKEQNKQCIYSGDYIEPHKLADPYATEVDHILPYSRSLDDSLNNKVLCFTKENQDKGSQTPHEYMDVKKFEEFEIRVNANQNIKTAKKSRLLKKNFDPSSEKEFRERNKSDTAYIAKFVKNYIESHIEFKKSNDKRHVFTMNGMLTSQLRYKWGVGDKNRENHLHHAEDAIILAFATQSMVQKISTISAKREGFSFKDKEEKSKELRFIAPVERFHEKVKESVENIFVSHMPRRKVGGTAHKETVYSKNIKSKGVIEVNGGVAENGEVKRIDIFEKDNKLHFVYLYPRDFVQDKLKKVTIKNQEIDESYNFKFSIFKNDLIEMQLKDKIVFGYMGFAESDGRFNILPHSQTMLDKKIDRHSTGSAKYIKKYQVDPLGNYVEVKSEKRVGTIKEGKAQRNKH

SEQ ID NO: 2317 - protein, 981 aa, unidentified
  REGION 1..981: note = Description of Unknown: Cas Enzyme sequence
MSKIILGLDLGITSIGWALVNVDDEIEHNKIIDSGVRIFTIAEHPKDGKSLALPRREARSARRATKRKAQKLRAIKRLLVQNKILTKDNIENLFIGNKGQKDVWDLRRESLHRELDSKELSRVMIHLAKHRGYASNRKSEEPSDSEGKAVLSGISHNKKILEQKSYLTVGEYISTKVKKRNGKDSEGKLNYENSVARSMLEDEISIIFSKQKEFGSLLVNDELLNEYKNIAFTQRPLKSVASMVANCPFEVEEKRASKSSYSFEYFRALQKLKNLRVIDENGYEMPLIFEQIKTIVEKAKTTKTFTYKSFRKLFPQYKDMNIKGLVYYDHKTGEVKDPEKEKFLDFSAFQKIKKVVEGIDGSYWQSIEDDIEVLDSIATILTTEKDDSKSKEQLSKIVKDSDVCDSLVGVSFSQFGHLSNKALRKIIPFLEQGDDYDKACEKAGYDFKAIFKGTKTLLLPPLSKQENIEMTNPVVKRALSQMRLVYNAIARKYGAIDAIHVEFTRDIKKSHEDRRKIEKEQGKFKEAKDVARVKAEEVLGYEPNAKELLKFRLWEEQNGYCVYSGEYINPTVLQDPYATEIDHILPYSRSMDDSLNNKVLCYTKENQDKGSKTPYEYMSKEHFEEFTTRVSSYKNLKQAKKGRLLKTNFDENSEVAFKDRNKNDTSYISKFVKNYMEAHIAFKESKAKRHIFTMNGMLTSQLRYKWGVGDKNRDNHLHHAEDALILAFSTQYMVQKLSTVSRKREGFIYKTKEEKSKSLRFETPLEHFGEKVKESVSEIFVSQMPRRKVGGTAHKATVYSNKTFSHKKENGKVEQLKGGSKTNNVKLKHGIALNDSMPRVDLFQNKKTKKYYLVPIYVSDFVKDTLPNKAIVQGSKPWIEMDNEYEFKFSFYKRDLIEVKSKKSAKKESVQVLGYYDSTHSGTAKIMFKSHRGDKEYGFGAQSLLFIKKYQVDALGNYVEVKKEKRQGTIKEGRASKKKVK

SEQ ID NO: 2318 - protein, 968 aa, unidentified
  REGION 1..968: note = Description of Unknown: Cas Enzyme sequence
MSKIVLGLDLGITSIGWALVNVDDKNIENNKIIDSGVRIFTIAEHPKDGKSLALPRREARSARRTTKRKAQKLRAIKRLLLRNKILTQNDLNTLFIANKGQKDVWDLRREALYRELDNKELSRVMIHLAKHRGYYSNRKSDEVTDNEGKAVLSGIGHNKTILESSKFLTAGEYISTKKKKRNGKDSEGKLNYENSVARSMLVDEIEIIFGKQKEFGNSFVSDELLETYKELAFEQRPLKSVAHMVANCPFEVDEKHASKSSYSFEYFRALQKLKNLRVIDETGYEMPLIFEQIAQVIHKAKTTTKFTYKSFKKLFPQYKEMKVKGLTYHDHKTGEIKDPEGVKFLDFSAFQKIQKAIQNADNLYWNTIENDYEVLDAIAKVLTTEKDDNESLKQLKEIVESQKVCEALLGLSFSGFGHLSNKALRNIIPFLEEGEDYDKACQKAGYDFKAIFEGEKTLLLPPLSKQENIEMTNPVVKRAVAQMRLVYNAIARKYGAIDTIYVEFTRDIKKSHKDRNDIKKAQGEFRDKKEEARVHATEILGHEPSAKELLKFRLWKEQNGECIYSGKEISPDVLNDPYATEVDHILPYSRSLDDSLNNKVLCFTKENQEKGSQTPYEYMSQEKFNEFEQRVKGYKNIRQAKQGRLLKTNFDESSELAFKDRNKNDTSYISKFIKNYMEAHIAFKESKGKRHIFTMNGMLTSQLRYKWGVGDKNRENHLHHAEDAIILAFSTQSMVQKLSSVSAKREGYIYESKEKKSKALRFVTPLEDFGVRVKESLGEIFVSHMPSRKVGGNAHKATIYSKNKKSKGVVEINNGLAENGEVKRIDIFEKNGKYHFVYLYSIDFVKDEIKNISIKSKIIDDTYSFKFSVFKNDLIELEFKDKKVFGYLKFAEGDGRFNIIPQSQGELDKKTDRHSTGSMKLIRKYQVNPLGNFVEVKSEKRQMTIKYNWNEKIKKRAIKRAERKKYKS

SEQ ID NO: 2319 - protein, 950 aa, unidentified
  REGION 1..950: note = Description of Unknown: Cas Enzyme sequence
MSKIILGLDLGITSIGWAVVQSDTKELLNNKILASGVRIFSAAEHPKTGESLALPRRNARSVRRTTKRKSQKIRAIKRLLIQSNIITQNELEHLFIGNKGQKDVWQLRRDGLYRLLNHKELSRVMIHLAKHRGYMSNRKSEAPTDNDGKAILSKINENQIFLQKGTYKTIGEYFATKDRKRNGIKDGKLYYDNSISRDMLVDEINLLFKTQKEFGSMYVNDTLLEDYKAIAFTQRPLQSVEHMVGNCPFEQEEKRASQSSISFLKFRAIQTLKHLRYIDSEGEHNLSKVQIEQFLYEALQQKTPRKYNHLRKFFQFGEEIEFKGLVYYDENGEKLKKSPEGVKLVDFSSYYKLKESIQKVDNLFWDKLEKNEELIDNIAYILTVEKNDDAMIKKLKNLDLPDVVCDALVYLSFSGFGHLSAKALKKINKEFLEAQHYEDACTRAGYDFRVIFQGKKSLLLSVLSEQENMEMTNPVVKRAVTQMRKVYNAIARKYGAIDAVHIELTRDIKKSFKDRKRIEKEQKDFRDKKEEAREEAIEILGHEPNGKELLKFRLWKEQGHHCIYSGEYIKPEILADSYATEIDHILPYSRSLDDSLNNKVLCLTKENQEKANQTPFEWMDEKRFYDFSVRIENLFLKKAKKERLLKKNFDENSENAFKERNKNDTSYISKFVKNYIEAHIEFKPSQHKRHVFTMNGMLTSQLRYKWGVGDKNRDNHLHHAEDAIILAFSTQSMVQHLSTVSAQREEAGFVYKDKQEKAKSLRFITPMDDFGKIVRENVEEIFVSHMPTRKIQGAAHKETVYSKKVKSKGVMEINGGVVENGEVKRIDVFEKNGKFHFIYLYSSDFVKKELKNITIKGLEVDESFTFKTSIFKNDLIQLELKDKIVFGYLKFAEGDGRFNIIKHKSSELNKKTDRHSTGSMKGIKKYQVDTLGSFVEVKQEIRQGTKKQKK

SEQ ID NO: 2320 - protein, 949 aa, unidentified
  REGION 1..949: note = Description of Unknown: Cas Enzyme sequence
MKKIILGLDLGITSIGWALVESYEKEIEKNKIIDSGVRIFTVAEHPKDGKSLALPRREARSARRTTKRKAQKIRAIKRLLIKNKIITNPELENLFIGNKGQKDVWDLRRDALYRTLDKKELARVMIHLAKHRGYASNRKSEEPSDSEGKAVLSGVSHNNTILQEKKYQTIGEYISTKIKKRNGKNKDGKLNYDNSISRAMLIDEIETIFTKQTNFGNAFVNDELLQEYEKLAFEQRPLKSVADMVANCPFEVNEKRATKSSYTFEYFRALQKLKNLRVINEDGYEMPLIFEQIGQIIANAKTIKKFTYKSFKKLFPQYKDMQIKGLSYFDYKTGEAKDPEKVILVDFNAYQKIQKAVQIVDNLYWNQIENDSDILDSIATILSTEKDDTKSIKQLKEIVKNEKVCDSLVALSFSGFGHISNKALKKIIPYLESGDDYNKACEKAGYDFKAIFQGDKSLLLPPLSEQENLEMTNPVVKRAVAQMRLVYNAIARKYGAVDAVHVEFTRDIKKSHDDRRKIEKAQSEFRETKENARIQATEKLGKEPNAKELLKFRLWEEQNGFCIYSGEYINPISLQDPYSTEVDHILPYSRSMDDSLNNKVLCLTKENQEKGSKTPFEYMSEDKFAEFEQRVSVYKNIKQAKKSRLLKKNFDESSANAFKERNKNDTSYISKFVKNYIESHIEFKDSKMKRHVFTMNGMLTSQLRYKWGVGDKNRSTHLHHAEDALMLAFSTQGMVQKLSSVSAKREGFIFKNKEEKGESLRFIAPMEDFHKKVRESISNIFVSHMPRRKIGGMVHKATIYSKKVKSKGTVEINHGLAENGEVKRIDVFEKNKKFHFVYLYPRDFVQDTLKNTTIKNKKIDDSYNFKFSIFKNDLIAMQLKDKIVFGYMGFAEGDGRFNILPHTQVMLDKKINRYSTGSVKYIKKYQVDVLGSYVEIKSEKRQGTKKNKN

SEQ ID NO: 2321 - protein, 1048 aa, unidentified
  REGION 1..1048: note = Description of Unknown: Cas Enzyme sequence
MPYRLGLDIGANSIGWACLKLDAGGLPAGLLDIGVRIYPDGRNPKDGSSLAVARRVPRSMRRRRDRYLTRRAQLLATLRRFGLMAATADEQKQIAALDPYKLRQEALHRCLEPFELGRALFHINQRRGFKSNRKLDRGNEEAGKVKEAETRLRMELTRAGAHTLGDWLATRHTTGQPVRVRLAGTGKTAAYEFYPSRTLLEDEFNTIWKAQSGWNSALTEKMRATLHRIIFYQRPLKPVPVGKCWLETGEERASRALPITQRFRIAQTVSHLRVSEPGMPERRLAQAEREILLAGLYRGQPIKIADIIKKTLKLPPETDLHFRDNEIKGDATALRLAGAPKAKTPAPIGPAWHEFELATQSKIVETILSYEDAEDLSSGIAALAALGLTRDQAERAILQSLPDGHVSLSAKAMLKILPHLEAGMTYDKGVQAAGYAHHSDTRTGEIREVLPYYGELLAERIGTGTGEAGDPLEKRYGRAPNPTVHIALNEIRRVVNAIIARHGPPTEIVVETLRDLGRSAKQRQEEDKKNRENQKANDKRREIVKDLGLRVNAQNMVRLRLWEEQAEDPKNRCCPYTGTLITPRLALSDEVEEDHILPFAQTLDDSMANRMLVYRDANRAKARRTPYQAFGHTPQWPDILARVTLLPKQKRWRFEKDGEQKLGPGGDFLARHMTDSATIARWAVFYLDVLAPGKIWSIPGRLTSLLRNELGLNSETLLGKGGKRKDRTDHRHHAIDAVVVALTDRGMLQRISAAAKRADASGARIIKDLGEPWPGFVAELSAKLQTVIVAHKPDTGVQGPLHNDTAYGIIPENGNKGPNVVVRKPVIALAEKPKHGNEATKAAKSVVRDPILKNLIAAIQKSGSEIEQRDALSKLVGPNGSPVRSVRMEERLEGVQKIRDRITGKPYKAMKLDGNHCAELWRLPNGKYDLQVISRFDAAQRLEAERLGRKIADTRPHPAAKLIMRLHINDMVALGQGENRRIFRVVMTSGSTVTLAPPHEGGNIRDRHRDKTDQFRYVFASRKTLLDDGARKIWVDPSGRIFDPGPIA

SEQ ID NO: 2322 - protein, 1041 aa, unidentified
  REGION 1..1041: note = Description of Unknown: Cas Enzyme sequence
MTYRLGLDIGANSIGWVCLTLDEGGQPSGVLDLGVRIYPDGRNPKDGASLAVARRVPRSMRRRRDRYLARRAQLLATLQRFGLMPVSADEQKLVAAADPYKLRQDALHRRLEPFELGRALFHINQRRGFKSNRKLDRGNEEAGKVKDAETKLKTELARAGALTLGDWLATRHEAKQPVRVRLAGSGKTAAYDFYPSRAMLEQEFETIWTAQSGWNSGLTAEMHDRLQRIIFHQRPLKPVPVGKCWLEPREDRAARALPITQRFRIAQTVSHLRINEPGMPERLLTQEERGAILASLYRGEPIKIAAIIKKILKLPADTDLHTRESELKGDATALRLAGAPKAKTAAPIGAAWHELDLATQDAIVETILAYEDAEDVSAGVAALSALGLTQAQAERAIMQSLPDGHASLSAKAMRKILPHLEAGITYDKAVLAAGYAHHSDTSTGEIRETLPYYGELLAERIGTGTGKEDDPLEKRYGRAPNPTVHIALNEIRRVVNAIIARHGPPAQIVVETLRDLGRSAKQRQEEDKKNRDNQKANDKRGTIINELGLKVNTQNRIRLRLWEEQAEDPKNRCCPYTGTLITPRLALSDEIEEDHILPFAQTLDDSMANRMLVHRDANRAKARRTPFQAFGHTPQWPEILARVALLPKQKAWRFQPNAEQKLNVNGDFQARHLTDSATIARWAVFYLEVLAPGKVWSVPGRLTSLLRNELGLNSQSLLGKGGARKERTDHRHHAIDAAVVALTDRVLLQRVSAAAKRADETGARLIKDLGEPWPGFVAELAEKLSTVIVSHKPDTGVQGPLHNDTAYGIIPDSGKKGPNVVVRKPVETLAGKPAADILEAVRDPHIGKAIAAIAPAGDTTAKAALAGLKGPNGAPVRRIRLWERLESTQQIRDRKTGKPYKAVKLDGNHCAEFWKLPTGKYELRVVSRFAAAQQAEAIRLGRKFADTRPHPAAKLLMRLHISDMVALGQGPERRILRVVKMSGSTVVLAEPQESGSLKARDADKSDPFKYINASGSRFIQEQARKIWVDPSGRIFDPGPPA

SEQ ID NO: 2323 - protein, 980 aa, unidentified
  REGION 1..980: note = Description of Unknown: Cas Enzyme sequence
MSKIVLGLDLGITSIGWALVNVDDENNVNNNIIDSGVRIFTIAEHPKDGKSLALPRREARSARRTTKRKAQKLKAVKRLLIKNKIISENELEHLFIGNKKQIDVWQLRRDALYRELDNKELARVMIHLAKHRGYFSNRKSEEPTDNEGKAVLSGIGHNNEILQKNTYQTIGEYISTKSKKRNGKDAEGKLNYENSVARSMLIDEITIIFEKQKGFGSQLVNDTLLEEYKNIAFTQRPLKSVADMVAKCPFEVDEYRASKSSYTFEMFRALQKLKTLRLIDENLNEVALSLEQIHQVIHQAKITKNFTYKSLKKLFSQYKEMQIKGLTYHDYKTGELKDPEGVKFLDFSAYQKMKEAIQSTSNLYWDKIENDTNILDTIAKILTTEKDDKESLKQLQEIVDEASVCEALIGVSFSGFGHLSNKAIQNIIPFLEKGEDYDKACEKAGYDFKAIFKGERTLLLPPLSEQENLEMTNPVVKRAIAQMRLVYNAIARKYGALDAIHIEFTRDIKKSHDDRNKIKKEQEKFRDTKEEAKAHAEEVLGKEPNARELLKFRLWKEQNGECAYSGEKIRPHHLMDDLATQVDHILPYSRSLDDSLNNKVLCFTKENQDKGNKTPFEYMSEDKFYEFQQRVEGYKNIKQAKKSRLLKTNFDENSEIAFKERNKNDTSYISKFVKNYMEAHVAFKESKNKRHVFTMNGMLTSQLRYKWGVGDKNRDNHLHHAEDALILAFSTQSMVKKLSTVSAKREGYIYKTKEEKSKMLRFETPLKDFGHKVRENVHNIFVSHMPRRKISGAAHEATIYSPKSLSVRKGNGKFEILKGGSVKNNVKVKHGLAKNDSMPRVDLFQNKKTKKYYLVPIYISDFVKDKLPNKAIVAGNKPWIEMDDDYEFKFSFYKSDLIEIQTKKTATKESIQLLGYYDSTHSGTANLTIKSHDGREEFSLGSQNLMFIKKYQVDALGNYVEVKNEKRQGSIKESRLKKNK

SEQ ID NO: 2324 - protein, 1104 aa, unidentified
  REGION 1..1104: note = Description of Unknown: Cas Enzyme sequence
MKYVIGLDLGTTSVGWAVINKDESRIEDLGVRLFESAENPKDGHSLAEPRRLARGARRRLARRRSRLDKIKAVFILHGLLTASAVDSLLLAKNNPYQIRSEALDKKISNNHLFLAIYHLAKRRGYKSNRKSAELEAVDSEKKAVLSNIFQNSKRMRDTASRTVGEMLYKELLASAVSFEGVRNKPSNYKHSVSRSMLQDELELIIKTQQKFSNELLTESFYNDLVGIDKNNNAIGAFNYQRHYAQGDILKQMVGFCTFEKDEIRAAKATYSFQYFNILQRLNNLLLIDSNGDRRPLTKIEKEQIIAKLLIVKTCNYQQVKKLLGLENTTRFNMVNYFVSRKQLEKKSEAEQKDDCEAKTKLPNFEPYHVLKSAVIGSKDKPLNQDFWKVMSSDTETLDELAEILTLYKTDEDILKYLDELRVSETTPLPDDVKKALLAVSFIKFGHLSVKALRKIIPHLEDGKQYDEAVTLADKDYGKNLQSKKLKLSPISKDDCSVTNPVVRRTVSQTIKVVNAIIDRYGSPYEVHIELGRELSKNHKERNTLLKDQKLNREKNEQAVTHIKDNFKQIDPKGEDIIKHKLWYEQNCKCAYSGKSIDDTRLFETGYTEIDHIIPFSRSFNDSFNNKVLVLIYENQNKGNKIPYEFLATSEQRWAEFEALVTSMRLISKSKRENLLSKKYVGDKLTERTLNDTRYIARYIKNYIENNLIFTKEENKRTVVSVNGLATAYIRKRWGLTKDREASSLHHAQDAAIVATITPAFIQKISTFSKLRYIQNYLNAHKDASGVDATVEEIEEARKMIDKHEAGSKIFFPEPWDNFRSELIARMSADPMYEIGLLKKELPNYSTEIKPIFISHMPKHKVTGRAHADTLRSPKRFSENMSSVKTPLISLTEKKLRDGGHYLDPKLYKELLNQLNLHCDDAKKAFAEPFYKRMNNGKQGPLVRSVKLFNYAQKSGILLNNGTALADQDSMVRIDIFSKQNNRGKNEFFFIPIYAYHTTQKILPNKFVISSKQENDWGEIDDTFSFMFSLYPGDLFELTRGEKNEMLYYSGANRANASISGLKHDKSKQVENLGIKTLDKLDKYVVDMLGKKSLVIKESRQSFNS

SEQ ID NO: 2325 - protein, 1085 aa, unidentified
  REGION 1..1085: note = Description of Unknown: Cas Enzyme sequence
MKYSIGLDIGITSVGFAVMELDESDIPCRIAKIGSRIFDAPENPKDGASLALPRREARGIRRRTRRRKHRKERIRSLIVSQGLLSHRELENLYSFKKGTNPEDTDVYKLRVDALDRLLTNRELARVLIHLSQRRGFKSNRKNEAEPKDSKGLLKALDVNSVELSEKYRTVGEMLYNRENRRNKPNDYSNTVQRADILNEAHMIFESQRNFGNNICGEDLEKQYCEILTSQRSFEEGPGGDSPYKVNFQDMVGYCTHEKKEKRAAKATYSFELFNLLQKVNHIRIDEGGKSRVLYANERQLIIDKAHNSPAKLTIVQIIKTLGLSEDAHLNYREFTPLQAYHEMRKALKGVTDMKYISADTRNKIGHIFTYEKTDAKIREKLSDKNYLNLTAYEIETLIKNMKSFNGNGHLSVKALNNIIPHLEQGKNYNEACEKAGYEFKANNGIRICEQKCPHHGNCADKKELICLRHLAVETENTITSPVARRALSQCAKVINAIIREMGTSPVYINIELAREMSNNFDERTKIDKEMRANQDKNEQIKKEILETFCKGNPTGLDIVKRKLFKEQGGECPYCRKTLHENDVYNDIGHSEIDHIVPYSKSFDDSYKNKVLVHSKCNQHKGNRLPLQCFTGKDKDDFIVYVNNSHLSKNKKQNLLREEIPEGFKERNLQDTKTITSFMYNYLSANLAFSNFSTDRKCHVTAVNGAVTSMLRKRWGLNKSREDGDLHHALDAAVVACVTQGNISMLTKLEKYYNNKENFKIDKKTGEVKERFPQPYDYGSKMTFSNELEAWLSNNPKERLRELNYPTYCYQTLEKIRPVFVSRMPNRKVSGAAHKETIKGIGENNSQIKKVTLSSLKLNKDGEIDGYYNPNDDRLLYNALKERLTEYGGKGEKAFVQSYYKPKSDGTQGPLVKKVKIVEKSTLNVLVHDKTGSADNGSMIRVDVFFVEGEGYYLVPIYVADVVKGKLPNKAMPSKKEMKADNFLFSLYSNDLIYVEHKKGMNFVIPKKKKEKSKLDPNPPIQKSEFVYYRSADIDGGKIKIIKHDNSYETRIGIKGLQKFEKWQVDILGNISKVGNEPRLGFDKEG

SEQ ID NO: 2326 - protein, 1047 aa, unidentified
  REGION 1..1047: note = Description of Unknown: Cas Enzyme sequence
MRYGIGLDVGIASVGFATVKLNEADDPIRIIKMGSRIFDKAEQPKTGASLAAPRREARGMRRRLRRKAHRKERIRKLFVKSGLVSENQIKSLYDGILPDIYKLRVDALDRIVSNEELARILIHLSQRRGFKSNRKSEKGGQDGELKTATKANKELMDKNDYRTVAEMFHNKSVKRNKEGDYSNTVLRDMVLDEVHKIFAAQRNLGNKFCSEDIEEKYCQILSGQRAFDEGPGKQSDGTDSPYKVDFEKLVGECTLEKGETRAPKASYTFERFNLLQKINHMRVEDEGVKRLLTPAERQEELDNAYKNKKSKYLSAYHKMNKALGNISIDISQRNEIAGIFSLYKNDAKLIEELKKSGFETLVIDALIEGGLEFSTFGNLSIKAMDKIIPFLEEGLTYDKACLAAGYDFKGDEDKERKVTISLEDLAKESEKEITSPVARRALSQCAKVVNAIIRDMNKIPPVYINIELTREMAKSYEDRKKAEKGMLKNRDKNEKAMERIRNEHDVSNPKGQDLVKFKLWQDQDGICAYSGEVMKIEKLFGPSYEIDHIIPYSISYDDTYKNKVLVLARENQQKGDLLPMEYLTGKQKDDFVLRVNSSNHHWKKKNALRKEALTEKDKEGFIQRNLTDTQTITTFMYNYLRNNLEFSPFLSNQKRHVMPVNGAITSQIRKRLGLNKIREDGDLHHAIDALVVACATQGMIQQITKQSQRKELRYKNKSNKPEKEEKFPKPWEYFSEELQARLCTDPLNAIKNLQPLLLTYPPEELDPNSKKAIKEIFVSRAPSRKVTGAAHKETIKGISEDGNQIKRVSLTALKLGKDGEIESYYRPEEDMLLYNALKEQLTKYGKDAFVKEFRRPTDGRLVKKVRILEKSNLDVKVHGGKGSADNDSMVRVDVFYIPEDGYYLVPIYIADTLKAVLPNKAIVANKPFEEWKEMDDNDFIFSLYSNDLIFLKHKKSLDFKVVHKNSSLPEICSVQETYAYYKGTTSSTGSIKIIKHDNSYIIESTGAKTLLELKKCQVDVLGNISQSGKEERKGFFENKREGSHGIS

SEQ ID NO: 2327 - protein, 1060 aa, unidentified
  REGION 1..1060: note = Description of Unknown: Cas Enzyme sequence
LRYSLGLDIGITSVGWAVLDMEQKRIEDLGVRLFPGAENPKDGSSLAAPRREARSSRRRLRRKRQRLSDIRRLIISSGLLSEAALTNLFQTPNEYTPWQLRAEGLDRKLSPFEWARVLIHIAKHRGFKSNRTVSPEEKNAKANEEGKAKEGMKSNSLLLSSGNDGKGYRTVGEMIEKDPKFQFHKRNKSGDYSNTIVRSDLESEIKTLFSSQREYGNKFTSAVFEEEYIKLFNRQLPFASGEIIEKMTGNCTFEPDQKRAPKASWTAERFILLGKILNIRVRVDGKKMELGPEKMRIIHDLAYKNAKVTYKQIRKALDEGENWHFENLPPVRSSSDKKSDPEDAVFVELKAFHSFRKCISDKLGKEYWENIISTSPTILDTLAYALTFRKTDEEIISYLKNHNIDCELINAVLPLNFNGVVNLSIKAMANLIPHMENGNRYDEACQLAGYSHYDPHGGSDRSLLLPIPNFEEIRNPVVFRAITQTRKVVNAIIRKHGSPERVQIELARDLSRSIDDRRKIEKEQLDNKAQKEKLSLEFEKLYSYKPNGAQLEKYRLWKEQEGFCPYTGEYIHPDRAFMSEDGNYAEIDHIIPYSRSFDDSFTNKVLVMGSANRNKKDRTPYEYFGSDIEKWRMFVANVDAHVKNRRRAERLKMKDIDESDEETMKERSLGDTRYITKYVAGWIENNIIFSDPSVKRPVTRINGRATATLRWQWGINALKDRQKSDLHHALDACVIAAATPSIIKSISDYSRKKELSLLRSEEQDKKKTRLPEPWPYFRKEVEARLSDDPVSMINEFGLKNYPEDKLATVKPIFVSRKPERKVSGAAHEETIRSAKHIEDLQKTAVRTSILSVNLSRLENMVGKERDTALYEALKNRLKEFANDPKKAFKDGFRKPTKNGEPGPIVRTIKLYDSGTSGVEVCGGIAANGSMVRLDVFTKNSKYYLIPYYVDDIAKRRVKNKAIVGGKTEEMWEIIDSSYDFLFTLFRNDLVNVIDSKGKEIFGYYSGCDRSTGAIHILHHAGECLWRSIGVRTVKKLEKFDVDILGNYYKVKKETPPYELA

SEQ ID NO: 2328 - protein, 1068 aa, unidentified
  REGION 1..1068: note = Description of Unknown: Cas Enzyme sequence
MKKKIFGFDLGIASIGWAVIDHSDENFDPETGEIIEGKVVGCGVRCFPVAENPKDGSSLAAPRREKRLLRRITRRKARRMLGIKRLFVAKGLVASTTELEALYAEQTGGDVWNLRAEALRRPLSKEELLRVLTHLAKHRGFKSYRKAAEEADKESGRILTAIAENRKETAGFQTLAQMIVERAKHSDDHKMRNYTPQKGPNKGVAVYVNSIPREEIEKETKLIFEYQKQFGLFTEDLYRDFCKIAFRYREAGSVGHMVGRCRFEPEQPRAPKEAPSAELFVALSKINNLKVTVDGERRFLNEEERKALLELLKNTKEVKYSTIKNKLFKGREVFFDDVNYAQKTKKGKSGEEKAVNPEDAKFYAMKGWHKLKAAFSPEQWKKVGSNLPLLDLGMTAVVCEKNDAGIERFLSEKGIPEDYREVFKKLTGSEFINLSLKALYKLNPYLAEGLKYNQACEKAGYDFREDGIKLAEEKGLLLPPIANDKLTTVPVVNRAVAQFRKVYNAMVRTYGAPDQINLEIGRDLKKSRDERNQIMRRQKENETERKEAEDGLEKEGLAANGKNMLKYRLYQQQNGKCIYSGKAIDLRRLDENGYCDVDHIIPYSRSLDDGQNNKVLCLAEENRKKGSKTPYEYLEPLGRWEEFETVVNTTPSINRYKRNNLLNKDYKEKENDLEFRERNANDNSYIARYVKRYLEDAIDFSASSCAIRNRVQVRTGSLTDYLRHQWGLIKDRDASDRHHAQDAVVVACATQGMVQKLSKLSAIFENKDDFRRKKAEELGHEKAEAWYKYVKQQIREPWSGFRTEVLAGLEKVFVSRPPRKNATGSAHKDTIFSKSEKKGSLPIRYGMAEKENMFRLDVFRKENHFYIVPIYVVDLVNCKEFIDAPQPYEYVNGSFIKIDESFNFMFSLYKDDYVEITSKDECIKGYVNQYNAQSGQLYIGSVDNSPIFRIKTSTFLRDDNILLKIGDQEYIGKIGKFDNEKKQVVINGLKNNFMINALVKLNKKGDETKNIQTEKSYTKMSNEKKICLNVVDSIEKYQVDPLGRIAKVKKETRLPLTMMKKNRHKKGE

SEQ ID NO: 2329 - protein, 1075 aa, unidentified
  REGION 1..1075: note = Description of Unknown: Cas Enzyme sequence
MSINKLMVVNMKKVLGLDIGIASIGWAINEIDEDKLQTINPETGEILQGKVLGLGVRTFTQAENPKDGKSLALPRREKRSSRRRLRRRRYRLDKIRQLFISANILTKDEIDNILKPQPLTKNAWQLRAEALDRKLDKQELFRVLYHIAKLRGYKPQKGELAEDKAKEEGRVKDAIRENTKKLEQENLLTFPQLLVKNHKIDEPFRNKADSYINSIPRNLTEREASLVLEKQILLGADYITQEFINKYNEIAFSQKSAMDRKQMEKMIGKCTFEPSEMKAPKNSYSAELFVLLAKIANLSLRTIDNPEKIELNQEQKNKIKEAAFDKITALTYKNIRKELELPDNMIFKGLNYSSIKNKTGKEKDPEAEKFIELKGFHTIKKAYDGLGNEEFNSLLNNIEKFDKICEILTTIKTEEETLKELNEVVKPEIAERLKDITFSKYIHISLKALYKINLYLEKGNNYSKACELAGYNHYNPNSESEKFDYLPSFEELKQKGINFEPIRNPVVNRAVCQVRKVVNAVIRQYGRPDQINIEFTRDAKNSFKDRKKIKAGQDKFKDEKKEAMIRCAEEGLNPEEGANLIRFRLWRQQNEKCLYSGKDIKISDLKDYSALDIDHIIPYSRSLDDSLNNKVLCFANENRQKGNKIPAEYFGIDTPQWQEFKSRILASSLPMPKKNRLLKEKFEQSDDFIERNLRDTSYATRYTAEYIKSFLRLNENDKIKNKVQTRNGSLTAFLRHNWGFDKVRADGDKHHALDALVCAVSTQGYVKKLSDYTGRREANKYEKAESIARKIKIPTPWGDKESFRNEVNFHLEKIFVSRAPRRKASGEIHQETIRTVKKLKTDGVSGIRTRLTNIKAKNADELDKLIFDTDRTQNSVYQVLKERLEEHNWNAEKAFATEIRMRRKDGTDAAPIKSVRIKDTQKSGIIIRKGIANNGDMARVDVFSKTEKGKKKFYLVPIYLKDFANGVLPNKAATAMKGEEDWRIIDEAYNFEFTLCKDDLILVKKKNEPEILGYYNAFNRATAAISFENNDRSKIYKEVGAQSLEVFQKYSVDILGNYSEVKGKKRMPIGNKKAG

SEQ ID NO: 2330 - protein, 1063 aa, unidentified
  REGION 1..1063: note = Description of Unknown: Cas Enzyme sequence
VNKRILGLDIGIASVGYALIDFNDNFENQQLSQNKIIVSGVRLFQKAEKSDGKSLGEERRIARSIRRRLHRKAERLKDIRNLFVDKKLVTPQEIDTSENNSQNIYKTQKGEKQITPWQLRAEGLDRLLTGKEFAIVLSHIAKHRGYKSTRKSELKTDDAKIGEMLTGIKNTETKLTENNYRTVGEMFYKDSDYVSNKRNKANKYTNTVSREKLYEEVKILFETQREAKSIFASKECEEQYTNIAFEQKTSGSIDKMVGKCLFEPEEFRSPKNTYSAEIFKILQKINNSSLLDISTGEIKKFTADEIKTLFVLVHNQIKITYTTVRNTFNLPENIIFGNGVKYGETTKNKKSAKKQEYNPENEEFISIPTYHKLKKLIISKLSEEKWNDLIKNIDNLDIVVSAIALYKDDSKITENLLKKNIAKDIIDTVLELDFKKFIHISTKALAKINKFMLNGLTYDKACQAAGYDFKKGIANSTKTNFLPIPTEDEQITNPVVKRAFAQTRKVINALIREYGSFDMINIELARDLSHSFYDRLEIKKGQEEFQKQKQEARNELAKELGIDSSSVKDSDILKYRLWKQQNGYCVYSQKLISVPQLLEEGFVDIDHIIPYSRCFDDSLNNKVICLSSENRQKSNMTPYEYLTKNNNWDNFTVFLKTLKQLKLPKINRLLKQKLDDTDSNTLKSRNLNDTRYAGIYIKDFIENHLIFAENKEIKRKVNVCSGSMTALLRHKWGFEKNRQESHLHHALDAIIVASITNGMVNLISSCAKKIELGESVKTNPNKTGILKKYKLIFPYPWKNFRNDVEQSLNGIFVSKAPRHKVTGKAHKETIYSAKYIDNGYTTVKTSIFDLSLKKLQNMHDIEHNRVIYDLLKQRLEQFNDDPQKAFAEPVYMPCKDKSKRPVIRSIKLKDNTQSGIFVRKGLAQQELIPRVDVFTKNNKFYLIPIYVSDFKKGILPNKAITAGKDRKDWTIIDNTFEFKFSLFKDDLIGVKKKKDKVLKIGYFNQADSSTANIKISNVINNLEFNYGSKTLIDFKKYNINVLGKYFEIKKEKRLDIKIKNNKK

SEQ ID NO: 2331 - protein, 1178 aa, unidentified
  REGION 1..1178: note = Description of Unknown: Cas Enzyme sequence
MTKRVLGIDLGVASIGWAVVELEEEVIDAPKTQAQYAIKGGKIVASGVRLFDRPTDRQNKSLALIRGESRRARASLERAKERLARLVKIALDQGIIDSNFSVEQFKKTPNEYVWKLRKDALDNALSNRDIFQVLYHIAKHRGFYFLTKEERKKMESSEKIAKNEETGNDSAKNTEQGKVKKGLLETQNKLKQSGYRTVGEYLYYKEGKKHNNKSSYEMCFRREDLKEEIQLIFETQRQLGNTLLTEEFEQKYIDEVLMYNHPLDEEKFRKMCGVCEFDGLIRFPKKGWSSELFTFYSRLNNLKIDDEFVDEEKRQQILKYALDRKNVTFSDLRKLLLLGDEHRFNLCSYREFNPEVEKTVTIDKNKIYNQENKFLLINLNRDVLEEESHQFYEFVKRDAEEYFKKYDKASSYKCYWSDLRKKANIPNDCRFSELKKLYCASKEDVGIKKYLEQFEKDEIFVSFAGYYEIKKTLGELFEKVNTPAVLDDIAEALAYCKTDESRLQYLKMHEITDSELTSKILELNMKDLCSFSRSFLEKINPLMAQGKLFAEAKELAGYNTVDVEKTNIIPAYHGDFENNPTVARIIGQFRKVVNAIVRRPEYGNIDEIHIELATDVANSKEKIARILNKQKQYAEQKNAAVKRCQECGIDPYEGDNLLRFRLAEEQDWKCMYSGKSIIPKKHGSTPVGELSIYDCDIDHIIPISRSFDDSLNNKVLCSREENSQKSNMLPMEYFRNPKLKSEEDLQKFIISVRQNNRIMAAKKGRLLRETYTEEDMKKFISRDLNNTRYASRHIAEWLRKYFDFSSSKCSYIPDVNRVRVLGGGITAKLRHLWGLDKDRDASNKHHAQDAIVIACASFGHIYYICSVLKELEKTGKIRTKHGIPMPWGNFRNDVLAQLDEIFVSKMIRCSATGQLHQQPKKAKDPKRGTLLTRERTNEEFYAPLDSMFRYDIYKRDGHYYCVPIYAVDLAGTSKNPKPFEHKVRPIQKNCPAIADEKDFVFSLYPDCYIEVTNDKNETFCGYISQYVAQSGQFYLDSPNGDYIYEINTSTFEIGEFVKVDNKVYQLTEYDQEKGLLQAVAGDGEILEIKAQIKGDDKDDDTDKEKSKGKEKYKTDVQYIKVDKEKKVSIATFKDLKKYQVGVLGDKHLVKKESQRFTNQVKSNAERHREKMAKRQKKE

SEQ ID NO: 2332 - protein, 971 aa, unidentified
  REGION 1..971: note = Description of Unknown: Cas Enzyme sequence
MSERILGLDIGISSIGWALVDYDKENNLNNKIIKSGVRIFTIAENPKTGESLALPRRLARGARRTTKRKKQRMKAIKYLFVNYLDFSKDDIFAESNIFNSKKQKDVWQLRDKALKRKLTNIEFARVLTHISKRRGYKSNRKVEEEGDKEEKKVLSAIEKNKKLLDGYITIGQAIYQTTKSTHIRRNKKDDYNHSISRDMLVDEINIIFEKQKEFNSDLATQILKEKYLELFLKQKEFSDVVDMVGFCTLEGKNEKRAPKRAYSAEAFVTLTKLINTKLIQEDGKERSFTQNELENLIELCRQTKQPTYSKIRSSIKLDDTTKFKGLDYLQIDKNGEIIDIEKKEKFKNGFIGFHKLREVVEKVLSKTHWQNISNDNELLNDIAKIFSYYKSDEKIEEELNSLEFKSFSKDEKSVIIKGLIKKISFDQFLNLSIKAIDKLLIFMKEGKRYDESVNLVGYKKLDNSKQKFLRALNKDEQLELTNPVVKRALAQVRKVVNALIRKYGQFDKIHIELTREIKKSHDDRRKIQKGQEEYQKEKQNVVDHFIENYGREPKGNELLKFRLWKEQNGYCAYSGYMGKDGYIDPDKLIKDVKYAEIDHILPFSRSLEDGMHNKVLCLAKENQNKKNKTPYEYFNDIDRDWYKYEIFVKDILKNLKKSKRDRLLKKNFDESSQNAFRERNANDTAYMANFIKNFIESNLELKGKGKTVLTRSGTLTSMLRHNWGIGNKSRDNHLHHAVDAIILAFSTGSEVQKLSTLSAKIKEFQYKNSEEKAGLLKFKAPIENFRDEVQNSIDDIFVSFAPRRGVTGAAHKETIYSKKLEKTKGAFEVNGGLAENGEVKRIDIFKKDSKYHFVFLYPSDFLKEKLPNITIKNTLIDNSFEFLFSLFKDEYIEIKQKDKTKVLGYLKFCLSDGRFAICNHIDANFNATKNRYSTGSLEYIKKYQVDPLGYKTEIKKEQRIGTKKQINKKSK

SEQ ID NO: 2333 - protein, 1131 aa, unidentified
  REGION 1..1131: note = Description of Unknown: Cas Enzyme sequence
MNYSLGLDIGTTSCGWSVINLDKKRIEDLGVRIFEGAENPKNGHSLAEPRREKRGMRKRLHRRRIRLNFLKQFFIQQKILSNQQIESLLAPHKNQIDPYAVREKALSEKITPEELFIALYHIAKRRGYKSNSRAESSGDADENKKTLSAITANQVFLKEYQTVGEALNHAEKFKSHKRNKPNDYSNSFARADFEDEIKKILNKQSEFYPVLNEEKIQELLYSENFGVLFQRRFMTPELIEKMRGKCQFEKDKPRAQRASYSFELFRLASDLVHLTYNMGNKLTIDEIAACIEKAKELSVLKYSHIQKILAEDVEDEINFDYIRGLKRKDLIKDEAEAKKKALEQKFGELKFYHAIKKALKDQPAEWKDIESNIELFDNIGFVLTANKEDDSVREELKKLGLKPSVINGISNIKQSFAGFGHLSLKALRKITPFILQGETYDKAVVDAGYIFTAKISGNSNRLPALSKEENNQITNPVVKRAISQSIKVVNAIILKYGAPTRIHIECASELAKSYDKRNEIIKTQDENRENNEKIIARLKEEFHVLSPTATQITKFKLYEQQDGKCLYSGSPIDLNRLFSDEHYCEIDHIIPISRCGNDGMINKVLVLNQENQEKRNQTPFEAWGSDEKRWQSFVARVESNPKIFAKKRARLLAKTPPKEDWNVRALNDTRYITRFLANYFKQNLKFADHTDGKKVVYTPTGNITSYLRHVWHIGKKDRSKNLHHAVDAVITALVTDEVVRQCALMNKMIELGAKYKTKGINLADYQNGMLAATDPVTGEVVDLAKYEEVRESVLPWPNFDHEVRFRTTPLACFITEDKEDKKKSESGQLSEEAKTHLQNASVNTLAEWRDQFREIYKDQDEEFRSSIHPIFVSRMPKRKGTGSLHDDTIRSPKGILIDEKTGIVSANPNRSSFIRKRLQDVKIADLEKSILKQSDKLLYQQLENLLEANGDDPKKAFKEPVYKNNVKFDKNGRPLSPVTTIKINDDKSVKSGISLNHGTQFVNNGSMVRLDVYQKDIKGEKKLFYVPIYTHQVRKGSNRILPTTCGYNFADNTFTKLCSVYPNDYLIMKKGDEILQGYYIKYNVNNSAISYTSNIKEGRSDFVNATGRALSELYRLDISVLGDNYPWERMY

SEQ ID NO: 2334 - protein, 1096 aa, unidentified
  REGION 1..1096: note = Description of Unknown: Cas Enzyme sequence
MKYSLGLDIGTTSVGWAVINEDKQRIEDLGVRIFERPENPKNGESLAKPRRDARSARRRLRRRRQRLDYLKRFFVEHRLLSEDQISDLLTYDKVHTHKDPYTLRSKAIKEKVTSDELFVALYHIAKRRGYKSNRKSVEEKDKESGKVLQAIKANQPLLAQHNQSVAIALLEEEKFTKHKRNKDSDYNNSFIRADFEAEILAILRTQGWDEAWIKELLYANPVSEETEGKSGLFYQRPFMNEDLIRRMRGKCQYEDAPRAHKASYSFDLFRVAQDLAHLEYNNGEKLTPEQIQSCIEVFKEIKEPSYATIRKILDYAKDDNSFHFDYIRGKEEKGEANKFGGLKFYHLVKTALKDLPEDWSKVEKDVDLFDKIGEILTLNKDDDSLKNAFKELNISNQAKKQLITINVSGFCHLSIKALRKLTPYIMEGGTYDKAVELAYPGEFTEKLSGDKNELPPLSEEQLNQLTNPVVKRAVSQTRKVINAIIKKHGAPYQIKIECATDLAKNFKDRKEIEKQQKENAEYNAMVKTKLEELGIPNPIGQQIIKYKLREQQNCKCIYCGASLGTDVFTDEKLAEIDHIIPFSICGNDGIQNKVLTCAKCNQEKKNHIPFDVWGSDLARWQTIVMRSNDQKIPSQKRNRILCEKPPKEGWNERALNDTRYMSKFMTRYIKSNLQFAESEKGKQKVLAPTGFITSYLRKMYGIGSKDRDLNNCHHAVDACIIATISQGQIKKVSEWNKYKELGAKYQTITLENDNGDMYQITQGDYAAQREMLPPWENFAQEVRARSGMLHDTKKIEKLSNFRDRFRQFKSYDEEFLQTIHPLFVSRMPKHSTKGQVHEETIRGPKVKDSGMRLCRKKLNKEFAKNYIKDPSKSWLENSILVESDKVLYEQLKQLLKEKGEHAFEEPIYKNNKKVDKNGCPLSPVRTVKVYEKKPDTSGVYLNGHTQFADNGKTVCLNIYRRKDKTGNCKFFAAPLYAHSLGKQAIPILPTPTGRSSEEKAELTKLRNADGLIMAAPENGFELVAQAFPNDYVKITYVDHITEGYYTKYGVASGTLSLMFHSQTSKGDMGLIHCSVSSAVNVEVQNISVLGDNYKFE

SEQ ID NO: 2335 - protein, 1096 aa, unidentified
  REGION 1..1096: note = Description of Unknown: Cas Enzyme sequence
MKYSLGLDIGTTSIGWAVVNEDKQRIEDLGVRIFERPENPKNGESLAKPRRDARSTRRRLKRRRQRLDYLKRFFIEHQLLSKGQVSDLLSYNKTYTYKDPYALRGKAIKEKVANDELFVALYHIAKRRGYKSNRKSIEEKDKESGKVLRAIKANQLFLAQYDGSIAAALLKEERFAKHKRNRDGNYDNSFIRADFETEILAILHTQGWSENWVNELLYANPTAEETKGKSGLFYQRPFMNEDLIRKMRGKCQYEDAPRAHKASYSFDLFRVAQDLAHLEYNDGEKLTPEQIRSCVEVFKKTKEPSYTTIRKALGYGKDDDSFHFDYIRGKEEKGEANRFGGLKFYHLVKTALKDLPKDWSKVEQDVDLFDKIGEILTLNKDDSSLEKAFKGLNLSDKAKTQLITINVSGFCHLSIRALRKLTPHIMEGNTYDKAVELAYPGKFTEKLSGDKNELPPLSEDQLNQLTNPVVKRAVSQTRKVINAIIKKHGAPYQIKVECATDLAKNFKDRKEIERQQKENAERNAIIKAKLEELGISNPTGQQIIKYKLYEQQNCKCMYCGSPLGTDIFTDEKLAEIDHIIPFSICGNDGIQNKVLTCTKCNQEKKNRIPFSVWGSDPVRWQTVVMLSNDQKIPFQKRNRILCEKPPKEAWNERALNDTRYMSRFITRYIKRNLQFAESEKGKQKVLAPTGFITSYLRKIYGIGSKDRDLNNCHHAVDACIIATVSQEQIKKVSEWNKYKELGAKYHTITLENDNGDTYQITQGDYAAQREMLPPWENFAQEVCARSGMLHDTGEIEKLSDFRDRFRQFKSYDEEFLQRIHPLFVSRMPKRSVKGQVHEETIRSPKTKDGGMRLCRKKLDKEFAKNYVKSPPKSWLENSVLIESDKPLYMQLKKLLEEKGEHAFDEDVYKNNKKVDKNGHLLSPVRTVKVYEKKPDTSGVYLNNHTQFADNGKTVCLNIYRRKDKTGKYKFFAAPLYAHSLSKKAIPILPTPTGRSSEEKAELAKLRNLDGLIMATPENGFELAAQVFPNDYIKIIYVDHTTEGYYAKYGVAGGTLSLMHHNQTSKDNMDLIHCSVSSAANVEVQNISILGDNFKFE

SEQ ID NO: 2336 - protein, 969 aa, unidentified
  REGION 1..969: note = Description of Unknown: Cas Enzyme sequence
VWEARIKGLDQQLSGKEWSKILINLCKRRGFKSNRKNESKDKEAGQIISSINNNIEKMKEANARTVGEFIYNEVMNSEDKYRPLRNKFGEYNMCVSRNMIREEIHMLFEKQREFGSEFATDEIEDDYLNIFNSQRPYANFEDLEKLVGFCTFEKKKYKRAPKNCISAEEFVLYENLNKLSIIKNGDGRKLTQEERILIADEAFKKKEIKYTHLRTLLNLKEEELFSTLTYSIDKDKSKTENTKFISLKGYHEIRKSIEHGVSKEYWEEIKTNRKMLNDIAYVLTLGKTDEDIKRQLKLRNISNEKVIQSLLDISFSKFNNLSIEAIDKILPFMKKGYQYNEACEMAGYDFKAIYKGVRSKKLPVIEIDEIVNPVVNRALAQTRKVINSVIERYGSPVRINIELARDLAKNFKDRKAIEKEQKENRNNVNKIREEIKSLMGKEPTGSEILKYRLWEQQKGECAYTQRPIYIEKLFGYGDCEIDHIIPFSRSFDNSLSNKVLVLGVENQRKGNRTPYEYFGEDEERWNRFQTWVNGSHLNYKKKVNLLKKKFTQEEQNQWKARNLQDTKYICKYIANYINNRLEFKESDSKQKVITVNGSATAYLRGKWGLSKIREDGDKHHALDATVVAVTTQSMIQKISRYNKAHELRYIRANEDFVDVETGEAVELQKYRDELKEILPRPWRGFSEELMMRLSENPIGKLQKSPIESYDLDFIQNTVKPIFISRVPFRKIGGKLFGETIYSSKGFKGEYFVKKKNLDELKKEDLNNFYNYNCDKRLYDAIIDRMEKFDYNAKKAFESEFRKPTKSGEKGPIVRSVKIKTKVPFKNGIELENVKGLVAKDGIVRIDIYEKEEKYFAVPVYRYQLAQRIIPKKAALAKKSEEEWPIMDESYKFKFSIYKNDLIEIRYKTKGGYFGYFDGFDINSAGITIENHDGSERYRGIGIKSGVLEFNKYEVDVLGKYYKVKVGDRS

SEQ ID NO: 2337 - protein, 1130 aa, unidentified
  REGION 1..1130: note = Description of Unknown: Cas Enzyme sequence
MKYSIGLDIGITSCGWSVINLDKKRIEDLGVRIFNAAEDPQRHTSLALPRREKRSSRRRFHRRRARLNYLKQFFIELNLLDESKITQLLTPHKGQLNPYILREKALKEKLSTDKLFIALYHIAKRRGYKSNHRAESGSDENENKKTLHAISENQKLLIDYQTVAKALNQNEKFAAHKRNKPNNYSNSFARADFESEITTILNKQAEFYPELTEEKINDLLYRQNYGLFFQRPFMSPELIAKMRGNCQFEKDAPRAQKASVSFEIFRLASDLVHLTYNNGQKLTPEEVAMCIEKAKDVVTFKYSHIAKILNQTHPEEIIFDYVRGLKKKDLNSDTDEAKKKTLNQKFSELKFYHAIKKALADLPEEWQKLEKNLELFNEIGFILTANKEDESVIKHLEELDLSKQAIENIASIKQNFTGFCHLSILALDKITPHILEGNTYDKAVVLAGYNFNDKLSGDQNRLPALTEEESQQITNPVTKRAVSQTIKVVNAIIRKYGAPTRLHIECASELAKSYDKRHQIEDNQKDNQATNQKIVDILKNEYHIVTPNYLQITKYKLYLEQDGKCLYSNQPIDLDRLFTDEYYCEIDHIIPKSRCGNDGLINKALVFNRENQEKRNQTPFEAWGGDTKRWQQFKTNVQSNLKIHPRKKLRLLAEVPPKEDWNSRALNDTRYITRFLSNYFKQHLKFSEDSHSKKKVFTPTGGITSYLRRIWHVGSKDRSGNLHHAVDATIIALVTEDIIKQCALMNKYIELGANYATKGINLSKFHHDIHSVINPVTGEVIDLARYEKIKEEVLPWPNFDTELRFRATPLAIFVNELPKDKKESRPELTESAKLQQKNKSINTLAEWRDQFREIYKDQDELFKNSIHPIFVSRMPKRKGTGSLHQDTVRSPKGIIVDPKTQKITANPNHSSYIRTNLENIKLADLENSIIKTDDKSLYQQLKQLLEENDNDPKKAFKEPVYKNNIKVDKNGKPLSPVRTIKLIDDKNVKSGILLSRGTQFVNNGSMVRVDIYQKEVKGKNQLFYVPIYTHQVKKGSTRILPTTCGYDYVDETFKKLFSLYPNDYIVMKKDENISQGYYIGYDTAVSSISYISNLISGNSNFNRITGRSLSSIYRLDISILGDNYPWEKLY

SEQ ID NO: 2338 - protein, 1046 aa, unidentified
  REGION 1..1046: note = Description of Unknown: Cas Enzyme sequence
MKYSLGLDIGITSVGWAVLNLDKKRVEALGVRGFNAAEDPKTWASLALPRRLARSARRRLRRRAGRLRRARDLFIKYELIQAQEIKSAFETVLGQPSPWELRAEGLDRLLTGQEFARALFHIIKRRGFKSNRKAAKSSEDGKMIAGIEANRERMREKGFRTAGEMYWSDPFFDLRKRNTTDSYINTVDRGLLEEEIKTLFKRQRELGSVFTKHEFENAILEVFSWQKPYVSGDDIIRMVGTCTFEPNELRAPRYSYHAERFLLLQKINSTTYSTNGDKERFTPEQRKVIEGLAYKNVRVTYAQIRKALDLPEEARFAGLTYLRRPEKKAELVESLECENTVFFELKGYHSIQNACSVDGMWDRVKQNPELMDNLATALTFYKTDEDIEEWLTERGVEKEIINAVSGCEFTKTANLSLVAIKKILPHLEEGLHYSEACAKAGYNHTGLSGEKKKDKLPSIPVDMIRNPVVLRALSQARKVVNAVINRYGSPYAIHIEFARDMGKSADKRKEEERRQRENLKEREELEEQFRETFDGREPNGTDMLKWRLYREQRGCCAYSLQPIDLNRLCEPGYVEVDHILPYSRSFDNSRANKVLVLISENRNKLNRTPYEYFGHNEKRWSEYEGWVRTTIRDPRKRGNLLRESFEERQEVEWKDRNLNDTRYVAREFAGFIRANLLFADPDNKLPLVCINGQVVAQARWLWGLYKDRDENDLHHAQDAAVIAALLPYQIKMITEYSKVVETRRNHIDPETGEIIEWKENERPRLPEPWKGFRKEVVEKLGSILVSRMPQRKVSGAIHADTIRSAKHISTDRVSVVKKPLNSLSENDLKNLFDTEHNKLLYSAIRQRMAEFDNKAQKAFAEPLFKPLRDGSPGPMVRSVKVCQAQYTGVNVRGGIADNGDMVRTDVFRKQNKKGKWEYYLIPVYTVDMISGKLPDKAIAAHKPYNEWPVIDNEYEFLFTLYPYDLIRVETKDGGGLYYYRSSHRANGSLIVCNVNKADTTFGIGSRTAISIEKLEMGVLGDYFPVHKEIRRGLENGSHLEPDKIES

SEQ ID NO: 2339 - protein, 1045 aa, unidentified
  REGION 1..1045: note = Description of Unknown: Cas Enzyme sequence
MKYTLGLDIGITSVGWAVLNLDDRHVEDMGVRAFNAAENPKTRASLAAPRREARCARRRLRRRAGRLRRAKDLFVKHGLVAADRREAAFLQPDHEQTPWKLRAEGLDRLLSGEEFARALFHIIKRRGFKSNRKKVKKADDGKMLAGIGENTRRMDEYGYRTAGEMYWRDSKFEVRKRNTTDSYLNTVDRPLLEKEIAELFDRQRGLGSEFAATEFEQAIVDVFLWQKPYASGDDIIKMIGYCTFEKTELRAPRNSYHAERCMLLQKVNSLTYWLDGDRPRLDSEQRSVVQGMAYDQAKVTYAQVRKAVGLSDDARFAGLTYTAKPGKDGEPPSPLACESATFCELKGYHALRRACSGDGLWDRVKTDPDLMDHLASALTFYKTDDDIRAYLIERGVEEAVIEAVDECEFAKTSNLSLVAIKKIIPHLERGLLYNEACAEAGYNHSGAGGGPKQAKLPVISVESVRNPVVLRALTQARKVVNAVIDRYGSPYAVRIEFAREMGKSAEKRREIEKRQKENANERAEVAEQFRELFNREAKGGDVLKWRLYREQEGKCAYSMRPIELDRLFESGYAEVDHILPYSRSFDDTRANKALVLTAENRNKLNRTPFECFGHTPRWAEYEAWVKATIRDPRKRANLLRESFDERQEKEFKDRNLVDTSYIAREFASFVRDSLLFADSDNKLPLQCVNGRVTAQARWLWGLHKDREENDLHHAQDAAVIAALLPHQVKLLTEYSKVTETGQTYVDLETGEVIEHEKPRLPHPWPGFRKEVLGKLPDIMVSRMPQHKAGGALHEDTIRSTKALATQGVSTVKKRLTSLSENDLANLFDPEHNERLYAAIRTRMAEHSNKAEKAFAEPLHKPLRDGSPGPEVKSVKVCQTQNTGVKVRSGIADNGGIVRTDVFRKPNRKGQWEYYLIPVYSADCAVYRKTGSLPDRAIAAGKSEDEWPVVDESFDFLFSLQPYDLVRIAARSEDRLYYYKGAHRGKGALKVSLPNRNAEVWDVGVRTAERIEKFAVGVLGEYHPVRKEVRLGLANGGDIESGEAEG

SEQ ID NO: 2340 - protein, 1073 aa, unidentified
  REGION 1..1073: note = Description of Unknown: Cas Enzyme sequence
MRYSIGLDIGIASVGFAVMELDEDDSPISVVRVGSRVFDVAENPKDGASLALPRREARGARRRVRRRKHRKDRIRNLIINHGVLSKDQLETLYKNQLSDIYQIRKEALERLITNEELARILIHLAQRRGFKSNRKTAAGSKEDGVLLKAVEQNKTEMEKHGYRTVGEMLFSDERYKKNHKRNKGENYLNTVSRDMVEDELRKIFTQQREKGNTSCSQALEDAYLKILLSQRSFEEGPGSGPYAGNQIEKMLGNCTFELEEKRAAKSSYSFEHFELLQKISHIRLDIDGKTMPLTGEQRLKLIELAHSVEKLNFLRIRKELGIPENASFNSVRKHEKDVEKAEKKEELNCLKAYHQMRRALDKVKKGRIHDLSVKERNEIGRIFSLYKNDERLRDELAQAGIEQLDINALLENLGSFSKFGHLSVKALDNIIPFLEEGCNYNMACEKAGYDFKGHASAKKRSTIDLKHLAEEAENKVTSPVAKRVVSQCAKVINALIRDEMKGESPVYINIELAREMSKDHKERVEMDKGMRENAAHNERLKEKIKEYNRPNPTGLDIVKLKLYEQQGGICLYSQSQLDITRLFEPGYADIDHIVPYSISFDDSYKNKVLVRSDENRQKGNKLPLQYLSGEQRDKFTVWINNTHLPPAKKRLLLKEEITEEDREGFKERNLQDTKTMTSFIYNYLSDHLAFAPFSSERKRYVTAVNGSVTSMLRGRWGLTKVRADGDTHHAVDAAVIACTTQGMVNKFSGYYRRKEQLFTDKDGKEYEVSKKTGELKERFPEPFENFSGKLMAKLSDVFVSRMPSRKVGGAAHKETIKGVGDDNTAIKKVALTSLKLDKNNEIENYHNPNDDRLLYNALRQRLIDFDGNAADAFKDPFYKPKSDKPKDDEQPPSLVKKVKICEKNTLNVPVHKGRGVADNDSMVRVDVFHIEGDGYYLVPIYVADTLKDTLPNKAIVAAKPYSDWKEMSDDNFAFSLYPNDLIYVKSKKPMTFSKVRKESKLADKMEQDGAFVYYKGTGIAGGQMTVIYHDNSYTIQSLGSKTLQVFEKYQVDVLGNISKVGREKRQGFTRREA

SEQ ID NO: 2341 - protein, 1070 aa, unidentified
  REGION 1..1070: note = Description of Unknown: Cas Enzyme sequence
MRYSIGLDIGIASVGFAVMELDHEDLPSKIIRIGSRVFDVAENPKDGASLAEPRREARSMRRRLRRKSHRKARIRNLILGQNILSQDALDSLFNSIDLCIYQLRAEALDRIITNEELARILIHLSQRRGFKSNRKAEDAKKEGALLKAIAANEAIMKEKNYRTVGELFYRDEAYSKTKRNKGENYQNTITRDMIEVEARTVFLHQRDLGNTVCSESLEEEYLKILLSQRSFDEGPGKLSDGTPNPYAKGIEGMVGECTFEKDEPRAPKASYSFERFELLQKVNHIRLDIDGKTVPLTVEQRHKLIELAHSTFAPTYARIRKELTIPENARFNSIRKYENDVDAAEKAEKFNCLKNFHEMRKTLDKVSKGRIASISTEKRNEIGRIFSLYKSEDKIRDAFAATNIDIEPLDVETLINNLDSFSKFGHLSVKALDKIIPFLEEGLNYNEACEKAGYDFKGMSSDGASTLISLEKLAESTENTITSNVAKRTISQCAKVINAIIREMDRVSPVYINIELAREMSKPHKERVKDDKDNRENSAYNERIKNELSETDGLLNPKGLDIVRLKLWKQQDGRCAYSNTSIPRERLFQPGGADIDHIVPYSISFDDTYNNKVLVQVHENRQKGDRLPLQYLTGKRRDDFIVWVENSTLRKEKKDRLLKAEITEDDRNRFKERNLQDTKTISSFMYRYLSEYLEFAPSENRVRRVTAVNGRVTSMLRSRWGLNKVREDGDMHHAFDAAVIACTTQGMINRLSGYYGRRETLYTSDDGTEYTISKKTGEIKERFPQPYNNFSNELIGKLSKDVFVSRMPSRKVSGAAHKETIKGIGDDGSPIKKVPLTALKLKDGEIEGYYNPGDDRLLYDALKNRLMQFDGKADKAFEEPFYKPKSDGSKGPLVKKVKIVEKSTLNVLVHKAKGAADNDSMVRVDVFHIEGDGYYLVPIYVADTVKDVLPNKAIVAYKPYKEWKEMEEKDFLFSLYPNDLIHIKARRPMSFSKVNKESKLPEKIEKEEEFVYYKGADIATGSITVINHDNSYKTRPGTKTLSIFEKYQVDVLGNTSKVGRETRQGFRKGR

SEQ ID NO: 2342 - protein, 1101 aa, unidentified
  REGION 1..1101: note = Description of Unknown: Cas Enzyme sequence
MKYSIGLDIGTTSIGWAIIDEDNKRIEKVGVRIFEKPENPKDGKSLSETRRTARSTRRRLKRRRQRLNFIKRFFRDNNLLTKEQIEELLKPENKLDPYKIREKALNEKISNDELFVGLYHIAKRRGYKSNRKSAEENDKENSKVLSAISKNEKLLKEYKTVASALNSNEKFIAHKRNKAEDYSNSFVRANFEDEAKLILKIQKEFGLKLSDEKINFLLFGNEKEGNFNGIFSQRPFMTSELIMKMRGKCSFEKSEFRAPKASYSFEMFRLAENLAHLRVVINNEERNLTEEEISKVIEKAKDIKVLKYQHIREVLGYKKDENFSFPVNMIRGEIKKDSKNNGEENKFGELSFYHKVKAALSNTPEDWQKVCDNNYRMLDEFGEILSCNKDDENLRKEISKLNLSEDAVEVLMMINVSGFGHLSFKALRKILPFLLKGDTYRNASENAGYDTKQQLSGDKNKLPPLSKEESAQITNPVVKRAVSQTIKVVNAIIREYGAPYQIKIEAAGDLAKNFKEREKIKKTQKANASYNESIKERLQNEFNVPSPTGLQITKFKLYEQQNGKCVYSGKSLVLENLFSNEHYAEIDHVIPFSRCGNDSLMNKVLVFTEENRQKGNLTPFEAWGANESRWANFEARINSMNLPFRKKERLLAKVPPKEDWNSRALNDTRYISKFLSQYLRKNLKFAKIENENPAQRVIVPNGSITSYLRRIWRVGSKDREENNLHHATDACIIAAIDQSVIQKISRLNKYFELFKYSAEDEVIDKITGEISSRADFEQTFEDIEPWRDFGKEVRKRTAHYESPMELRNELIGLENYDEEFRNKTTPIFVSRMPKRLGKGSINKETIRSPKIVEGYVDSKGKPAIARKQRVRLTSVDLKTLYDSPVRETDPALYKILKARLDEFDNKPEKAFGDPSNPVYKPTKNGSLGNIVRSIKVYDTQNSKSGFLINEGKAFVNNGDTIRLDVFKRKNYKGEFEYYFSPIYAHLLNTKKVEILPTPNGRSAAEKADFNKIRDENGKIFAAEENGFVKQFSLYPNDYVRIYAGNKIVEGYYVGYDIDSGRVSLIGHDKADKKNTDRISGGTITFIERYDISILGDNYRWI

SEQ ID NO: 2343 - protein, 1146 aa, unidentified
  REGION 1..1146: note = Description of Unknown: Cas Enzyme sequence
MTQKYSYSPKKYSLGLDIGTSSIGWAVLDLDKERIHDLGVRIFEKPEDPQNGDSLAKPRRDARSARRRLKRRRQRLNNLKQFFIDQNILTRDRIEEVLSDKSEFNKLDVYALRSQALTEELSPEELLKVMYQIAKRRGFKSNRKVEEESEKEGGRVSKALKTNEKFLAENGYKTVGETLSRDENFASHKRNKRDDYTNSFSRSDFLHELEKIIEVQKRYALKNVSDTAINEMLYGLDDDKNVVNVSAIMYQRPFITEELIKKMVGNCTFEENEKRAPRASYSFEIFRLASDLSHLVFIPRDASKRQAKRENLEIRLSSEQINKVIEAAKNQKSLTYKKVRSIAEISEDYVPKYTHGKKKDGDEFGEGNAFGGLKAYHDIKTALKNLPEDWAKIDNESTINQIDYILTTQKSDEGIKAELNALPISDDARNAIVKIKATNFGSFCHLSIKALQKITPHILNGMTYDKACEAAGYDFKKQSASLEQITNPVVKRAISQTLKVVRAIERKYGKPYFIKVETARDLAKNFKERNAIKKENEENQGYNEDIKSIIADGYEASPKTKGGKQLLSHLKELNVPLNKNADFNGQQIIKVKLYREQNGICPYSGKPIDFDTMLQDDNAYQIDHIVPFSRSNNDGITNKVLVLTEENQKKSNKTPFEYFGADENRWKEFVARVESIYKTRDIKTDDKATNAINYKYNGYAMKKKQNLLLQDYKNDSWNVRALNDTRYITRFIQNYLSQNVDFAEGEERQRVIAPNGTTTAYLRKRWGLANKDRSEDVLHHAKDAAVVAAIDQKIIMQANLHAKRHEIKELLVAAKTMEEKTDKLTGEIIDEDEFNKAQRRKNAMLVLSSKHFPQPWDDFGKEVMKRTLNVDIKTLQNELRGLDSYDEEFRLNVKPIFVSRMPRRKATGSAHKETIRSPKVKDGDQRTVRMPLKKVKRKDVENSTLKESDKWLYKKLLERLDTCDDNPEKAFAEPIYKNDKKTDKNGNKLSPVSTIKVYSTQPSGFYINDDKAFVNNGSMVRLDVYQKPDKKGKIEHFFVPVYAHQVGKNKPAPTKILPAPKGFTDVDETFTKICSLYPNDYVRCYFGDKIKEGYYVKYGSASGQMILLSHASASKDNGTYLTCSARSATLIERYDIAILGDNYRWL

SEQ ID NO: 2344 - protein, 1153 aa, unidentified
  REGION 1..1153: note = Description of Unknown: Cas Enzyme sequence
MKPSKYSLGLDIGTTSVGWAVIDLEKERIHDLGVRIFERPEDPQNGDSLAKPRRDARSARHRLKRRRQRLNYLKRFFVNEKILTQAQIAEILDPKSTYNKLDAYALRDKALNHKLTAEELFKVLYQISKRRGFKSNRKSVEETDREGGRVSKALTINEQLLAERGYKTVGQALAQDEKYTEHKRNKRDSYTNSFARADFIHELEEIIKSQRKYALNNVGDEALHSLIYGVDSDGLLTNSSAIMYQRPFMTEELIKKMVGECTFEKGEKRAPRASYSFEIFQFANNLVNLVFVPKNTNSRQAKREHFRLTLNPEQIAAVVTEAKKTASITYKKVRQVAGISEEYAPGYVRGKINKDDPYGEKNEFGKLKAYHDIKKALKSTPEDWVKVDNESTLNEIAYILTTEREDVEILKKLSGLALSDEATYAILKINPKNFRSFGHLSIKALQKITPHILSGLTYDKACEKAGYDFRRKSANLEQITNPVVKRAISQTNKIVQAVIRKYGKPYFIKVETARDLAKNFKDRKAIENENKDNQAFNSEIKEIIEHGYNIKPKTKRGKNLLEFLRENNVPLSQNIDANGQMITKVKLYREQNGKCLYSGDPIDFQAMIHDDNAYQIDHIVPFSRSNNDGLTNKVLVKTEENQEKANRTPFEYFGGDETRWKQFAARVNATYQTRDIKTSDKAINSENYKFNGYAMRKKQNLLIEEYKNDSWNTRALNDTRYITRFVQNYLRQTVSFAEGDDKQRVLAPNGTITSYLRKRWGLSKVREENVLHHAADAAIVAAIDNRIICQANLFSRDQELKLYTQTIKSIEEKKRILLKSTDQETGEITEEDQFSQAQREKAELEYIKQSMDENSKHRFPEPWADFAKEIRKRTLDTDTETLRNELYGLEGYDDEFRSQVRPIFVSRMPRRKAAAQAHKETIRSPRVKDNDQRTVRIPLSKIKIKDVENSVLKESDAWLYSKLISLLEANDNNPEKAFAEPVYKNDKKFDKHRKPLMPVSTIKVYSTQPSGFLVNKGRAFVNNGSMIRLDVYQKQNQKGRIEHFFVPVYAHQVGKNQSTPTKILPAPKGFADVDETFTKVCSLYPNDYVRCYFKNTIEEGYYLAYDSASGRITVLNHSAANKEGDNRVRISPRSATLIKRYDISILGDNAPRS

SEQ ID NO: 2345 - protein, 1159 aa, unidentified
  REGION 1..1159: note = Description of Unknown: Cas Enzyme sequence
MTQKYSYSPKKYSLGLDIGTSSIGWAVLDLDKERIHDLGVRIFERPEDPQNGDSLAKPRRDARSARRRLKRRRQRLNNLKQFFIDQNILTRDRIEEVLSDKSEFNKLDVYALRSKALTEELSPEELLKVMYQIAKRRGFKSNRKVEEESEKEGGRVSKALKTNEKFLAENGYKTVGEALSHDENFASHKRNKRDDYTNSFSRDDFLHELEKIIEVQKSYALKSVSDTAINEMLYGLDDDKNVVNVSAIMYQRPFMTEELIKKMVGNCTFEENEKRAPRASYSFEIFRLASDLSHLVFIPRDASKRQAKRENLEIRLSSDQINKVIEAAKNQKSLTYKKVRSIAGISEDYVPKYTHGKKKDGDEFGEGNVFGGLKAYSDIKAALKNLPEDWAKIDNEPTINQIAYILTTQKSDEGIKTELNALPISDDAKNAIIKIKATNFGSFCHLSIKALQKITPHILNGMTYDKACEAAGYDFKKQSASLEQITNPVVKRAISQTLKVVRAIERKYGKPYFIKVETARDLAKNFKERNAIKKENEENQGYNEDIKSIIADGYEASPKTKGGKQLLSHLKELSVPLNKNADFNGQQIIKVKLYREQNGICPYSGKPIDFDTMLQDDNAYQIDHIVPFSRSNNDGITNKVLVLTEENQKKSNKTPFEYFGADENRWKEFVARVESIYKTRDIKTDDKATNAINYKYNGYAMKKKQNLLLQDYKNDSWNVRALNDTRYITRFIQNYLSQNVDFAGDKGKQHVIAPNGTTTAYLRKRWGLAKDRSEDVLHHAKDAAVVAAISPKIVYQANLFSKEQEMKLYLNNAKTIDEKRQILLQSTDENTGEITDEAAFTQTQKDLAQAEYFKLRSDEETKNRFPGPWTDFSKEIRKRSLNADIATLQNELRGLDNYDEEFRLSVKPIFVSRMPRRKATGSAHKETIRSPKVKDGDQRTVRMPLKKVKRKDVENSTLKESDKWLYKKLLERLDACDDNPEKAFAEPIYKNDKKTDKNGNKLSPVSTIKVYSTQPSGFYINDDKAFVNNGSMVRLDVYQKPDKKGKIEHFFVPVYTHQVGKNKPAPTKILPAPKGFTDVDETFTKICSLYPNDYVRCYFGNEIKEGYYVKYGINNGAMQVISHSSAGKDKDQLIQISPRSANLIERYDISILGDNYRWL

SEQ ID NO: 2346 - protein, 1167 aa, unidentified
  REGION 1..1167: note = Description of Unknown: Cas Enzyme sequence
MTQKSSYSPKKYSLGLDIGTSSIGWAVLDLDKERIHDLGVRIFSGQIENKKRRQFSSAQRMNKRKKQRLKHLKAVFINNGLLSPGEIKLALKDQEITENIYSLRAKAVTQQISNRELFRVLYLIAKKRGFKSNRKSDPNDNESSGTKFKEQLAKNSATAEKYKTIGLMLENDPAYTNRKRNSKDNYIATFQREDIRKEVEIILHKQFEKKLSTTQTSNEYKKIIEAILDEIIIDSSGEKQYLGIFTQRPYTNASLIEKMTGFCEFEKTERRYVKASYTAEEYTFLSALSNIVILDTNKNDERFRLNEEDLEQLLELAKQEKNIKYSDIRKSLSLDESICFSSRAIEDTYQDSIKHANKKHSSPQNKEMLTEALETARKIRDRSRKNIERQKICEKGLETFCIFKKLFKDSMLGQRIEENPYLLDDIAYILTVNIDDESIKTNLQQLDFLSDHDISVIMNMPNDDLKHFSGRSNLSRLAMQNIIKYLKEGYQSHLAIQKAGYDTKEIYQGNNITLPSLKLSDFSQDGDETFEKYGINSKVAQRALSQSIKLINAIIKKYGSPTYVRVELAREFAKTEEEREKIERNNKRNREKNRKYEEIINQIFKDNHKLPPSKIGHIIRKLTLRDQQNCKDIYSGDHIDVTTLVLDESAYEIDHIIPRSKRFINDMNNLVLTSTKNNREKSNQLPLAYISDPTKQKEFLERVNLIKDKQKRKNLQLDSCEDQDNMTERALNDTKHIARFFKNYIQRNLLFAGDDEENGRQRVFAIPGPVTAYLRARWGFDQKDRDANALHHAIDACVIVATTPKLLNRVMYHESHREQGKLYSERQAAKQDTGDFGMQAYLQAKKMYYDSLDRVSGEIIDPHKHNVAYKIMQEHEKRYRYSFPRPWTDFMREVSLRAGDIDKKTLQNKLVEINNYDDEFRRILHPIFISHMRYGKTRGSGHGEQIYKKPYKDDSRIIQHKSIYDISPDDIDNSPIAISDRKLYELLKDAFSKIELKVNQSEKDKRIDKNTVIYKPSKNPDKSPVVKRIPVYIDKTPIQHDVRGGAVLNEKGTVAYSILCQSSTTGHYKVVPVYFRQIHANENIELEEGWKYISRIVPNDFVVIIKKDGSKISGYYKTRKGDTLISILPHQHSDSSRAISQRIGTAKEIRIYNISVLGDNAPEEEYK

SEQ ID NO: 2347 - protein, 1167 aa, unidentified
  REGION 1..1167: note = Description of Unknown: Cas Enzyme sequence
MAQKSSYSPKRYSLGLDIGTSSVGWAVLDLDKERIHDLGVRVFSGQIENKRRRQFSSAQRINKRKKQRLKHLKAVFINNGLLSSDEINLALKDQRVTENIYSLRAKAATQQISHRELFRVLYLIAKKRGFKSNRKSDPNDSDSSDTKFKKQLAKNSATAKKYQTIGLMLENDPVYANQKHNSKDNYIATFQREDIRKEVEIILNKQFEKELNAPQTSDKYRNIIEAILDETTVDDNGEKQYLGMFTQRPYTNASLIEKMTGFCEFEKTERRYVKASYTTEEYVFLSNLSNIVILDTKNNDERYYIGKDDIGRLLALAKQEKNIKCSDVRKVLSLDKSICFSSRAIEDTYRDSIKHANKKYSAPQNKEKLAEALETARKIRDRSRKSIERQKVCEKGLETFSIFKRLFKDSVLEQKIDENPYLLDDIAYILTVNIDDESIKTNLQQLEFLSDHDISVIMNMPTDDLRHFSGRSNLSHLAMQNIIKYLKEGYQSHLAIQKAGYDTKEIYQGNNITLPPLKLSDFSQDGDETFEKYGINSRVTQRALSQSIKLINAIIKKYGSPTYVRVELAREFAKTEEEREKIERNNKRNREKNRKYEEIINQIFKDNHKLPPSKIGHIIRKLTLRDQQNCKDIYSGDHIDVTTLVLDESAYEIDHIIPRSKRFINDMNNLVLTSTKNNREKSNQLPLAYISDPTKQKEFLERVNLIKDKQKRKNLRLDSCEDQDNMTERALNDTKHIARFFKNYIQRNLLFAGDDEENGRQRVFAIPGPVTAYLRARWGFDQKDRDANALHHAIDACVIVATMPKLLNRVMYHESHREQGKLYSERQSAEQDTGDFGMQAYLRAKKMYHDSIDNVSGEIIDPHKHNVAYKIMQEHEKRYRYSFPRPWTDFMREVSLRAGDIDKKTLQNKLVEINNYDDEFRRTLHPIFISHMRYGKTRGSGHGEQIYKKPYKDDSRIIQHKSIYEISPDDIESSPIATSDRKLYELLKDTFSKIELKGNQSEKNKRIDKNTVIYKPSKNPDRSPVVKRIPVYVDKTPIPHDVRGGAVLNEKGTVAYSILCQNSTTGHYKVAPVYFRQIHANKKTELGEGWKYISRIVPNDFVVIIKKDGSKISGYYKTRKGDTLISILPHQHSDSSKAVSQRIGTAKEIHIYNISALGDNAPEEEYK

SEQ ID NO: 2348 - protein, 1118 aa, unidentified
  REGION 1..1118: note = Description of Unknown: Cas Enzyme sequence
MAQKSSYSPKRYSLGLDIGTSSVGWAVLDLDKERIHDLGVRIFERPEVPKTGKSLAEPRRIARSARHRLRRRRQRLNYLKRFFIDNNLISEGRISDILSPTHPKKWRPIYDPYTLRIKGLNEKLSPEELFVALYHIAKRRGYKSNRISIEEQDVEGSQVLSAISENKLLLEKYKTKSVAKVLTLDEKFKNNKRNKTSTYKNSFVRKNFEDEVMLLLESQKKFGLKLPYEKIQTLLYGNVKNGNYNGIFSQRPFMTRELIEKMRGNCEFEPEKPRAPKASYSFELFRLAQNLSHLRIVVDQETRQLSEDEIAKIIEKAKNVKVLKYEHIRDILGYKGDQSFSFAQGMIRGKIKNDDKKNGEGNKFDSMIFYHTVKKAFEQHPKDWSILAANNFELLDRTGLILTVNKDDSSLRRELSKLNISTNAIESLLPINVSSFVHLSFESLHKITPWLLKGLNYNESVERAGYSFSQNLSGNKKELPPLSEKQAAQITNPVVKRAVSQTIKVVNAIIRKYGIPYSVKIEAANELAKNAQERDKIKKIQDENAAYNEKIKQKLINEFNIPTPTGLQITKFKLREQQNGVSIYSGKEIRLENLFADEHYGEIDHIIPFSRCGNDGLNNKVLVFADENQEKGNLTPYETWGGDNQKWIQFEARVRATAGLPAAKRDRLLSKSKPVEDWNVRALNDTRYISRFLRQYIRDNLDFPKIEGKTGTQRVFSPSGPITSYLRRVWRVGNKNRDDNNLHHATDACIIAATDPGIIQKVSSLNKYYELFKYSDKNEVIDKLTGEVLNRNQFEQHIADLEPWDDFGKEVRKRSELYNTPSELHNELTGLKNYDEEFRLSTLPIFVSRMPKRSGKGSTNSETFRSPKIIEGYLDEKGRPAIARKQRVPLRSVDLKKLYDSPIRETDPKLYKILEQRLKDFNDNPVKAFAENIYKPTKDSKCGNIVRSIKIYNTRDSKSGFLVNEQRAFVNNGKTIRLDVYKRKNYKGIYEYYFTPVYTHLINTQKIEVLPTPTGRSKKEKADFDTIRTDDGEIYATLKNGFIKQFSIYPNDYVRIYFGNEIVEGYYVKYNTNDGSLKLIKHSETSKNDNDLISKSAKTATLIKRYDISVLGDNYRWL

SEQ ID NO: 2349 - protein, 1144 aa, unidentified
  REGION 1..1144: note = Description of Unknown: Cas Enzyme sequence
MTQNSSYSPKKYSLGLDIGTSSIGWAVLDLDKERIHDLGVRIFERPEDPQNGDSLAKPRRDARSARRRLKRRRQRLNHLKQFFVDQNILTKNQVEEVLNYKSDFNKLDVYGLRARALTEELLPEELLKVLYQIAKRRGFKSNRKVVEESDKEGGRVTSALKANEKFLADNNYTTVGDALSRDEKFAPHKRNKRDDYTNSFARNDFLRELEAIIKTQQNYTLKNVPERTINELIYGINDEQVINVSAIMYQRPFMTKELIEKMVGDCTFEKNEKRAPKASYSFEVFRLASDLSHLVFIPRDASKRQAKRDNLEVRLSPEQISKVIDVAKSQKSLTYKKVRSTAGISEDYVPKDARGKKKDGDKFGEENVFGGLKAYNDIRLALKDLPEDWAKIDNESAINQIAYILTTQKADEGIQAELDSLPLSDKAKEAIVKIKPTNFKAFGHLSIKALQKITPHILEGMTYDKACEAAGYDFKKQSASLEQITNPVVKRAITQTLKVVRAIERKYGKPYFIKVETARDLAKNFKDRNAIKKENEENQGYNEDVKSIITDGYEASPKTKGGKQLLNHLKELNVRLNKNADFNGQQIIKVKLYREQNGVCLYSGKSIDFETMLRDDNAYQVDHIVPFSRSNNDGITNKVLVLTEENQKKGNQTPFEYFGADEKRWKEFAARVESIYKTRDIKIADKAANAINYKYNGYAMKKKQNLLLQDYKNDSWNVRALNDTRYITRFIQNYLRQMVDFAEGEEKQRVIAPNGTTTAYLRKRWGLAKDRAEDVLHHAKDAAVVAAIDNSIVRQANLFAKRGEIAALLSAVKTMEEKTDKLTGEIVDEDEFDRAQRRKDAAIVLSSKYFPQPWDNFGKEVMKRTLNTDIATLQNELRGLDNYDEDFRLNVKPIFVSRMPRRKATAQAHKETIRSPKVKDGDQRTVRMPLNKIKRKDVENSVLKESDKWLYDKLLERLDAHGGNPEKAFAEPIYKNDKKIDKNGKKLSPVSTVKVYSTQPSGFYINNGKAFVNNGSMVWLDVYQKPNKKGKIEHFFVPVYAHQVGKNKPAPTKILPAPKGFTDVDETFTKVCSLYPNDYVRCYFGNEIKEGYYVKYGINNGAMQVIAHSTASKDKDHLIQISPRSANLIERYDIAILGDNYRWL

SEQ ID NO: 2350 - protein, 1131 aa, unidentified
  REGION 1..1131: note = Description of Unknown: Cas Enzyme sequence
MAQKSSYSPKKYSLGLDIGTSSVGWAILDLDKERIHDLGVRIFERPEDPQNGDSLAKPRRDARSARRRLKRRRQRLNHLKQFFIDQNILTKYRVEEVLDYKSDFNKLDIYALRSKALTEELSPEELLKVLYQIAKRRGFKSNRKVVEESDKEGGRVTSALKTNEKFLADNNYTTVGEALSRDEKFALHKRNKRDDYTNSFARDDFLRELEAIIKTQRNYALKNVPEQAINELIYGINDKQVINVSAIMYQRPFMTKELIEKMVGKCTFEDGEKRAPKASYSFEVFRLASDLSHLVFIPRDASKRQAKRENLEVGLSPEQIKQVIELAKSQKSLTYKKVRSTAGISEDYVPKDVRGKKKDGDEFGEENAFGGLKAYNDIRSALKDLPEDWAKIDNESAINQIAYILTTQKADEGIRDELNLLPISDKAKEAIVKIKPTNFKAFGHLSIKALQKITPYILDGMTYDKACEAAGYDFKKQSTSLEQITNPVVKRAITQTLKVVRAIERKYGKPYFIKVETARDLAKNFKDRKAIENENKENQARNQSIIQTLNENGIVTPTGQQIIKVKLYREQQGKCLYSGNPIDFETMLRDDNAYQVDHIVPFSRSNNDGITNKVLVLTEENQKKADRTPFEYFGADEKRWKEFAARVESIYKTRDVKTSDKATNAINYKYNGYAMKKKQNLLLQDYKNDSWNVRALNDTRYITRFIQNYLRQNVDFAEGEEKQRFIAPNGTTTAYLRKRWGLAKDRAEDVLHHAKDAAVVAAIDQKIVMQANLYAKRHEIKALLAATKTMEEKTDKLTGEITDEDEFDKAQRRKAAILVLSSKHFPQPWDNFGKEVMKRTLNTDIATLQNELRGLDNYDEDFRLSVKPIFVSREIRHKIRGEAHESKLRSNRNRNGQNIIRIPLTELTLQRLENSLVKEEFDSQKNSNGSSLYEKLLARLNECNGDSKKAFNPPFKLYKGPKQDKNGNPISPVAAVKVYDKKGVVSVGRKANAPVALAEMVRIRVYKKDNQIYMIPDYRINILENKETMELLKPLKKVSKIDNSFNFIGYLYKGDLITIQKDSQTFVGYFVQFEGDNRITIKNHLAVDSSRDSKSTVKRESLSGINYLKIHKVDVLGDVNFSEGIVWPGAS

SEQ ID NO: 2351 - protein, 1144 aa, unidentified
  REGION 1..1144: note = Description of Unknown: Cas Enzyme sequence
MAQKYSYSPKKYSLGLDIGTSSVGWAVLDLDKERIHDLGVRIFERPEDPQNGDSLAKPRRDARSARRRLKRRRQRLNHLKQFFIDQNILTKDQVEEVLNYKSDFNKLDIYALRSKALTEELSPEELLKVLYQIAKRRGFKSNRKVVEESDKEGGRVTSALKANEKFLADNNYTTVGDALSRDEKFALHKRNKRDDYTNSFARDDFLCELEAIIKTQRNYALKNVPEPAINELIYGIDDGQVTNVSAIMYQRPFMTKELIEKMVGKCTFEDGEKRAPKASYSFEIFRLASDLSHLVFIPRDASKRQAKRENLEIRLSPEQIKQVIDLAKSQKSLTYKKVRSTAGISEDYVPKDVRGKKKDGDEFGEENVFGGLKAYNDIRLALKDLPEDWAKIDNESALNQIAYILTTQKADEGIRAELDTLPLSDKAKEAIVKIKPTNFKAFGHLSVKALQKITPHILEGMTYDKACEAAGYDFKKQSASLEQITNPVVKRAITQTLKVVRAIERKYGKPYFIKVETARDLAKNFKDRNAIKKENDENQGYNEDIKSIITDGYEASPKTKGGKQLLSHLKELNVPLNKNADFNGQQIVKIKLYREQNGVCLYSGKSIDFETMLRDDNAYQVDHIVPFSRSNNDGITNKVLVLTEENQKKVDRTPFEYFGADEQRWEKFVALVETTYKTRDVKTSDKATNAINYKYNGYAMKKKQNILLQDYKNDSWNVRALNDTRYITRFIQNYLRQNVDFAEGEEKQRVIAPNGTTTAYLRKRWGLAKDRAEDVLHHAKDAAVVAAIDQKIVMQANLYAKRHEIKALLAATKTMEEKTDKLTGEITDEDEFDKAQQRKAAILVLSSKHFPQPWDNFGKEVMKRTLNTDIATLQNELRGLENYDDEFCLSVKPIFVSRMPRRKATAQAHKETIRSPKVKDNDQRTVRMPLNKVKSRDVENSVLKESDKWLYNKLLERLDTHDNNPEKAFAEPIYKNDKKFDKNGKKLSPVSTIKVYSTQPSGFYINDGKAFVNNGSMVRLDVYQKPNKKGKIEHFFVPVYAHQIGKNKPAPTKILPAPKGFTDVDETFIKICSLYPNDYVRIYLKNKILEGYYSGYDISVGTMILYPHFTPSKDIKVANRVSARSATLIERYDIAILGDNYRWL

SEQ ID NO: 2352 - protein, 1119 aa, unidentified
  REGION 1..1119: note = Description of Unknown: Cas Enzyme sequence
MTEKSSYSPKKYSLGLDIGTSSIGWAVLDLDKERIHDLGVRIFERPEDPQNGDSLAKPRRDARSARRRLKRRRQRLNHLKQFFIDQNILTKDQVEEVLDYRSDFNKLDVYELRAKALTEELSPEELLKVLYQIAKRRGFKSNRKVIEESDKEGGRVTSALKANEKFLADNNYTTVGDALSRDEKFAPHKRNKRDDYTNSFARDDFLRELEFIIKNQRKYALKNIPEQAINELIYGIDDGQATNVSAIMYQRPFMTRELIEKMVGNCTFEKDEKRAPKASYSFEMFRLASDLSHLVFIHRDASKRQAKRENLEVRLSPEQISKVIDAAKSQKSLTYKKVRSTAGISEDYVPKDVRGKKKEGDEFGEDNTFGGLKAYSDIRLALKDLPEDWAKIDNESAINQIAYVLTTQKADEGIRAELDSLPLSDKAKEAIIKIKPTNFKAFGHLSIKALQNITPYILEGMTYDKACEAAGYDFKKQSASLEQITNPVVKRAITQTLKVVRAIERKYGKPYFIKVETARDLAKNFKDRKAIENENKENQARNQSIIQTLNENGVVTPTGQQIIKVKLYREQNGVCLYSGKSIDFETMLRDDNAYQVDHIVPFSRSNNDGMTNKVLVLTEENQKKSNQTPFEYFGADEKRWKEFAARVESTYKTRDTKTADKATNAINYKYNGYAIKKKQNLLLQEYKNDSWNVRALNDTRYITRFIQNYLRQDVDFAEGEEKQRVIAPNGTTTAYLRKRWGLAKDRNEDVLHHAKDAAVVAAIDQNIVRQANLFAKRSEIATLLAAEKTMEEKTDKLTGEIIDEDEFDKAQRRKDAAIVLSSKYFPQPWNNFGKEVMKRTLNTDIATLQNELRGLDNYDEDFRLSVKPIFVSRMPRRKAAAQAHKETIRSPKVKDNDQRTVRMPLNKVKRKDVENSVLKESDKWLYDKLLERLDAHGDNPEKAFAEPIYKNDKKIDKNGKKLSPVSTVKVYSTQPSGFYINNGKAFVNNGSMVRLDVYQKPNKKGKIEHFFVPVYAHQVGKNKPTPTKILPAPKGFTDIDETFTKICSLYPNDYVRCHFGNEIREGYYASFNINNGAMQVMPHDAANKSNDSLIQISPRSANLIERYDIAILGDNYRWL

SEQ ID NO: 2353 - protein, 1118 aa, unidentified
  REGION 1..1118: note = Description of Unknown: Cas Enzyme sequence
MTQKSSYSPKKYSLGLDIGTSSVGWAVLDLDKERIHDLGVRIFERPEVPKTGKSLAEPRRAARSTRHRLRRRRQRLNYLKRFFIDNNLISESRISDILSPTHPKKWRPAYDPYDLRIKGLEEKLSLEELFVALYHIAKRRGYKSNRISVEKQDIEGSQVLSAISENKLLLEKYKTKSVAKVLTLDEKFKNNKRNKTSTYKNSFVRKNFEDEAALLLESQKKIGLKLPYEKIQTLLYGDVKNGNYNGIFSQRPFMTEELIEEMRGYCEFEPEKHRAPKASYSFELFRLAQNLSHLRIVVDKETRQLSEDEIAKIIEKAKNVKELKYEHIRDILGYKGDQSFSFAQGMIRGKIKKDDKKNGEGNKFDSMIFYHTVKKAFEQHPKDWDILAANNFELLDNAGLILTVNKDDSSLRAKLSKLDISTDAIEALLPINVSGFAHLSFNSLHKITPWLLRGLNYSEAVEKAGYSFSQSLSGDKKRLPPLSEKQAAQITNPVVKRAVSQTIKVVNAIIRKYGIPYSVKIEAASELAKNAQERDKIKKIQDENAAYNEKIKQKLINEFNIPTPTGLQITKFKLREQQNGVSIYSGKEIRLENLFADEHYGEIDHIIPFSRCGNDGLNNKVLVFADENQEKGNLTPYETWGGDNQKWIQFEARVRATAGLPAAKRDRLLSKSKPVEDWNVRALNDTRYISRFLRQYIRDNLDFPKIEGKAGTQRVFSPSGPITSYLRRVWRVGNKHRDDNNLHHAADACIIAATDPGIIQKVSSLNKYYELFRYSNKNEVIDKLTGEVLNCNQLEQHIADLEPWHDFGKEVRKRSRLYNTPSELHGELTGLKNYDEEFRLSTLPIFVSRMPKRSGKGSTNSETFRSPKIVEGYLDEKGKPAIARKQRVPLHSVDLKKLYDSPIRETDPKLYKILEQRLKDFNGDPAKAFVESVYKPTKDSKRGNIVRSIKIYNTRDSRSGFLVNEQRAFVNNGRTIRLDVYKRKNYKDIYEYYFAPVYTHLINAQKIEVLPTPTGRSKNEKVDFDTIRTEDDKIYATLENGFIKQFSIYPNDYVRIYFDNEIVEGYYVKYNTNDGSLKLIKHSETSKNDNDLISKAAKTANLIERYDISILGDNYRWL

SEQ ID NO: 2354 - protein, 1169 aa, unidentified
  REGION 1..1169: note = Description of Unknown: Cas Enzyme sequence
MAQNSSYLPKKYSLGLDIGTSSVGWAVLDLDKERIHDLGVRIFERPEDPQNGDSLAKPRRDARSARRRLKRRRQRLNHLKQFFVDQNILTKDRVEEVLDYKSDFNKLDVYGLRAKALTEELSPEELLKVLYQIAKRRGFKSNRKVVEESDKEGGRVTSALNTNKKFLADNNYTTVGEALSCDEKFALHKRNKRDDYTNSFARDDFLRELEAIIKTQQNYTLKNVTEQAINELIYGIDNGQVVNVSAIMYQRPFMTKKLIEEMVGKCTFEDDEKRAPKASYSFEVFRLASDLSHLVFIPRDASKRQAKRENLEVRLSPEQINKVIDAAKNQKSLTYKKVRSTAGISKDYVPKDVRGKKKDGDEFGEENVFGGLKAYNDIRLALKDLPEDWAKIDNESAINQIAYILTTQKADEGIRDELNLLPISDKAKEAIVKIKPTNFKAFGHLSIKALQKITPHILEGMTYDKACEVAGYDFKKQSASLEQITNPVVKRAIAQTLKVVRAIERKYGKPYFIKVETARDLAKNFKDRNAIKKENEENQGYNEDIKSIITDGYEASPKTKGGKQLLNHLKEFNVRLNKNADFNGQQIIKVKLYHEQNSVCLYSGKPIDFETMLHDDNTYQVDHIVPFSRSNNDGMTNKVLVLTEENQKKGNQTPFEYFGADEKHWKEYVARVESTYQTREVKKGDKDAGVNYKYNGYAMKKKQNLLLQEYKNDSWNVRALNDTRYITRFIQNYLRQNVDFAEGEEKQRVIAPNGTTTAYLRKRWGLAKDRTEDVLHHAKDAAVVAAINQKIVYQANLFSKEQEMKLYLNNAKTIDEKRQILLQSTDENTGEITDEATFTQAQKDLAQAEYFKLRSNEETKNRFPDPWPDFSKEVMKRTLNTDVATLQNELRGLDNYDEDFRLSIKPIFVSREIRYKIRGEAHESKLRSNRNRNGQNIIRIPLTELTLQRLENSLVKEEFDSQKNSNGSSLYEKLLARLNECNGDAKKAFNPPFKLYKGPKQDKNGNPISPVAAVKVYDKKGVVSVGRKANAPVALAEMVRIRVYKKDNQIYMIPDYRINILENKETMELLKPLKKVSKIDNSFNFIGYLYKGDLITIQKDSQTFVGYFVQFEGDNRITIKNHLAVDSSRDSKSTVKRESLSGINYLKIHKVDVLGDVNFSEGIVWPGAS

SEQ ID NO: 2355 - protein, 1158 aa, unidentified
  REGION 1..1158: note = Description of Unknown: Cas Enzyme sequence
MAQKSSYSPKKYSLGLDIGTSSVGWAVLDLDKERIHDLGVRIFERPEDPQNGDSLAKPRRDARSARRRLKRRRQRLNHLKQFFVDQNILTKNQVEEVLDYRSDFNKLDVYALRAKALTEELSPEELIKVLYQIAKRRGFKSNRKVVEESDKEGGRVTSALKTNEKFLADNNYTTVGEALSRDEKFALHKRNKRDDYTNSFARDDFLCELEAIIKTQRNYALKNVPEPAINELIYGIDDGQVTNVSAIMYQRPFMTKELIEKMVGKCTFEDGEKRAPKASYSFEVFRLASDLSHLVFIPRDASKRQAKRENLEVRLSPEQISKVIELAKSQKNLTYKKVRSTAGISEDYVPKDVRGKKKDGDEFGEENAFGGLKAYNDIRSALKDLPEDWAKIDNESAINQIAYILTTQKADEGIRDELNLLPISNKAKEAIVKIKPTNFKTFGHLSIKALQKITPHILEGMTYDKACEAAGYDFKKQSASLEQITNPVVKRAITQTLKVVRAIERKYGKPYFIKVETARDLAKNFKDRNAIKKENEENQGYNEDVKSIITDGYEASPKTKGGKQLLNHLKELNVRLNKNADFNGQQIIKVKLYREQHGKCLYSGNPIDFETMLRDDNAYQVDHIVPFSRSNNDGITNKVLVFTEENQKKADRTPFEYFGTDEQRWEKFVALVETTYKTRDVKTSDKATNAINYKYNGYAMKKKQNLLLQDYKNDSWNVRALNDTRYITRFIQNYLRQNVDFAEGEEKQRIIAPNGTTTAYLRKRWGLAKDRTEDVLHHAKDAAVVAAIDQKIVYQANLFSKEQEMRLYLDNAKTIDEKRQILLRSTDENTGEITNETTFTQAQKDLAQAEYFKLRSDTETKNRFPAPWPDFSKEVMKRTLNTDIATLQNELRGLDKYDEEFRLSIKPIFVSRMPRRKATAQAHKETVRSPKVKDGDQRTVRMPLNKIKRKDVENSVLKESDKWLYDKLLEKLDTHGDNPEKAFAEPIYKNDKKFDKNGNQLSPVSTIKVYSTQPSGFYINKGKAFVNNGSMVRLDVYQKPNKKGKIEHFFVPVYAHQVGKNKPTPTKILPAPKGFTDIDETFVKVCSLYPNDYIRIYLKNEIREGYYVKYNVANGAMQLLPNYAPGKNQNTFVQVYGKNAQAIERYDISILGDNYRWL

SEQ ID NO: 2356 - protein, 1125 aa, unidentified
  REGION 1..1125: note = Description of Unknown: Cas Enzyme sequence
MYYNVFMKYSLGLDIGVTSVGWAVVDLDKKRIHNLGVRIFEKAEDPQNGDPLAKPRREARSARRRLKRRRQRLNSLKKFFINQHILTEQEVNEVLSETSRYNTLDVYALRSKALEEALTPEELLKVFYQIAKRRGFKSNRKIQEAADVEGGRVTKALKANEQLLVDRGYKTAGQALALDEMYAKHRRNKHDDYTNSFARQDFENELQQIIATQKRYVLKNISDSDVSQLIYGIHDGETINKNAILYQRPFMTKELIESMVGECTFEKNEKRAPRASYSFELFRLVGDLAHLEYIPKGIKKRETNATRLTPDQIKAVVTVAKKGGKLTYKKVREAAGISDDFAASYVRGKISDDDPYGETNDFGNMKAYHDLRLALKGFPEDWMKVDNETVLNQIAYILTTEKSDEAILKALEAIAVSDEAKQAILKIKPTNFKSFGHLSIKALQNITPNIMQGMAYDKACEVAGYDFRKKGVNLEQITNPVVKRAIAQTLKVVKAVERKYGKPYYIRVETARELAKNFKDRKAIELEQKENQERNKNLISKLEEHGITDPTGMQIIKFKLYNEQNAKSLYSGEPIDLYRLLHDDNAYQVDHIIPFSRSGNDSLANKTLVTTAENQEKGNRTPYEAFGGNEMRWSQFVANVEAIYKTRVVEKGDKSAKDNYAFNGYAFKKKGNLLATAYARSGWAESQRALNDTRYITKFVQNYLRQTADFAKGERENEQRVFAPNGTLTAYMRKRWGLAKDRSEDVLHHAKDAAVVAVMDQSMIYRANQYAKSTEMRQYLMNAKTIHEKAQLLVDLTDKETGEIADDSKFKEAQEARRRAEHVKETMDVLSTDRFPEPWPRFREEVDWRTRPISTEELHGKIKNFETYDTRFAESVQPIFVSRMPNRKAKGGAHKETLRSIRVDEDNMRTVRMPLTSIKLKDLENASVKNSDPQLYETLKLRLEECGDKPEKAFAEPVYKRDKYGNNAHEIRAIKVASKQPSGFSINNGKAFVNNGSMVCVDVFQKQNAKGKLEHFFVPVYTHQIPLEKRGEKITKILPAPKGFTDVDESFTKVTSLFPNDYVRVYFGNKVVEGYYVKYGTASGQMALISHLAPGKDDIITCSARSAVSIERHDISILGDNAPRI

SEQ ID NO: 2357 - protein, 1177 aa, unidentified
  REGION 1..1177: note = Description of Unknown: Cas Enzyme sequence
MKELKYSLGLDIGVTSVGWAVIDLKKERIHDLGVRIFEVAETPKEGKSLAEPRRIARGARRRLRRRRQRLNNLKRFFIDQNILAEKQIDNILNPKSDYNKLDVYELRAKALKEELTAEELFKVFYQIAKRRGFKSNRKTEEKADKNEGGKVLSATSANSSLIGEKYQTAGEALFKDDKFKVRKRNKNDYINSFNRDNFIDEVKEIINFQKKYTLKGIDQKVIDMAFYGGELDGDRNVKKVTNKSAVFYQRPFMTTDLIENMVGDCAFEKGKKRAPKASCTFEVFRLASDLNNLVYVPKPQNSGRGLTTEIRLNPNQIKKVIDEAKKTKSLTYKKVQKVAEISDEYCAKYVRGKKKKDDEFGDKNYFGGLPAYHAIKSALKDLPEDWETVNNEKNLNEIAYILTTERADEEILQKLKSLPLSDDGQKAIVAINVTTIKDSRSLSKKRPAIFRSFGYLSIEAMQKITPSLLKGMTYDEACKEAGYDFRKKENSLEQITNPVVKRAIIQTTKVVEAIEKKYGAPYFVKVETARELAKNRDDRNQIKQEQEENQAGNEDIKNIILLGYDYSPKSKKGEQLLSFLKENNVPLTKNPDFNGQQIIKVKLYREQNGKCLYSGESIDFETMLRDDNAYQIDHILPLSRSCDNRFTNKVLVKTEENQRKGNRTPFEYFGGDEQRWKEFVARVEATYVNNLKKKQNLLVEKYERDGWSERALTNTQYITRFIYNYLQEIVTPAPGDDKKRFFAYNGTITSYIRKRWGLGKDREEDVLHHAKDAAIAAVIDDKLIRQVNEYSKNKELKPYLRAKKAEEKYRQELENITDKETGEINEDGLNKINNNNLVKVKTVINKHENKYDFPQPWGRSDFDKEVRKRTMNTDKETLQNKLCGLENYDDEFRLQVEPVFVSRMAKRKTTGKAHEETLYSRDTKDNNRRSKRVNIKSIRLIDLENTLLDKNDVLINQVSKIIKNSEKYKQEASEKKRKEIKLGDVFAGDIYKANKRFDKNSKPIAPVSSIKVYSTQPSGFYINNNKAFVNNGDTICLNIYKHKLGYFAAPVYVHLKNEKHFPIKPTPSGRTKPEKELWNSLRSEAGEILSTPENGFTKVCSIFPNDYVKIKNKDSETKEGYYVKFGSGENTGRGNLVLIPHFVADKGDKNHINVGVGTIDKIQKVKISVLGDNASER

SEQ ID NO: 2358 - protein, 1005 aa, unidentified
  REGION 1..1005: note = Description of Unknown: Cas Enzyme sequence
RALTEELSPEELLKVLYQIAKRRGFKSNRKVVEESDKEGGRVTSALKANEKFLADNNYTTVGDALSRDEKFAFHKRNKRDDYTNSFARDDFLRELEAIIKTQRNYALKNVPEQAISELIYGIDDGQVTNVSAIMYQRPFMTKELIEKMVGGCTFEKDEKRAPKASYSFEVFRLASDLSHLVFIPRDASKRQAKRENLEVRLSPEQISKVIDVAKSQKSLTYKKVRSTAGISEDYAPKDVRGKKKEGDEFGEDNTFGGLKAYSDIKSALKDLPEDWAKIDNESAINQIAYILTTQKADEGILAELDSLPLSDKAKEAIIKIKPTNFKAFGHLSIKALQKITPHILEGMTYDKACEAAGYDFKKQSASLEQITNPVVKRAITQTLKVVRAIERKYGKPYFIKVETARDLAKNFKDRKAIENENKENQARNQSIIQTLNENGIVTPTGQQIIKVKLYREQNGVCLYSGKAIDFETMLCDDNAYQVDHIVPFSRSNNDGITNKVLVLTEENQKKGNQTPFEYFGADGKRWKEFAARVESTYKTRDIKTADKATNAINYKHNGYTMKKKQNLLLQEYKNDSWNVRALNDTRYITRFIQNYLRQMVDFAEGEEKQRVIAPNGTTTAYLRKRWGLAKDRAEDVLHHAKDAAVVAAIDNSIVRQANLFAKRGEIAAPLSAVKTMEEKTDKLTGEIIDEDEFDKAQRRKDAAIVLSSKYFPQPWDNFGKEVMKRTLNTDIATLQNELRGLDNYDEDFRLSVKPIFVSRMPRRKATAQAHKETIRSPKIKDNDQRTVRTPLNKIKRKDVENSVLKESDKWLYDKLLERLDAHDNNPEKAFAEPIYKNDKKFDKNGKQLSPVSTIKVYSTQPSGFYINNGKAFVNNGSMVRLDVYQKPNKKGKIEHFFVPVYAHQVGKNKPTPTKILPAPKGFTNVDETFIKICSLHPNDYVRIYLKNEIREGYYVKYNVANGAMQLLPNYAPEKDQGTFVQAYGKNAQAIERYDISVLGDNCEWL

SEQ ID NO: 2359 - protein, 1133 aa, unidentified
  REGION 1..1133: note = Description of Unknown: Cas Enzyme sequence
MAKKTVYLPKKYSLGLDIGTSSAGWAVLDLDKKRIHDLGVRIFERPEDSQNGDSLAKPRRDARSARRRLKRRRQRLNHLKQFFVDQNILTKNQVEEVLDYKSDFNKLDVYALRSKALAEELSPEELLKVLYQIAKRRGFKSNRKVVEESDKEGGRVTSALKTNEKFLADNNYTTVGEALSRDEKFALHKRNKRDDYTNSFARDDFLCELEAIIKTQRNYALKNVPEPAINELIYGIDDGQVTNVSAIMYQRPFMTKELIEKMVGKCTFEDGEKRAPKASYNFEVFRLASDLSHLVFIPRDASKRQAKRENLEVRLSPEQISKIINAAKSQKSLTYKKVRSIAGISEDYVPKDVRGKKKDGDKFGEKNVFGGLKAYNDIRSALKDLPEDWAKIDNESAINQIAYILTTQKADEGIRDELNLLPISNKAKEAIVKIKPTNFKAFGHLSIKALQKITPHILEGMTYDKACEAAGYDFKKQSASLEQITNPVVKRAITQTLKVVRAIERKYGKPYFIKVETARDLAKNFKDRKAIENENKENQARNQSIIQTLNENGIVTPTGQQVIKVKLYREQQGKCLYSGNPIDFETMLRDDNAYQVDHIVPFSRSNNDGITNKVLVFTEENQKKGDQTPFEYFGADEKRWKEFVARVESIYKTRDIKTSDKATNAINYKYNGYAMKKKQNLLLQDYKNDSWNVRALNDTRYITRFIQNYLRQNVDFAEGEEKQRIIAPNGTTTAYLRKRWGLAKDRTEDVLHHAKDAAVVAAIDQKIVYQANLFSKEQEMRLYLDNAKTIDEKRQILLRSTDENTGEITNETTFTQAQKDLAQAEYFKLRSDTETKNRFPAPWPDFSKEVMKRTLNTDIATLQNELRGLDKYDEEFRLSIKPIFVSRMPRRKATAQAHKETIRSPKVKDGDQRTIRMPLNKIKRKDVENSVLKESDKWLYDKLLEKLDTHGDNPEKAFAEPIYKNDKKFDKNGNQLSPVSTVKVYSTQPSGFYINDGKAFVNNGSMVRLDVYQKPNKRGKIEHFFVPVYAHQVGKNKPAPTKILPAPKGFTNIDETFTKVCSLYPNDYVRIYLKNEIREGYYVKYNVANGAMQLLPNYAPGKNQGTFIQVYGKNAQTIERYDISVLGDNCEWL

SEQ ID NO: 2360 - protein, 1095 aa, unidentified
  REGION 1..1095: note = Description of Unknown: Cas Enzyme sequence
MSYGLGIDCGIASVGSGTVLLNEKEEPYKIDFMGVRTFDKAETGTGKSLAAERRTFRGSRRTHRRKTHRKDRIKKLICDTMNVDFKYIQSIYERKNLSDIYEIRYEALNRKLTKDEFIRLLIHLSQRRGFKSNRKIDAKNKNSDDGKMLKEIEKNKSIFTDNGYRTIGEMLFKNEKFIQRKRNKSDYSMTFLRVDYENEIKVIFNQQRKFNNQYATESFENEYLKIYLSQRNFDDGPDESSPYGGNLIGKMVKNCTFEPTLKAAPKASYSFEYANLLTKVNSMKILYNGNRRPLTKEEREKVVTLAFKKNKITYSSIRTELGLSNEEFFNISYNSKDYTETEKKTKFSYLTAYYELKKAYGSSYLEWSVEKKNTLATILTLHKNDSKIIEKMKEKNFSEDEINVALTIPSFTKFGNLSIVVLNKMIPYLEDGMLYNEAITALGYNFKDNDKCQQMYLPSNPKDAPELDEIRNPVVRRTVSQTIKVINSIIREKGESPTYINIEIARELAKSYKERKNIEGIQKANREKNEKSFEELKNLGVVKPTAFDLVKYKLWKEQDGICVYSQKPLKIEKLFSEGYAEVDHIVPYSISFDDSYSNKVLVHTNENQNKGNRIPLNYLSGKERDEFIVWVKNSHLSFRKKQNLLKEKISEDDFDGFKNRNLKDTQYLSRFLLKFIKKYLKFAPSSTNRKETVIAVNGAITSYIRKRWGIEKIRANGDAHHATDAIVIACVTKSMIKRISEYSKYKETLYIKSNDETLDVDKKTGEVKNYFPMPYKWFRTELDIRCSKNPERFLESNPLPTYARDEKVKPIFVSRMVDRKVTGPAHQNTLRRMVVENGQKYEVVKTDLNKLSLDNNNEIANYYNPDDDRLLYDALKNYLIKFNELHKEENDKKEEIKSKKKKKVEDAFTEPFYKPKSDGSKGPLVKSVKIIKKITSSVTLNNNTTIAKNGDMIRTDVFRTEDGYYLVPIYVADTVKNELPNKAIVQGGEWKAMNDEDFLFSLYRNDLIKIKSNSDVTFSLMNESSSLPETESLREEFVYFKGTSINTASIRVVTHDNCYIKKSLGVKNLQSLEKYQVDVLGNVSKVKKEKRMGFR

SEQ ID NO: 2361 - protein, 1092 aa, unidentified
  REGION 1..1092: note = Description of Unknown: Cas Enzyme sequence
MYHYAIGLDIGITSVGWAAVALDEAEQPCGILGMGSRIFDSAEQPKTGMSLAAPRREARGARRRLRRRHHRAERIRRLLVNSGVVADEQLEMLFAGQLEDIYALRVRALDEPVSSEELARILLHISKRRGFRSNRRNATDKEEGKLLAAISENQRRMNENGYRTVGEMFYKDPLFSEHKRNRGGNYLATVKRDMVEDEVHKLFAAQRAFGSSAASEELESGYLSILLSQRSFDEGPGGNSPYGGNQIEKMVGRCTFEPDKPRAARATYSFEYFRLLEQISHIRLIHRGESLPLSPAQRETIIALAHKSDSLDYAKLRKALALDESYTFNMVRYAYSKSVEECEKKEKFKHMHAYHEMRRVLDKVSKGRIASLSREERNDLATVLTLYKTEANIRKELAQRGFEPLDIEAALSIGNFSGFGHISVEACDKLIPYLEQGMNYNEACEAAGYDFKAHVSGEKSFKLHPKPEDFEDITSPVVRRAVSQTIKVINAIIDELGASPVFINIELAREMSKDLSERKKLEKSNQENRAKNERILERLRTEFGLTSPSGQDIVKFKLFEEQGGVCAYSLKQMSLARLFEPNYAEVDHIAPYSISFDNSYHNKVLVLTEENRNKGNHLPLEYLTGERRDKFIVWTNNNVRSYKKRQLLLKEHFTEEERKAFKERNLQDTRYISRFLLNYINDNLAFAPSARGRKKRVTAVNGSVTSYMRKFWVIKKIREDGDLHHAVDALVIACTTDGMIQQISRYAQLRECRYQQGNGESFAIDDKTGELLRRFPYPWPDFRRELEARLASDPQRVIRDYKLPFYLDGDLIDAVKPLFVSRMPQRKVTGAAHEATVKSAKYRDEGILVLKHPLTDLKLDKKSGEIKDYFKPESDRLLYEALKARLALFDGDAKKAFAEPFHKPKSDGTPGPIVSKVKLCEKSTLNVPVHNGTAVANHDSMVRIDVFKVEGDGYYYVPVYVADTLKTKLPNMACVEGKLPCDWKEMRDEDFIFSLYHNDLIRITREKPLTLSALHADTSLPKKVYTTSAMVYYTGANRHKASIDCITHDNAYMLDTLRIKGLSSMEKYTVDVLGNYHKIKGETRQPFHIKRG

SEQ ID NO: 2362 - protein, 1078 aa, unidentified
  REGION 1..1078: note = Description of Unknown: Cas Enzyme sequence
  MOD_RES 43..60: note = Any amino acid
  MOD_RES 655..687: note = Any amino acid
MVPYAIGLDIGISSVGWATVALDRSDRPYGILKMGARIFDAAXXXXXXXXXXXXXXXXXXRRLRRHRHRNERIRNLLIGSKVITEEELTHLFEGQLSDIYTLRVRALDELMNNQELARILIHIAQRRGFRSNRVGAADKENGELLSAVTANRERMAQNGYRTIAEMYLKDERFQDHRRNKGGQYISTVSRDMVEEEVRRIFEAQRQLGSPCADEKLEEAYLEILLSQRSFDEGPGEGSPYAGSQIARMVGKCTLIPEETRAARAAYSFEYFSLLSAVNHLRLVSGRASVPLNAVQRRTLIELAHKTADLNYGKLRKELALTDDQTFNAVSYRKGEERDEAEKKSKFVQMKAYHEMRRAFDRAARGHFADITREQRNAIGETLSRYKTHSTIYDELKKAGLSDPDIAIAETLNFSKFGHVSVKACDMLIPYLEQGMKYNEACEAAGLNFKGHDAGERSRLLPPLDADARNTITSPVVQRAVSQAIKVVNAIIRERGQQPTFLNIELAREMSKDIVERRQLEKEQKENSARNERLMDQIRREYKHTSPTGQDLVKMKLWEEQGGICAYSQKSISIEHLFDTDYAEVDHIIPYSISFDDGYKNKVLVLAKENRDKGNRLPLEYLTGKRREDFIVWVNSSIRDYRKRQRLLKEHITAEXXXXXXXXXXXXXXXXXXXXXXXXXXXXXXXXXAVNGSVTGYMRKRWGISKIRANGDLHHAVDALVVVCTTDAFIQKVSRYAKYRESRYMQEAAERFLIDPDTGEIIQEFPYPWPHFRQVLEARLSRDPAAAMEQLKYPILTPEDREIKPIFVSRMPRHKVTGAAHLETIKSGKLLSDGLLISKKPLTDLKLDKDGEIKDYYNPQSDRLLYEALKARLHQFDGDAKKAFAEPFRKPKHDGTPGPIVNKVKLTEPSTLQVPVLGGTGVANNDNMVRIDVYFITGDGYYFIPVYVADTMKPELPNRACIAFKPYSEWKILSDDAFLFSLYPNDLIKVTHKKEIKFTVTHKDSELEDSYTTNDAILYYTSASISTASIKCETHDGAYMISSLGIKTLLSLEKYTVDALGNYSPVKREIRQRFPGQRS

SEQ ID NO: 2363 - protein, 1103 aa, unidentified
  REGION 1..1103: note = Description of Unknown: Cas Enzyme sequence
MKYSIGLDIGTTSIGWAIIDEDNKRIEKVGVRIFEKPENPKDGKSLSETRRTARSTRRRLKRRRQRLNFIKKFFRDNNLLTKEQIEELLRPENKLNPYKIREKALNEKISNEELFISLYHIAKRRGYKSNRKSAEEKDKEGSKVLSAISKNEKLLKEYKTVASALNSNEKFIAHKRNKAEDYSNSFVRANFEDEAKLILKTQKEFGLNLSDEKINFLLFGNEKEGNFNGIFSQRPFMTSELIMKMRGKCSLEKSELRAPKASYSFEMFRLAENLAHLRVVINNEERSLTEEEISKVIEKAKDIKVLKYQHIREVLGYKKDENFSFPANMIRGEIKKDSKNNGEENKFGELSFYHKVKTALSNTPEDWQKVCDDNYRMLDELGEILSCNKDDESLRKEISKLGLSEKAVEVLMTINVSGFGHLSFKALRKILPFLLKGDIYSDALKNAGYDVKQQLSGDKNKLPPLSKEDSAQITNPVVKRAVSQTIKVVNAIIREYGAPYQIKIEAASDLAKNFKERKKIKKAQDENASYNERIKERLQNEFNVPSPTGLQITKFKLYEQQNGKCAYSGKRLVLENLFSNEHYAEIDHIIPFSRCGNDSLINKVLVLTEENRQKGNLTPFEAWGADESRWAEYEVRVNSMNLPFRKKGRLLAKVPPKEDWNSRALNDTRYISKFLGRYLRKNLKFAKFDNENPAQRVIVPNGSITSYLRRVWRVGSKNREENNLHHATDACVIAAIDQNVIQKISRLNKYFELFKYSAEDEVIDKITGEISSRADFEQTFEDIEPWKDFGKEVRKRTAHYESPIELHNELIGLDNYDEEFRNKTTPIFVSRMPKRSGKGNINKETIRSPKIVEGYVDSKEKPVIARKQRIRLTSVDLKTLYDSPVRETDPALYEILKARLNEFGDKPEKAFGDPSNPVYKPTKNGSQGNIVRSIKVYDTLNSKSGFLINKGKAFVNNGDTIRLDVFKRKNYKGEFEYYFSPIYVHLLNAKKVEILPTPNGRSAAEKADFNKIRDEDGKIFATEENGFVKQFSLYPNDYVRIYAGNRIVEGYYVKYGITNGTLNLMNHDQTSKDNLSLKHIGCGTITFIERYDISVLGDNYRWI

SEQ ID NO: 2364 - protein, 1133 aa, unidentified
  REGION 1..1133: note = Description of Unknown: Cas Enzyme sequence
MTEKSSYSPKKYSLGLDIGTSSIGWAVLDLDKERIHDLGVRIFERPEDPQNGDSLAKPRRDARSARRRLKRRRQRLNHLKRFFVSQNILTKDRVEKVLNCTSDFNKLDVYDLRAKALAEELSPEELLKVLYQIAKRRGFKSNRKVVEESDKEGGRVTSALKANEKFLADNSYTTVGDALSRDEKFALHKRNKRDDYTNSFARDDFLHELKFIIKTQQNYTLKNVPEQAIKELICGIDDGQVTNVSAIMYQRPFMTKELIEKMVGDCTFEKNEKRAPKASYSFEVFRLASDLSHLVFIPRDAGKRQAKRENLEVRLSPEQISKVIDLAKNQKSLTYKKVRSTAGISEDYIPKDVRGKKKEGDEFGEDNTFGSLKAYSDIRSALKELPEDWAKIDNESAINQIAYILTTQKADEGIRAELNTLPLSDKAKEAIVKIKPTNFKAFGHLSIKALQKITPHILEGMTYDKACEAAGYDFKKQSASLEQITNPVVKRAITQTLKVVRAIERKYGKPYFIKVETARDLAKNFKDRKAIENENKENQARNQSIIQTLNENGIVTPTGQQVIKVKLYREQNGVCLYSGKPIDFETMLHDDNAYQVDHIVPFSRSNNDGMTNKVLVLTEENQKKGNQTPFEYFGADEKRWKEFVARVESIYKTRDIKTSDKATNAINYKYNGYAMKKKQNLLLQDYKNDSWNVRALNDTRYITRFIQNYLRQNVDFAEGEEKQRVIVPNGTTTAYLRKRWGLAKDRAEDVLHHAKDAAVVAAINQKIVYQANLFSKEQEMKLYLNNAKTIDEKRQILLQSTDENTGEITDEATFTQAQKDLAQVEYFKLRSDEETKKRFPDPWPGFSKEVMKRTLNTDIATLQNELRGLDNYDEDFRLNVKPIFVSRMPRRKATAQAHKETIRSPKVKDGDQRTVRMPLNKIKRKDVENSVLKESDKWLYDKLLERLDAHGDNPEKAFAEPIYKNDKKIDKNGKKLSPVSTVKVYSTQPSGFYINNGKAFVNNGSMVRLDVYQKPNKKGKIEHFFVPVYAHQVGKNKPTPTKILPAPKGFTDIDETFTKICSLYPNDYVRCHFGNEIREGYYASFNINNGAMQVMPHDATNKSNDSLIQISPRSANLIERYDIAILGDNYRWL

SEQ ID NO: 2365 - protein, 1140 aa, unidentified
  REGION 1..1140: note = Description of Unknown: Cas Enzyme sequence
MAEKSLYSPKKYSLGLDIGTSSVGWAVLDLDRERIHDLGVRIFERPEDPQNGDSLAKPRRDARSARRRLKRRRQRLNHLKQFFVDQNILTKDRVEEVLNYKSDFNKLDVYELRARALTEELSPEELLKVLYQIAKRRGFKSNRKVVEESDKEGGRVTSALKANEKFLADNNYTTVGDALSRDEKFALHKRNKRDDYTNSFARDDFLRELEAIFKTQRNYALKNVPEQTINELIYGIDDGQVTNVSAIMYQRPFMTKELIEKMVGNCTFEKDEKRAPKASYSFEVFRLASDLSHLVFIPRDTSKRQAKRENLEVRLSPEQICKVIDVAKSQKSLTYKKVRSTAGISEDYVPKDVRGKKKEGDEFGEDNTFGGLKAYSDIRLALKDLPEDWAKIDNESSINQIAYILTTQKADEGVVDELESSLATKMLSDTAKKAILTINPGHDSKKGIFKGFCHLSIKALQKITPHILKGMTYDKACEAAGYDFKKQSASLEQITNPVVKRAITQTLKVVRAIERKYGKPYFIKVETARDLAKNFKDRKAIENENKENQARNQSIIQTLNENGVVTPTGQQIIKVKLYREQNGVCLYSGKPIDFETMLHDDNAYQIDHIVPFSRSNNDGITNKTLVLTEENQKKGNQTPFEYFGADEKRWKEFVARVESIYKTRKIEPVDKNLSKEEKAQAKMTNAINYKYNGYAMKKKQNLLLQDYKNDSWNVRALNDTRYITRFIQNYLRQMVDFAEGEEKQRVIAPNGTTTAYLRKRWGLAKDRAEDVLHHAKDAAVVAAIDKSIVRQANLFAKRGEIAALLSAVKTIEEKTDKLTGEIIDEDEFDKAQRRKDAAIVLSSKCFPQPWDNFGKEVMKRTLNTDIATLQNELRGLDNYDEEFRLSIKPIFVSRMPRRKATAQAHKETIRSPKAKDGDQRTVRILLNKIKRKDVENSVLKESDKWLYDKLLERLDAHDNNPEKAFAEPVYKNDKKFDKNGKQLSSVSTIKVYSTQPSGFYINDSKAFVNNGSMVRLDVYQKPNKRGKIEHFFVPVYAHQVGKNKPAPTKILPAPKGFTDVDETFTKVCSLYPNDYVRCYFGNEIKEGYYVKYGINNGAMQVIAHSTASKDKDHLIQISPRSANLIERYDIAILGDNYRWL

SEQ ID NO: 2366 - protein, 1091 aa, unidentified
  REGION 1..1091: note = Description of Unknown: Cas Enzyme sequence
MLQYAIGLDIGITSVGWATVALDENDKPYGIINLGSRIFDAAEQPKTGESLAAPRREARSMRRRLRRHRHRNERIRELLQREKIITEEELSHLFDGQLSDIYALRVKALDEIVTNKELARILIHISQRRGFKSNRKNASTKEDGELLSAVHENESRMIQHGYRTVAELYLNDEAYKEHRRNKGGKYISTVSRDMIEDEVRKIFAAQRSLGNEATSDSFEQEFLEILLSQRSFDEGPGNGSPYAGDQIGRMIGVCTLEKNPPEPRAAKATYSFEYFSLLEAINHIRIIRKGEGNPLTPEQRRTVIDLAHKTADLNYAKIRKELGLSDEQTFNMVSYKKAEDIASAEKKAKLSHLKAYHQMRTAFERVAKGHFATITKEQRNVIGETLSRYKTSDKIRPILKEAGLSETDIDIAETLNFSKYGHLSIKACEKIIPFLEQGMKYNEACEAAGYQFKGHDGEEKQHLLSALDEDAKNTLTSPVVLRAVSQSIKVINAIIRERGCSPTFINIELAREMAKDFAERNRIKKEQEENRANNDRLMDRIRHEYGKLSPTGLDLVKLRLFEEQGGVCAYSQKQMSLEHLFDPNYAEVDHIIPYSISFDDSRKNKVLVFAKENRDKGNRLPLQYLQGKRRDDFIVWVNSCVRDYRKRQCLLKERITEEDEQRFKERNLQDTKTAASFLMNYIADHLEFAPFSSGRKKHVTAVNGSVTSYLRKRWGITKVRANGDLHHAVDALVIACTTDGMIQEVTRYSKYRESRYMPSEDGRYLVDQFTGEVVKEFPYPWPWFHQELEARLSSDPQRAVRDRNYPLYVTGEVVPRPLFVSRMPRRKVTGAAHKETIKSGKALENGLLIVKRPLTDLKLDKNDEIADYYMPQSDRLLYEALRKRLIAFNGDGKKAFAEPFHKPKHDGTPGPVVNKVKLCEKSTLNVPVLEGKGIADNDSMVRIDVFYIEGDGYYFVPIYVADTLKPELPNKACIAYRPYEEWKEMKREDFIFSLYPNDLIKVTHRKTLKLTKAQKESDLPDSYETDSELLYYIGANISTGAITCRNQDNSYLLSGIGIKTLKAIEKYTVDILGEYHPVKHEKRQTFERKKD

SEQ ID NO: 2367 - protein, 1087 aa, unidentified
  REGION 1..1087: note = Description of Unknown: Cas Enzyme sequence
MRSYAIGLDIGITSVGWATLALDGNENPCGIIGMGARIFDAAEQPKTGESLAAPRRAARSSRRRLRRHRHRNERIKNLMVSKGVLSSDELETLFDGRLEDIYALRVKALDGKVSRSEFARILLHLSQRRGFRSNRKNPSSKEDGALLKAVSENAERMEKHGYRTVGEMLLCDEAFKQHKRNKGGNYLTTVTRDMVADEARAIFAAQRSFGSEYASEEFENEYLEILLSQRSFDEGPGGNSPYGGSQIERMIGRCTFFPEERRAARATYSFEYFSLLQKVNHIRIVTNGAAERLTAEQRNTVIELAHTTKDLSYAKIRKALKLSDGQLFNIRYSDKASAEDTEKKEKLGVMKAYHQMRSAFEKQSKGRFDFVTTPQRNDIGTALSLYKTSDKIREYLKDSGFDEIDMDAVESIGSFSKFGHISVKACDMLIPFLERGMNYNEACAAAGLNFKAHDTGEKTRFLHPTEDDYEDITSPVVRRAISQTVKVINAIIRKEGGSPTFINIELAREMAKDFTERNKLKKENDENRAKNEKLLERIRTEYGKSDPAGLDLVKLRLYEEQGGVCMYSLRQMSLEKLFSPNYAEVDHIVPYSKSFDDSRKNKVLVLTEENRNKGNRLPLQYLTGQRRDNFIVWVNNNVRDYRKRRLLLKETLTDEDELGFKERNLQDTKTMSRFLLNYISDNLEFAESTCGRKKKVTAVNGAVTAYMRKRWGITKIREDGDLHHAVDAVVIACTTDGMIQRVSKYARLRECRYMPTEEGSLVIDDGTGEVLHQFPYPWRDFRKELEARIGTDPARTINDLRLPFYMSSGMPLPEPIFVSRMPKRKVTGAAHKDTVKSPKKLDKGCIVVKRPLTDLKLKDGEIENYYNRQSDRLLYDALKKALIEHGGDAHKAFAGEFHKPKSDGTPGPIVSKVKLLEPTTLNVPVHGGAGVADNDSMVRVDVFLTKGKYNLVPIYVADTLKPELPNKAIAAHKPYSEWPEMSDDDFVFSLYPNDLVCVTHKKGIKLTVTNKNSTLPPTVEGKSFMLYYISTNISGGSIKGITHDNTYEIGGLGAKTLEKLEKYTVDVLGEYHKVGKEVRQPFNIKRR

SEQ ID NO: 2368 - protein, 1086 aa, unidentified
  REGION 1..1086: note = Description of Unknown: Cas Enzyme sequence
MLSYGIGLDIGITSVGWATVALDLDDNPFGIIGMGSRIFDAAEQPKTGASLAAPRREARSTRRRLRRHRHRNERIRALLIKAGLLSDEQLLHLFDGKLSDIYELRVRALSELVTPEEFARILIHISQRRGFKSNRKNEVSAETGELLAAVNANKERMLQNGYRTVAEMLLKDAAYSGHQRNKGGTYISTVSRDMVVDEVRQIFSAQRSLGSTFANEALETAYLEILLSQRSFDEGPGENSPYSGSQIERMIGKCTLEPNETRAAKATYSFEYFSLLEAVNHIRIVENGKSSPLTAEQRKALIDLAHKSSGLNYARIRKALALSDLQMFNMVHYDNKLTIEEAEKKTKFTYMSAYHQMRTALNHIAKDHFSAITKEQRNAIGETLSRYKTSEKIRPALEMAGLSEPEIDAVESLSFSKYGHISLKACDKIIPYLEQGMNYNDACSAAGYQFKGHEGMEQTMYLPALDEDAKNTLTSPVVLRAVSQTIKVVNAIIRERGCSPTFLNIELAREMAKNFMERGKIKKEQDENRLKNERLMQRIRDEYGKPSPTGLDLVKLKLFEEQGGVCAYSLKQMSLEHLFDSDYAEVDHIIPYSISFDDGYRNKVLVFSKENRDKGNRLPLEYLTGKRRDDFIVWVNANVRDYRKRQILLKEHITAEDEERFIERNLQDTKTASRFMLNYIQDHLQFSDFTSGRKKHVTAVNGSVTSYLRKRWGISKVRANGDIHHAVDALVIACTTDGMIHDVSKYAKYRESRYMADSADRFVIDPDTGEVIKEFPYPWPLFRYELEARLSHDPQNAIRGQGFPVYSEQGINVRPLFVSRMPRRKVTGPAHKETIKSGKALDCGLLVTKRPLTDLKLKDGEIPNYYMPQSDRLLYEALKTRLSLFGGDGKKAFAEPFHKPKSDGTPGPLVHKVKLCEPSTLNVSVHGGHGVADNESMVRIDVFRVEGDGYYFVPVYVADTLKQELPNRACVAHKPYNEWKEMRDEDFIFSLYPNDLVKVTHKKELKLTKAQKDSDLPESYSIKSEMLYYISANISSGAISCRKHDNSYLLEGLGIKTLESFEKYTVDVLGEYHPVKKETRQSFCRK

SEQ ID NO: 2369 - protein, 1088 aa, unidentified
  REGION 1..1088: note = Description of Unknown: Cas Enzyme sequence
MLPYAIGLDIGITSVGWATVALDEDDRPFGIIGMGSRIFDAAEQPKTGESLAAPRREARSARRRLRRHRHRNERIRALLIREQVLSEEQLARLFEGQLPDIYALRVKALDEAVSGEELARILIHISQRRGFKSNRKGAASKEDGELLTAVSANKERMAAHGYRTVAELYLNDEAYREHRRNKGGKYISTVSRDMVEDEVHQIFAAQRKLGNPAATEALESSYVEILLSQRSFDDGPACGPYAGSQIERMIGKCPFEPEELRAGKATYSFELFSLLEAINHIRIVTNRRGVPLTPEQREALVQLAHKTADLNYAKIRKELALADEQTFNMVAYGKVDDEADAEKKTKFAHLKAYHQMRKAFEAVAKGHFADITREQRNAIGDVLSKYKTDAKIRPALQKAGLSDADIDVAESLNFSKFGHISAKACNKIIPYLEQGMTYSDACTAAGYQFKGHDGREKSHLLPPLDEDARNTITSPVALRAISQTIKVVNAIIRERGCSPTFINVELAREMSKDFYERNQIKKDQDENRARNERLMERIRTDYGKVSPTGLDLVKLKLYEEQGGVCAYSQKQMSLEHLFDADYAEVDHIIPYSISFDDGYKNKVLVLSKENRDKGNRLPLQYLTGKRREDFIVWVNSFVKDYRKRQRLLKESFTEEDEAKFKERNLQDTKTAARFVLNYIADHLEFAPFATERKKHVTSVNGSVTSYMRKRWGITKVRANGDLHHAVDALVIACTTDSMIQKVSQFARYRETRYTTGEDSRFVVDPDTGEVIKEFPYPWPRFRQELEARLGSDPRHAVRDQGFPLYLAEDIPIRPLFVSRMPRRKVTGAAHKETIKSGKALSDGLLIVKKPLTDLKLDKDGEIANYYNPSSDRLLYEALKARLQMFSGDGKKAFAEPFRKPKSDGTPGPVVNKVKLCETTTLNVSVHGGKGVADNDSMVRIDVFHVEGDGYYFVPIYVADTLKAELPSKACVAFKPHSEWKDMRNEDFIFSLYPNDLVKVTHKKALKLTKAQKDSDLPDSRAVQNELLYFVSAGINTASITCRNHDNSYKIDSLGIKTLESLEKYTVDVLGEYYPVKRETRQAFSRKKG

SEQ ID NO: 2370 - protein, 1087 aa, unidentified
  REGION 1..1087: note = Description of Unknown: Cas Enzyme sequence
MLPYAIGLDIGISSVGWAAVALDGEDRPCGIIGMGSRIFDAAEQPKTGDSLAAPRREARSARRRLRRRRHRKERIRALILREGLLDEAQLAALFDGKLEDIYALRVRALDETVTAEELARIMLHLAQRRGFRSNRKTAASKEDGELLAAVSVNRARMQENGYRTAGEMLLKDARYQKHRRNRGGAYISTVGRDMTEDEAQQIFAAQRRLGNAVASETLEAAFLEILLSQRSFDAGPGEPSPYAGSQIGNMVGKCTLEPDESRAARATYSFEYFALLEAINHIRLTGAGESLPLTKEQREALIALAHKTADLSYAKIRKELGIPAEQRFNMVSYRKSDTPDEAEKKTKLKQFKAYHQMRGAFEKMSKGSFVLLTKEQRNAIGQTLSIYKTGDNIRRSLRDAGLSEEQIAIVEGLSFSGFGHLSVKACDKLIPYLEQGMNYNDACAAAGYAFRAHEGQEKKKLLPPLNAEAKDTITSPVVLRAVSQTIKVVNAIIRERGGSPTFINIELAREMAKDFSERTQIKHEHDENRKQNERLMERIKNEYGKSAPTGLDLVKLKLYEEQAGVCAYSLRQMSLEHLFDPNYAEIDHIIPYSISFDDGYKNKVLVLAKENRDKGNRLPLEYLNGKRREDFIVWVNSAVRDWKKRQRLLKEHITQEDEARFKERNLQDTKTASRFLLNYIADNLAFAPFQTERKKHVTAVNGSVTAYLRKRWGITKTRANGDLHHAVDALVIACTTDGLIQKVSRYAQYQENRYSADGGLVVDLHTGEVVAQFPEPWAHFRQELDARLSDDPARAVRGLGLAHYATGEIRPRPLFVSRMPRRKITGAAHKETIKSPRALDEGLLVTKTPLNALKLDKDGEIAGYYKPESDRLLYEALKERLRQFGGDGKKAFAEPFRKPKHDGTPGPLVNKVKLCEPTTLSVAVHGGLGAANNDSMVRIDVFHVEGDGYYFVPIYIADTLKPELPDRACVAFKPHAEWKQMKEENFIFSLYPNDLFHVTHKKILKLSLANKESTLPASTELKETFLYYISAGIAGATISCRNHDNTYEIKSLGIKTLEKLEKYTVDVLGEVHKVEREPRMPFTNKEG

SEQ ID NO: 2371 - protein, 1169 aa, unidentified
  REGION 1..1169: note = Description of Unknown: Cas Enzyme sequence
MGYRIGLDLGISSIGWACVEDKENGEPKRIIDLGTRIFDRAENPKDGAPLAAPRREARELRRRLRRRNHRIKRTKILLEKYDIISQQEIEKMYENYNFPNTPYELRVIGLDNKLTNKELARVLISLVKKRGYKSNSKSEESNDKETGKLLTATKDNENLMKEKGYRSVAEMYLKDEKFKMRLPNGQIATRIDKNTGKEIEIIKIKNSINDYKNTPLRKLLVEEIKLILNKQKEYNPKITDQFINEYLNIFTSQRNFDEGPGEPSPYAGNQIEKMLGKCTFEREEYRAPKSTYTFEYFKLLQDLNHIKIIKYELKQDNEIVQTVRTLTEEERKKLIELAKKTPTLNYYKIRKEIKLKENERFNMCRYKSTREFTDDVNKEAENDNKKIKEFQSYHEIRKALDKYKKEYIQELSTNDLDSIGYALCVYKNDKKRIEYIKTNVTQIPDEVINYLLPLSFSKVGNLSLKAMKKIIPYLEKGLTYDKAVNELGKIDSNYSDFRGVVNTEKRRKLSINNLEDNISNPVVRRAVSQTIKVLNAITLKYNSIYGKPDLVVVELARELGKSFKERQSIEKIYEENRTRNEKAIQEIRELGKTNVTGKDIVKYKLWKDQNEICIYSGKHIKVEDLFTDAVDIDHIIPYSQCFDDTYKNKVLVLASENRQKGNRTAYKYIKEAGKNLEEYEVRVNNYIKDYRKKERLLKADFSTEDAKNWKDRNIEDTQYISRLVYKLINNYMEFSDNPNVNRKVRNINGAVTHYIRNRLGIEKIRADGDEHHAVDACIIATTSNYMVNKITRYSQYIDGRFMNDRGEYIDIETGEIINKEEYEEEYGPKFPEPWEGFRRELEIRSSDDVANRAEKTPEELKNIMIQEINDEIKNGKLYSYIEHDDGINRFDDIEPIFVSRMPRRKVKGQAHMETIRGIEKENGKLKTVTKTPLTKLKLDDNNEIKNYSKKAKQDDKLLYDALVEQLKKFNGKGEEAFKEPFFKPKKDGSKGPIVNTVKIEENATLGVEFKEGKAFAGNGNMVRIDVFYVEGEGYYFIPIYVADTIKKELPNKACVANKGTDKWKTMDDKNFIFSLYPNDLIYIESEKGIKLNGNNDNKKEQIEVKKLFAYYVKAGISTAAITIDNQDGEYTQPGLGIKGLKKIEKYDIDVLGNYHKIKLPEKRIKFNIN

SEQ ID NO: 2372 - protein, 1069 aa, unidentified
  REGION 1..1069: note = Description of Unknown: Cas Enzyme sequence
MNKKIDYALGLDIGITSVGWSIINLNKNRIEDLGVRIFNAAENPKDGSSLALPRRMARGRRRLLRRKAYRVKKVKRLLVKENILSQDELNGLFENKNVISVWECRVKALNEKVSKEEWAKILINFCKRRGFKSNKKSNSEDKEEGIILESIKANEQKLEESGYRTIGELIYNEVNNSKDKYKPLRNKYGSYSRCVSRSMIKDEIYYLFEKQREFNNEYASKEFESKYIEIFDSQRPFSKFEDLEKMVGNCTLEKNEKRAPKQCISAEEFTLYDNMNRLSIINNGDKRKLSKEERKIICDEAFKKKELKYSTLRKILKLKDDDLFSTLNYNLEKADKSKTENAKFVSLSGYYEIKKVISYGISKEYFESIKDSRKLLNDIVYVLTVSKTDEDTKKQLSIRQVPEEIIDCVCNNNISFSKFNNLSIKAIENILPYVKEGYQYNEACEKVGYDFKGMFKGEKSYKLPVIQIDEIVNPVVNRALAQTRKVINAVIEQYGSPVRINIELARELAKNFSDRSKIAKEQEINRANKEKIIEEIKELMNKEPTGSEILKYRLWKEQNGECAYSQRGITIDELFTPGYCEIDHILPFSRSFDDGLNNKVLVLGKENQRKGNRTPCEYLGSNEERWNAFEIWVNNSTLRYKKKNNLLKKKFLRDEQKDWKARNLQDTQYICKYIATFVNNRLKFNEDSEFSRPQKVITVNGRATAYLRAVWGLIKVRENGDKHHALDATVVAVTTQGMVQKISKFNKANELRSFKEIDEFVDVETGEVIDVNEYSDIRKNKLIPRPWQGFSEELKIRLSNDPISELNKYPISTYDKEFIRDTVRPIFVSRVPFRKAKGKLFKETVYSKKAFTQNGYVAKKKLVDLTLKDMDNVYNYECDKILYDAIKEKLIEADGKAKKAFEEEFRKPTKSGKLGPVVKSIKIIAPKMPINDGIDMNEGIVQKEGIVRIDIYEKDNKYYAVPVYRYQIAKGIIPKKAAVASKKEEDWTIMNETYNFKFSIFKNDLIEIRYKNKKGYFGYFDGFDRSTASLTIEEHDNSNRNRGIGIKTNVIVFNKYFVDVLGKYYLSNK

SEQ ID NO: 2373 - protein, 1275 aa, unidentified
  REGION 1..1275: note = Description of Unknown: Cas Enzyme sequence
LSIGYLTQRGYNRGMDDGIKYSLGLDIGTTSVGWAVVNLDKERIEDLGVRIFERPENPKNGKSLAEPRRTARSTRRRLHRRRQRLNYLKQFFINQGLLTKQEVDNIIGSAHTKAWHQAHDPYQLRVKGLTEKLSPDELLIALYHIAKRRGYKSNRKSIEQSDTAGDGKKVNGAISKNDQILSEMKYSSVSQALLTDNRFRERKRNTIDDYRCSFSRVDFLDEIRHILDRQKDFYPNELSIDHINQLLGIDVYHDENGQPIPIDHKLTNNDINRLTKHGQTTLNGIFYQRPFMTSELINRMRGKCPLEKDQPRAPKASYSFELFRLAEDLSHLQYTLDFVETGTDWQVRKERKRQAQFLTADQIKACVDKCLKTQTVKYSAIREVLGFKDDNSFQFTYIRGKSPDEKTLAKDPLAKEKNTFAQLRFYHGVKSVLKDLPNDWQDVSSDQDLFDKIGEVLTCNKDDYSIREGLIEVNKDRSAQGKAELSDEAINAIVNSKLSFAGFGHLSLVALRKITPYLLKGDGMTYDKAVEEAGYQFTAKLSGHKNLLPPLSEEESHQITNPVVKRAVSQTIKVVNAIIHKYGAPYRIGIECAGELAKSFNERKDIKKRQDKNAENNQEAVKELRSGKLGSDGEQFEAQVAPTGTSITKLNFYKQQDCKCPYCGEPINLSKIFSDDNYAEIDHIIPFSICGNDTKANKVLVHTTCNQIKGNQTPYQTWGNDPERWKIIEATARANHKLGAAKQRRLLAQTLPDEDWSLHAINDTRYISKFISRYIKSNLKFRPMDDTDDDGHTQRQRVIMPAGAITSYLRRMWHIGHKDREEDCLHHSVDAVIVALTTQAIIQDCSVYSAYIDDHTKMQFGDNASQAGSAKLVRALRQITDPATGEVKEADYKKLMQDMLPWPRFDEELRKREEQPDPVNDNLAIWRNKFSDLYKDQDSDFINRIHPIFVSRMPKRGVGGKTNEDTARSVKTKDNDDKTRSARVKLADLTLDKLNSSAIRDVDETLYGQLKQYITDRQKWQNEKNKWKAARQKQKKHLDKSSTDSEADLTLANLPPEPIEPKVYKSNKRFDKNGNPISPIKSIKVYDPHPMTSGFLVNNGNAYVNNGSMVRLDVYKRPNKKGKIEHFFVPVYAHMIKKGHPEIKPTKILPEPKKGTPKEIDDSFSFVCSLFPNDYVKVTLGSEVKEGYYVAYDITNCKIKLLPHAGTSKDLPTKGKDKSNSDQSDQSADETNDNDKKKTGVKHPNRYPAFRIAPRSATKIERLDINVLGDNYKWD

SEQ ID NO: 2374 - protein, 1156 aa, unidentified
  REGION 1..1156: note = Description of Unknown: Cas Enzyme sequence
MRYSLGLDIGTSSVGWAVLDLDKERIHDLGVRHFDAAEKIENHKAVSLAKPRRDARSARRRLKRRRQRLNNLKKFFVDQNILTKDQVEEVLNPESDYNKLDVYALRSKAITEELSPEELLKVLYQIAKRRGFKSNRKVVEESDKEDGRVTKALKANEQFLIENNYTTVGDALSHDAKYAAHKRNKRNDYTNSFARSDFLHELENIIRVQQHYALKNIPAQAINDLIYGVSDGQVTNINAIMYQRPFTTKDLIEKMVGDCTFEKDEKRAPKASYSFEMFRLASDLVHLAFIPRNLSKRQAKHDNLEIRLSPERIGKVINAAKKQKSLTYRKVRSIAGISEDYVPKDTRGKKKDGDEFGEDNTFGGLKAYNDVRLALKDLPEDWTKIDNESMINKIAYILTTQKTDDCIRAELSQLQISDQAKEAIVKIKPTNFKAFGHLSIKALQAITPKILEGMAYDKACEAAGYDFKKQSASLEQITNPVVKRAIVQTLKVVCAIRDKYGEPYFIKVETARDLAKSYKDRQRIEKDNKDNQGYNEDIKSIVTDGYEASPKTKRGKQLLSHLRELNVPLNKNADLNGQQIIKVKLYREQNGVCLYSGKEIDFETMLRDDNTYQVDHIIPFSRSNDDKMTNKALVLTKENQDKGNKTPFEYFGTDEKRWKEFTARVESLYKTRDVKTSDKATNATNYKYNGYAMKKKQNLLTQAYKNEGWGASALNNTSYITRFVQNYLRQEVFPGETRQCVIAPNGTTTAYLRKRWGLAKDRSEDILHHAKDATVVAAIDAKIVYQANLFSKEQEMKKYLVNANTIEEKRQILLEFTDKDTGEITDEEAFSKAQKDLAEAEYFKLRSDEKTQNRFPQLWPDFSKEVTKRTLNTDITTLQNELRGIEHYDEKFRLDVKPIFVSRMPRRKATARAHKETIFSPKIEDNDQRTVRKPLSELTAQLLEKSVLVESDKLLYHQLRELLDKTATYDKDGKRTDHPERAFSEPVYKGNRRTDKNGNQLSPVSTIKIYATKPDDSGKYINNQCGFVDNDSMIRVDVYMKYVDSREYPFFVPIYAHSIKNYSRKIRPALRGFSTIDKTFKFVCSLYPNDYVKIKFDDAEKNVEGYYIQYGSSNAAIDILPMQAARKDQRIVCSARLATKIERLDINVLGDNYKWD

SEQ ID NO: 2375 - protein, 1234 aa, unidentified
  REGION 1..1234: note = Description of Unknown: Cas Enzyme sequence
LSIGYLTQRGYNRGMDDGIKYSLGLDIGTTSVGWAVVNLDKERIEDLGVRIFERPENPKNGKSLAEPRRTARSTRRRLRRRRQRLNYLKQFFINQGLLTKQEVDDIIGSAHTKAWHQAHDPYQLRVKGLTEKMSPDELLIALYHIAKRRGYKSNRKSIEQSDTAGDGKKVNSAISKNDQILSEMKYSSVSQALLTDDRFRERKRNTIDDYRYSFSRVDFLDEIRHILDRQKDFYPNELSIDHINQLLGIDVYHDENGQPIPIDHKLTNNDINRLTKHSQTTLNGIFYQRPFMTSELINRMRGKCPLEKDQPRAPKASYSFELFRLAEDLSHLQYTLDFVETGTDWQVRKERKRQAQFLTADQIEACIDKCLKTQTVKYSAIREVLGFKDDNSFQFTYIRGKSPDEKTLAKDPLAKEKNTFAQLRFYHGVKSVLKGLPNDWQDVSSDQDLFDKIGEVLTCNKDDYSIREGLIEVNKDQSAQGKAELSDEAINAIVNSKLSFAGFGHLSLVALRKITPYLLKGNGMTYDKAVEEAGYQFNAKLSGHKNLLPPLNEEESHQITNPVVKRAVSQTIKVVNAIIHKYGAPYRIGIECAGELAKSFKEREDIKKRQDKNAENNQEAVKELRSGKLVSDGEQFEAQVAPTGTSITKLNFYKQQDCKCPYCGEPLNLSKIFSDDNYAEIDHIIPFSICGNDTKANKVLVHTTCNQIKGNQTPYQTWGNDPERWKIIEATARANHKLGAAKQRRLLAQTLPDEDWSLHAINDTRYISKFISRYIKSNLKFRPMDDTDDDGHTQRQRVIMPAGAITSYLRRMWHIGHKDREEDCLHHSVDAVIVALTTQAIIQDCSVYSAYIDDHTKMQFGDNASQAGSAKLVRALQRITDPATGEIKEADYKELMQDMLPWPRFDEELRKREEQPDPVNDNLAIWRNKFSDLYKDQDSDFINRIHPIFVSRMPKRQGAGAVNKETVRSNKTKDDDGKTRSAKVKLRDLTLKQLSNSAISSNEGVYEQIKQYIIDRDKWKDEIKAWRKAKKASKQTSNTDEANDGRDELSVPAEPQEPKVYKSNRRFDRNGNPISPIKSIKVYDPHPMTSGFLVNNDTAYVNNGSMVRLDVYKRPNKKGKIEHFFVPVYAHMIKKGHPEIKPTKILPEPAKGPKEIDDSFSFVCSLFPNDYVKMLIKSRNSEGYYIGYNINNGAMQIIPHSASSKGNFIQVSPRSASLIERLDINVLGDNYKWD

SEQ ID NO: 2376 - protein, 1273 aa, unidentified
  REGION 1..1273: note = Description of Unknown: Cas Enzyme sequence
LSIGYLTQRGYNRDMDDGIKYSLGLDIGTTSVGWAVVNLDKERIEDLGVRIFERPENPKNGKSLAEPRRTARSTRRRLRRRRQRLNYLKQFFINQRLLTKQEVDDIIGSAHTKAWHQAHDPYQLRVKGLTEKLSPDELLIALYHIAKRRGYKSNRKSIEQSDTAGDGKKVNGAISKNDQILAEMKYSSVSQALLTDDRFRERKRNTIDDYRCSFSRVDFLDEIRHILDRQKDFYPNELSIDHINQLLGIDVYHDENGQPIPIDHKLTNNDINRLTKHGQTTLNGIFYQRPFMTSELINRMRGKCPLEKDQPRAPKASYSFELFRLAEDLSHLQYTLDFVETGTDWQVRKERKRQAQFLTADQIKACVDKCLKTQTVKYSAIREVLGFKDDNSFQFTYIRGKSPDEKTLAKDPLAKEKNTFAQLRFYHGVKSVLKDLPNDWQDVSSDQDLSDKIGEVLTCNKDDYSIREGLIKVNKDQSAQGKAELSEKAINAIVNSKLSFASFGHLSLVALRKITPYLLKGDGMTYDKAVEKAGYQFNARLSGHKNLLPPLSEEESHQITNPVVKRAVSQTIKVVNAIIHKYGAPYRIGIECAGELAKSFKEREDIKKRQDKNAENNQEAVKELRSGKLVSDEEQFEAQVAPTGTSITKLNFYKQQDCKCPYCGEPINLSKIFSDDNYAEIDHIIPFSICGNDTKANKVLVHTTCNQIKGNQTPYQTWGNDPERWKIIEATARANHKLGAAKQRRLLAQTLPDEDWSLHAINDTRYISKFISRYIKSNLKFRPMDDTDDDGHTQRQRVIMPAGAITSYLRRMWHIGHKDREEDCLHHSVDAVIVALTTQAIIQDCSVYSAYIDDHTKMQLGDNASQTGSAKLVRALQRITDPATGEIKEADYKELMQDMLPWPRFDEELRKREEQPDPVNDNLAIWRNKFSDLYKDQDSDFINRIHPIFVSRMPKRQGAGAVNKETVRSNKTKDDDGKTRSAKVKLRDLTLKQLSNSAISSNEGVYEQIKQYIVDRDKWKDEIKAWRKAKKASKQTSNTDEANDGKDEPSVPAEPREPKVYKADRRFDRNGNLISPIKSIKVYDPHPMTSGFLVNNDTAYVNNGSMVRLDVYKRPNKRGKIEHFFVPVYAHMIKKGHPEIKPTKILPEPKKGTPTEVDDSFSFVCSLFPNDYVKVTLGSEVKEGYYVAYDITNCKIKLLPHAGTSKDLPTKGKDKSSNDDQTDQSTDEADDNDKKKTKIKHPNRYPAFRIAPRSATKIERLDINVLGDNYKWD

SEQ ID NO: 2377 - protein, 1071 aa, unidentified
  REGION 1..1071: note = Description of Unknown: Cas Enzyme sequence
MRYTIGLDIGIASVGWAVINEDKSRIEDLGVRVFKKAEEPDGKSLNLARREARGSRRRIRRRATRMQKVKELLVKYNLVSEKELETLYIITETTPDVYELRAKGLDRLLSRQEFARVLTNIAKRRGYKSNRKIDEEDKEVGKLSKGTIENKRILQEKGYRTIGEMFYKDEKFEYNKRNKAGEYNSTVLRSMLIDEVHTLFEMQRKFKSEFANEEFEKEYVEVMTYQKPYITPELLEKMLGKCTFEKGEPRAPKNSYTFERFMLLQKVNNLNIYINGEKVEIPQEKKKEIIELAYKQSEIKYTQLRKKLELPIEARFADLNYQIKRTEDESEEDLVKKIEDKKFVKLEGWHKIRLALKENKDKFEKIEKNPELQNIIADALVRNKTDETIKNYLEKSDIDEEIINAILNINFTKFGHLSYKAMNKIIPELEKGLTYDKACENVGYEFKGRKNELQYKLPPVTELEDEILNSVVLRAVSQTRKVINAIIDKYGSPTAIYIETARELSKPYDERMKIEKRQKENAANNDQIKEYIKETFGFDPKPFDIVKMKLWREQNGKCAYSSKPIPAERLYEENFVQVDHIIPFSRCFDDSYQNKVLVLTDENQKKKERTPFEYFGEDKERWHQFEEFVNLTYKFNTRKKENLLIKNFNEEKSKEWIQRNINDTKYISKFMYNYIANNLKFADSESKRKVYNINGQATSILRHYWGLKKDREESDKHHAQDAVIIACATNKNIKKVSDYSRRKLLYKNNEIIDEETGEIIDKKYNIDISIKEPWPKFREEVEARMEDADNNGQLYALINGNFTNYDDVDITHIKPIFTSRMPERKITGRAHKDTMRSQKFIQQGQNFTVVKKPLKAISKQEIEGIINNPDFKNLYLSDKKLYDDIYQKMKEADFKAEKAFANEYRKYSKNGNSPIVRSIKVASAGATGVQLKNGAIAENANMVRVDVFEKDNKNYLVPIYVSDFAKNELPNKAICANKDEKEWIEMTEKYKFKFSLYPNDLVKIKRKNEKEFYAYYCSTHRGTGNINLLLVNGEARKDGVGIKNTEIFEKYQVDVLGNISKVNKEKREGVK

SEQ ID NO: 2378 - protein, 1178 aa, unidentified
  REGION 1..1178: note = Description of Unknown: Cas Enzyme sequence
MKYRLSLDLGVCSIGVAVLSLDEQNRVTDIKDKGVCIFEVSEGAEDRRLKRSQRKNTERTRKRLSLLSETLAEAGLWSFDEDTQDRLIKLSPYAIRAQGVNGKLNDIMQLGRAVLHMAKHRGAGFVEMQKVELENKKDEDEDNSTRKKKTTVSEYAKLAKCLEDTGAKTIGEYFFMRLHKSYKNNNIEDENRRYVRQRKTGDKVKVDYAIPRYLVKEEFNLLWDKQANYYKALEGKILKQRIHDILFYEKYHRPYATGKCIFVDTEPRLCKAHPLNEKRRIYESVNNIRIQELKEQRKLTKDERDLIIEELLLKGQKIGQKGQAIRKQLKIDKNFTIVLADSIKPYLYSTPEYMAIDFLSKLDDEKLTEIVEFMAEPRLEDGREYLYNDQQVIDKLKEKLGIGDEKQISQLLAMLPKGRGSLGITATVKILELLKKDVISIREATDQLAKTDKRFIAEEERARAIQGKYDKLPYYGEILKTDTQPIADWQKKTNKSLNPLEAEYGKIANPAVHRILNQLRKVVNDIIRIYGKPYDINIELAREMGMSTKRKAKYERLQKEHRAKNEKAVDYLKEHKIRVTRDNILKWRLADEQNWKDAFDLERIHPRFEGFEIEHLIPDSLGGTDAPMNRVLIKRSDNLNKGNMYPYEYLQNKHGDNIYGILKEIRVNRNMPDGKRWRFESDAKEKFESGEDTDSITRYLTDTRYVCKLSARYLRAIIDYKQGDENNTRVLTINGAHTAKLRGIWNLDGIEYDLMGLNEEVPKYLPDKTHFVNLDTGEVLYQEKLDIDGNWKRLETQKNKHWKKKPRIDHRHHIVDAITIGFVNRADMQNINWHDKRGYEIPFMQLPVPLSSEDEGDRKKQLVIFRDKLKETLSDVKVYHKPEHSKNGQLHKETARLAFMKNPDKPTEIITKYQRPISAVLDKKSSLGKLLINTKTIRPKWHAAIAKCAEEMIRLKAAIESHFDESEEKLKQENQQLVKDGKKEKKISEAMIVQRAFNITLSNGEYKFTTFPEYQNKKSFVDIPKHKVVYDSGNNYCLDFYQDENGKVGWEVVNQFNANQKDFIPQWKQKGFKLIWSVQQGDVIELDTPQQWKRYNPEKKCLAVIKKLEKGFTYIKYQTDARAENKKEKDNLHIKQDFIGGGLSFYVESGARKVEITSFGKIKRKHKKLCNGKKETVK

SEQ ID NO: 2379 - protein, 1181 aa, unidentified
  REGION 1..1181: note = Description of Unknown: Cas Enzyme sequence
MKYRLSLDIGVGSIGSTILSLDEKNRANSIIDCGVCIFEVSEGAENRRLKRSQRKNTYRTKKRIDLLSKELAQAGLWSLDDDIQFELIKLSPYAIRAQGVNGKLNNIMEIGRAILHMAKHRGAGFVEMNKLELEIEKNNEKIEEDSDKKKKKELSEYAKLKKHLEESGAKTIGEYFFMRMHKAYKNNNITDENRRYVRQRKMGDKVKVDYAIPRYLVKEEFNLLWETQSKYYKQLKNNGLKDKIYDILFYENDSRPYATGNCIFIENEKRLTKAHPLSEKRRIYETVNNIRVQEHKIQRKLRKDERDNIINELLMKGQKAGKKSISELLMLDKTFKVVLDDMIKPYLYSMPEYKAIDFLNKLDDEKLAGIVEFMAEPKREDKKDYLYNDEKVIEILKNKFSTDDERQISQLIAMLPKGRGSLGKTATTKILELLKNDVISIREATDKLAATDKQFISEEEIARAMQGEHDTLPYYGEILKTDTQPMADWQKQINKSLNPLEAKYGKIANPAVHRILNQLRRVVNDIIRIYGRPYDINIELAREVGMSSKKKKEYETQKKKNKEKNDKAVEYLTHKDIRLRVTSTNILKWRLAEEQNWKDAFSPQDRIHPRFEGFEIEHLIPESLGGTDAPINRVLIKRSDNLNKGNMYPYEYLQNKHGDKVYGILKEIRANKNMPAGKKWRFESDAKEIFERGEDADNITRYLTDTRYVCKLAARYLKVIVDYKQGDENNTRVLTINGGHTAKLRSIWNLDGIEYDLMGLKEEVPEYLPDKTHFVNLDTGEVLYQEELDVDGNWKKCNDIKSKHWKKKPRIDHRHHIIDAITIGCVSRSDMQKINWFDKRDYELPLMQLPIPLSNGDNDGKARQLEIFRNTIIEKLKNTKAYHKPEHSKNGQLHKETARVAFMDNPEHSEEKITKHNRPVSAILKTRENLKNLLINTNTIKPEWDKDIVQDVQKMIKLKEAIESHFEVAQSQLEQENQQLVQNGNKAKKISEKIVLQRAFKIVRKNKEYKYDTFPEYENKKSFVDVPKHNVVYDSGNNYCMDFYVTEKGDVGREIITQFDINKRAFVPEWKKKGLKPLWSVQQGDMIELDTPPEWKKYTDNNRCFAVIKKFDKGFTYIKYQTDARGENRKEEENISIKQNFIGGGLTFYAASKACKIELTPFGKIARKHKKLWNGKKKTTK

SEQ ID NO: 2380 - protein, 1182 aa, unidentified
  REGION 1..1182: note = Description of Unknown: Cas Enzyme sequence
MKYRLSLDLGTGSIGAAILPLNKQNRVIDILDTGICIFKVSEGAEERRHKRSLRKNTYRTKKRLSLLSEALADAGIWSFDEEIQAGLIPLSPYRIRAQGVNFKLNNIQELGRAILHIAKHRGASFIEVQELELELEKQNQQEDESDGKKKNKKEELSEYAKLKKYLDDAGAQTIGEYFYMRLNKRYKRNNIKDKNRRYVREKTITLGGKPKVDYAIPRYLVKDEFNKLWDVQSKYYEKLKEKGLKDKIYDILFYGHDHRPYATGKCIFIKEESRLSKAHPLSEKRRIYEAVNNIRIQTITEQIKLKKSDRDLIINQLLLKGKKAGKKSIKGLLRLAKDTKIILSDMIHPYLYSLPEYKLIDFLNSLDDEKLAEIVEFMTEPKNPDKQGYLYNDDKVIEILKKKFNTDDEQKISQLLAMLPKGRVSLGKTATEKILKLLKKDVISFREATDILALTDKRFISEEEIARSLQGKYDNLPYYGEILKTDTQPIAEWQKKINKSLNPLEAKYGKIANPAVHRILNQLRKVVNDIIRIYGKPYDINIELAREVGMSSNRKKKYENFQKENRDKNEKAVEYLKEHKIRITRNNILKWRLAEEQNWKDAFDLQRIHPRFEGFEIEHLIPRSFGGTDAPINRVLIKRSHNDAKGNMYPYEYLSSIHKDQIYGILKEHRSNINLPDGKQWRFESDAREKFESGEDIDNITRYLSDTRYVCKLAARYLKAIVDYKQGEQNNTRVLTINGGHTAKLRTIWNLDGIEYDLMGLNPEVPKYLPSEPYYLNKETGEILKQEKIDIDGNWEKRDKVRNKNWQKKPRIDHRHHIVDAITIGMVSRADMQKINWHDKRGFDTPFELLPIPLSDIQNASKQEQLEIFRKMILACLKDVKVYHKPEHSKNGQLHEAKQGRYALMRNPLDPKKIISRYNRPVKEVLKNKTDLNKLLIDTKNIKPEWHKDIAQDADKMNKLKKAIVSKIEVAEKQLNEENLELSQGEKKEKNISEAMILQRAFNIVQKEKTYNHYTYPNYKNLESPIYIDKHKMVYDNIKDGNDRTDFYVNDKGKVGWECIRKFDANNKDFIPNWKRKGFKPIWSLHKGDMIELDTPDEWIKYTNEKRCLAVVDACHAKMGITLISDARDTKGKNGKHSIRDSMIRRLGFYTEHKARKIELTPFGKIRRKHKKLWNGKKEKIK

SEQ ID NO: 2381 - protein, 1155 aa, unidentified
  REGION 1..1155: note = Description of Unknown: Cas Enzyme sequence
MKYRLGLDLGVGSIGSAIIELDNEGNAKDIIDAGVRIFEVSEGAEERRLKRTARKNLVRTKKRLELLAKKLFENGLWPDENPEGTDKLKSKSPYKIRTDALNERLASPYYVGRAVLHIAKHRGAGFVSASEETEEEILEEGEKSKAKKSSYDMMLYHLKETNSRTIGEFFYNKIISGKGNNKTVRQKKYAIEKNIVDYAIPRYLVKDEFNQIWDKQAEFYPQMKKENLKKEIYDILFYERPAAPYATGKCIYFREEDRLLKAHPLAEMRRIYEEVNNIRILNDMGKRKLTLEERDSIVNELLLKGQNAGKQAIKKLLNLSAQHKISLVDDRVIKAYLYSRPEFANNEHLQNLNENELSSFIEFLAEPKMSKDKNARLYNEDALIEYLKPILKIDDEKEIGNLLTKLPKGRGMLGISATKIILEKLKEDVLTHREITDKLAETDKRFMAEEEIARQNQGKCFQLPYYGEILQTDTAPLPPLMINNNQSLNPDEIKWGKIANPAVHMILNQIRLVVNEIIKIYGKPYDINIELGRDVGMSTKKKKEFENRQKQNERLNEEAKNYLKEHKIAINNKNILKYKLAKEQGWKDAYNPTQNISSVFTGMEIEHIIPQAKGGTDTYNNLCLVNRNDNLNKGDRYAYEYFEEAKTPEQIREILKNARSRTPDKSWRFEADAHEKYEESGDKEESTRYLTDTRYVAKMAQRYLRAVVDCSDCDEVMQNRILAVKGGQTAKLRQRWNLYGLEYNLMGLDIPRYVDCSPYWLEQDTGEIIDGINKPDIDGKWKFFDKAKNKEWQPKPRIDHRHHAMDAITVACANHGLIQRMAEENDINKIYYPLPLTSVESVADFRRKVISCLKDVKVSHKPNHSKAGQFHKETGRTVLCQNPDDPNSLITVYSRKILQVVKSAKDLTKLLIPETIKNEWHEDIAEHKAKQAKLVQDFELYMNTAEQILIAENEQGVAEGKKEIKITEGRILLKAFRIIQDKGLWKGDKFRCYENNSSLVYIKKHGVAYEGRNNHCVDFYVKDGKVGWEVIKRFDANQADFEPQWKKDGGKIIWSVQQGDILELDTPDEWKQYTDKERCLAKVKKFSEGEFNIDYITDARMTSPKDKTLQYTFVNTLRKGLAYYTSHKARKVELTPFGKIKKKHKVLWNGSKTAA

SEQ ID NO: 2382 - protein, 1187 aa, unidentified
  REGION 1..1187: note = Description of Unknown: Cas Enzyme sequence
MKYRLSLDVGVGSIGSAILSLDEQNRVTDIKDKGVCVFEVSEGAEERRVKRTQRKNTERTKQRIYLLSHALAEAGLWSFNDDIQEHLIKLSPYAIRAQGVNGKLNNIMELGRAILHLAKHRGASFIEMQKLEMELEKNREGGEDGESKKQKEPSEYAKLVRYLEESKAKTIGEYFFMRLHKSYKNNNLDVDNGGRRYVRQRKTGDKVKVDYAIPRYLVKKEFNLLWDTQAKYYKQLKDENLKKKICDILFYEYDHRPYATGNCIFIENEKRLSKAHPLSEKRRIYEAVNNIRIQTQTEQKRLEKTQRDLIINELLLKGQKAGKRSISKLLTLNKTFKVVLGDSKKDSDEKGTMIMPYLYSTPEYKEIDFLANINDEKLAEIVEFMAEPIKPNKKNYLYNDEQLIEILKKKLGTNDEQKISQLLAMLPKGRGSLGKTATVKILELLERDVISIREATDKLAETDKGFVSEEEIARALQGKYDKLPYYGEILKTDTQPIAEWQKQINKSLNPLEAKYGKIANPAVHRILNQLRKLVNDIIRIYGRPYDINIELAREVGMSSKRKAEYEKQQKENRDKNEKAVEYLKKHTIRIIRDNILKWCLAEEQGWKDAFTLERIHPKFEGFEIEHLIPDSIGGEDARINRVLISRSDNLNKGKMYPYEYLQNKYGDKIYKILEFVRGSAMPEGKKWRFESDAKERFESGDADNITRYLTDTRYVCKLAARYLKVIVDYKQGDPNNTRILTINGGHTAKLRSIWNLDGIEYDLMGLSDEVPEYVPDKTHFVNLDTGEVLYQDELDVDGNWEKCTDKKNKNWQRKPRIDHRHHIVDAITIGFVSRADMQNINWHDKRGYEIPFMQLPVPLSGEKGQERKKQLVIFRNKMVDSLKNVNVYHKPEHSKNGQLHKETARFAFMTNPTDSEEKITRHKRPISAVIKTKSDLNKLLINTNTIKPQWHDDIKRDALEMIRLKAAIGSHLGEAEEQLKQENQQFIKKGKKEKKISEAMIVQRAFNITHSKGEYKYTTFPEYENKKSFIDIPKHKVVYDSGNNYCMDFYINDKGKVGWECTNQFNANKKGFIPLWKKDGFKVIWSIQQGDMIELNTPKQWKKYTPNDRCLAVVKKFRNGELVIRHQTDARAENDKEKEKMYIKQDFITGGLSFYTESGARKIELTSFGKIMRKHKKLWDGKKKTTK

SEQ ID NO: 2383 - protein, 999 aa, unidentified
  REGION 1..999: note = Description of Unknown: Cas Enzyme sequence
MRRRVFGFDLGIASIGWAVVDFDNEYYDMETGEILADKAKGSVEIAQGKIIDCGVRCFPVAENPKDGSSLAAARREKRLARRACRRKARRKEGLRGLFVAKGLVANSEEFTEEICKNQFGGDVWDLRVKALHEKLSKEELLRVLYHLAKHRGFKSARKAQEEKDKDSGKVLSAIRVNMALKEEGKSLAQIIVEKAGVNGKKRNFTVSVKKGKNEKEVEADYRNSIPRSEVLAELNMIFATQKEYGIFTQELYDDFMRIAFRQRGIKSVGDMVGRCTFEKDEKRAPKEAPTAEFFVAWSKINNLVVYEDDKKRFLTAEERQLLFELLKKTKEIKYKVISAKIFKDKNIQFACLKYGSKSKIDDNGEEKQAAPENAVFYSMKGWHKLQSAFKALPHIFDDIEKLDKAVTIIAEEKEDREIQEKLENLGYSQEIIAQFLTLTFDTFINLSLKALYKINPYLEKGEKYDKACASAGYDFKEISEKLVEKKGKLLPVIDKDKQTKVPVVNRTVAQFRKVYNALARKYGTPDQINLETGRELKKSFEERREISKRQEENRNKNQSAVTQIEEKGYKATGTNILKWLLYLEQDCKCIYSGKPMDINRLFEVGYVEIDHILPYSRSFDNSYSNKVLVLSTENQEKGNRTPFEHIGKNNAGSEKWMEFIGRVSSHVNLHRSKKEKLLNETFNEKELEFRERNANDNSYIALYMKRYLEDGIDFSESLHTNIKNKVQVRSGNVTAFLRHQWGLEKNRTESDKHHAQDAIVIACATQSMVQALSKISRKEGLVHREHVHKKYVMAKPWGNFREDVLIALDKVFVSRPPRKKATGGLHGETIYTLNEKKKQFEAKNVKSGFYVRGGIAGNSDMLRTDVFCKKNKKGKNEFYLVPIYKSDLGKNLPNKAIVAGKGEDEWIVVDESFTFIFSLFMDDLVKVQKGETIYFGYYKGSDRSTAAITIEAHDRCWKQRSIGVKSQDAIIKYQVGLLGDYVEIKEEKRLFLTSTKKRI

SEQ ID NO: 2384 - protein, 1055 aa, unidentified
  REGION 1..1055: note = Description of Unknown: Cas Enzyme sequence
MSKKVLGLDIGIVSVGWSVVDLESGKIVDCGSRIFQEGNSTENLKRRTTRGKRRLIRRKANRISDAKKLLAKKGMTVHNSLVNPYEARIKGLNDKLSNDEFVSAYLHIVKRRGSSFETVEDDETKKDESDKTKAVLSRNDAIIATGKFPCQIQFERLKECGKARGKENNFRTIHYIKELEKILSNQGFDREFESKLLDLVRRKRKYYEGPGSQKSPTQYGRFFYNERGEIEEVNLIEKMRGKCSVYPQEFRAPKLSPSAELFNFMNDLNNLSVGDRKIEKSEKEFILEKHIYSGKHSITPKELAKVLSVNVEEISGFRIDKSNKNILTSLVGYKLLLNAIDDEHYNRDFKLLDDIADVLTATKDVEERKDKISKLNNQFSAEVVANLANLNKFTKYHSLSFKVIKELLPELIDTSDNQMQILSRRKLIKGDVEIYKGLVNIPFDDNAILSPVAKRSINESLKIINKARKIYGEFDTVIIEMAREKNSDDKKATINKIQRNNEKLNKYIEELTERKDLNLKTRQKIRLYLEQECKCLYTGMPIDLNTLISDSTAYEIDHIIPISIAFDDSMHNKVLVYRSANQSKGQRSPKMAFDNNKFEGWGYQEFHTYCLSLLKSSQITTKKFMYLVFDRDITSFDTMKEFINRNLVDTRYASRVVLNALQSYFRANEIDTNVMTIRGAVTSQFRKMIDLPKNRDQDYTHHAIDASIMALLAKKKSFYEIMRNTTIKDDIINVDESELPVEDYYDSNLIKLIKGIKNVKSVKISHKVDRKINRKIANETIYSTRKVEGVEKVVAKYSDIYDSEFLNLAKDIAEGKTEKYLMKEIDPKTFNILESVVNDYLRDHGKIEKKNPFSLFKDEHGAIRKYSKNNNGPVVTSIKYYHKKLGNYIDVSERYQKASDESKAKRVVLQQISPYRTDFYLCDDGTYGFVTVRYKDIRYYKSEDIYRINSDWYVLEKGNKNIDSNAKFVFSLNRNDYLEITKKEKGSISRGLFRFIATNDDKRRIIEVKPIDYYDNNRLKPTIGRDIINIKKFNVDVLGNMYEVETEDLKLEFKL

SEQ ID NO: 2385 - protein, 1166 aa, unidentified
  REGION 1..1166: note = Description of Unknown: Cas Enzyme sequence
MKYRLGLDLGVGSIGSAVIQLDEQNNAVDIIDAGVRIFEVSEGAEERRLKRTARKNLIRTRKRLELLSKKLFENGLWVTEYPEGTDKLRAKLPYKIRHDALYGQLASPNYIGRAILHIAKHRGAGFVSAAEEIEEEVLDEGEKSKKKASSYDMMFQHLKEYNAQTIGEFFYKRLEESYAKNENGIKAALDKRVIRQKKYALEKNIVDYAIPRYLVKDEFHKIWDKQAQYFPQMNKEGLKQEIYDILFYEKAPAPYATGKCVYFRGEDRLLKAHPLSEMRRIYEEVNNIRIETDMDRRRLTLEERDKIINELLLKGQNAGKQAIKKLLNFSGQVKISLVDDRVIKAYLYSRPEFIGNEYIKSLSSRALEKFVEFLAEPKDTDDKNGRLLNEDKLILKLKTLLKIDDEKEIGNLLTKLPKGRGMLGKTATLILLDEMKSAVLSPREITDRLAKTDKRFMAEEEIARSLQGKCDELPYYGEILQTDTQPLPPLVIKNNNTLNTDEIKWGKIANPAVHMILNQIRLVVNDIIRIYGKPYDINLELGRDVGLSTKKKKQLENSQKQNEKLNEEAKRYLQERKLFISRTNILKYKLAKEQGWVDAYNPSVEIPQDFSGFEIEHIIPRAKGGTDTFANLCLVNRNDNLNKGDRFAYDYFEETKAPEEIRKILDNARKRTPQKAWRFEADARERFEDTGDEEETNRYLTDTRYVSKMAQRYLRAIIDCDDSDEVIHTRILAVKGGQTAELRKRWYLQGVEYELVGIDVPRYFSCAPYWQNEATGEIIEGEKKPDIDGNWIYRNKSKNKEWQTKPRIDHRHHAMDAVTVACANRSLIQKMAKEVDIRRLEYPLPMVSIHSVGDFRRRVIEVLKNINVSHKPNHSKAGQLHKETGRVFIKDSVTRKGAKLTYYTRQMFSVLKNKKDLAILEVPKSVLKENDPEIEKYAVACLNLKKYFEENWELTKEILEREQKRNQKDGFKDKKISDFAIISHIFKKAIKDEIWSNSIFTKYEVNTSLIYLPFRKLYYEAGNNHCVDFYEKDGKVGWEVIKRFDVNQADFEPQWKKDGGKIIWSIQQGDLLELDTPEEWRGYTDKERCLARIKKFSAGQMTIDYATDARGTMKAKGDPDYMLVGSLVNRGLSYFTKNKARKIELTPFGKVKKKHKVLWNGTKTKS

SEQ ID NO: 2386 - protein, 1076 aa, unidentified
  REGION 1..1076: note = Description of Unknown: Cas Enzyme sequence
MVKQVFSAPSKRVGSVMLIYHVYGLDTCLNNITMGISMKTNLSYRLGLDVGTNSIGFALVELDDQENPVRPLYLGSRIFSDGREDKTKTSLAVARRDARGMRRRRDRYLQRRQKLLEQLIALQLMPKDSNERKKLALLDPYYLRAKGLDNVLSYHELGRVLFHLNQRRGFQSNRREDKKADETGKIKTAIEQLKTKLEKNNYRTMGEFLYHNTSKRVRLQGEGTKLVYDFYPQRDMLKAEYDRLMETQARFHPDFFSEEEIRRLKDTIFFQRPLKPVEKGKCSLIPGEIRAYAALPSSQRFRILKEVSNLRIMDKFRRNRDDLTQEQKYAIIAELYKNKTKGFSALRKSINLDSTSVFNLETEARDKLEGALTHITLADKKCFGTLWATLSLSQQDEVVEKILDDTLTEEELLLELKSSYPSLPDANLVNSMNVKLEDGTLRYSSKAIYRLIPHLEAGNDEYDARQKEGFTDIKDRQTLDELPPYPELLDNYLGTNGKIANPTVHIVLGQIQKLVNELVKNYGKPKEIAIELARDLKMNKKEKARYERETRENQKNNEKYDEQIQEHGASRNNENRLKLKLHTQQSGICVYSGKSISITQLLSDEIEIDHILPFSKTLDDSAANKVVVFREYNRTKGNKTPAEAFGAGEALLERIALLPGSKKWRFLPDAMKQFEEEKENGDKGWLARQLTDTAYSAKLAREYLRYLVPDRKEGFPAVDTYPGGMTAKLRKAWGLNALINANGNEKNREDHRHHAIDALVIACSNRSMLQAISRATGAGVVIDDNWLKQIPPLPFDRTALQQQIDAIVISHKIDHGTAGQKGSTSGRLHEDTFYGMATIQPEEMQKEGRIRLIVRKPLQGMEEKKFTDICDPVIRRRLVEYVTAQKAIGIKAEVAIAQFGKENTIRRLRVFVEKSADSVKPIKDKESKPYRWVATGSNHHIDIYCPIKDKKELKIKAMKWYAETVSTFDANQKDFQPEWRKDHPTAKLIMRLHINDMVAYEENGKTEIRRVRMLDGFYNSPHLVPHLEANDKNSKRFSAKQLEEKNARKISVTPAGKVYDPKKSPAPKIKKRLILL

SEQ ID NO: 2387 - protein, 1357 aa, unidentified
  REGION 1..1357: note = Description of Unknown: Cas Enzyme sequence
MEQILGLDLGTNSIGWAVVERENKEFRLVKKGVRIFQEGVKIEKGIESSKAAERTEHRSSRRLKFRRKLRKIETLKVLSEHGFCPRLTLEQLIDWRYKKTYPANIAFRDWLRTDINTSKDERQRQIRNPYYYRNLAVTCKLNLNSEEDRYKIGRAFYHIAQRRGFISNRLEGTKESDGAVKESISELNVAKGDKTLGQYFYSNYCNNEKIRNVYTHREEHYLQEFNTICEYQNIPGEIKEKLYKAIFYQRPLKSQKGLIGKCVFEADKQRCSASHPKFEEYRMLCFINNIKIKTPNDDKLRFLNEDERGKIKPLFFRKSKEVFDFEDIAKAVSPKKRYKFFKSPNTEPGDFLFNFSMKTAVSGNPVSSRLKELFGDSFMDVEFEYTREKDGKQSVIDINDIWHVVYTFDSSDKLKEFGGKRLGLNDEQAESFVKIHPKREYSSLSLKAINKILPYLREGLIYSHAVFLANMEQIIPDFVWNDPQNKKIISEGIKRIIETQNEEKIIIDVINGLIKNARDKSYVWSDEAKGIYKKDLFGEIRSQLGEKKYSSFSVAEKQYIEKNSLGLFEEQMNKNMGRGEFLQSKRIEDRVKSFLSDNFDIDDSRLQLLYHPSAIEVYKPPYRAEDGKYYLGSPMITSVRNPMAMRSLHQLRKLINELIRNEIIDKDTKINIEMARNLMNSNERKAYQEWQRDRENLRKTYYNRIKEYYAYSGSNAEPSQDDILKYQLWEEQNHKCIYTGKEIAVSQFLGANPSYDIEHTIPRSQSFDNSQVNKTLCNNVFNRDIKKNKIPFELKNHEEILARVEHWKNKYEDLEKQIQNTVKQARGNIDKQKKDRIIQKRHRLRFERYYYYNKYRRFVMEDVPEGFKNSQIVDTGIITKYARLYLKTLFSNVYTVKGNTVADFRVLWGLNKEYIKKERVNHIHHCIDAVTIACITKESYENLAKFYHEWEYLEKAGMERKPKVNKPWSTFVEDIKDLEKEVLVSHYTPDVFPKQTKKKLRKKSIVKKNKDGVPIYQRGDTVRGSLHQETFYGAIEQEIQNKEGEKEKQIKYVVRKPLDDLDNNGIEKIVDDRVRNIIINARKKEKELRVDLEDLRKQMNNAEEYEERDIQREIEKIENDIKKLYCLPNKNGNPVPIRKVRVYTPMLTNPIHLKEHRDKSMKRRYPHKEQYHVANDGNYMIAIYEGKNEKGKTKRDFEIVNNLEAGEYFKLSVQREFKPKGVGKYEGLISALKENEDIQMPLKGILKIGTMIILWEDNPEEVWEIEQEEISKRLYKVIGLSNQRIKSKAGKINEYATIVLRFHQESRPSSELKVQDGVFVRNEDYKAQRKLNHNQFNALIEGLNFEISTLGEIKRMD

SEQ ID NO: 2388 - protein, 1430 aa, unidentified
  REGION 1..1430: note = Description of Unknown: Cas Enzyme sequence
MKTKNIIGLDLGTTSIGFAHVIEGEKPENSSINMLGVRIIPLSIDEQTNFEKGKSVSINADRTLKRGARRILNRYKDRRKNLIEVLRKANVISEETVLTEDGKNTTHETWGLRAKAVLERVEKDQIARILLAINKKRGYKSSRKSKNEDEGKAIDGMTIAKQLYEQNLTPGQLVYQHLKDGKKYIPDFYRSDLQREFDTVWECQSKFYPEIFNNEFYQELLGKGLRGTSSSFWAKYKFNTAENKGTREEKLIRAYEWRSKAITDKLNKEEAAYVISEINSNINNSSGYLGSISDRSKELYFNKETVGQYLYKQLKQNPHTKLKNQVFYRQDYLDEFEAIWKEQSKHHSELTAVLKTEIRDIIIFYQRRLKSQKDLISLCEFEKKQIQIKKEGKIVETTVGMKVTPKSSPLFQEFKIWQTLNNCLLKRKRKSKNKLSAEIIQNSETEITLDLTAKQVLFDELNVKGNIKSDVAIKLLGYETSEWELNYPELEGNNTNKVLLQAYLEILEIEGYDTKDLLKTKQSKDEIDLSKIDVSANEIRRIVREIFNSLNIKTQILEFDSELKNKEFEQQLSYQLWHLLYSYEGDNSVSGNDKLYKALEDKFGFKKEHAQILANIALQDDYGSLSTKAIRKIFPFIKENKYSEACALAGYKHSAESLTKEEINSRPLKPKLEILKKNSLRNPVVEKILNQMINVVNTLIEVNSKKDEGGKIIKPFHFDEIRIELARELKKSAKERSEMSANIGAAKIQHEKIVKLLQSEFGVKNPSRNDIIRYKLYEELKNNGYKDLYTDTYIPREILFSKQIDIDHIIPQARLFDDSFSNKTVIYRKDNLKKSNRTAFDYIESEYGKSKAEEFLQRIEKLFEVNKKNNIEGIGKAKFLKLQKRESEIGDGFIERDLRDTQYIAKQAKKMLLEITRSVLSTTGSITERLREDWGLVNLMQELNFDKFKKLGLTEKVEKKDGTFKERIIDWNKRNDHRHHAMDALTVAFTKHSHIQYLNNLNARYYESHKEYKNIKHIEEKETHVVKDDSGSNKRVFNLPIPNFRVLAKEQLENVLVSHKAKNKVVTKNKNKIPTSKGVKIKTELTPRGQLHKETVYGKYFYPVQKEEKVSAKFDLETINKVSNPTYKMHLLTRFNENGNDPKKAFSGKNSLSKNPIYLDEKKSEIMPEIVTLSWLESDYSIRKDVTPENFKDDKTIEKVLDAKVRQILSDRLKEFGNDPKKAFSDLDKNPIWLNRDKGISIKRVTISGVSNAQPLHVKKDHFGKEILDKNGNAIPVDFVSTGNNHHVAIYKDEKGILQERVVSFFDAVELINAGLPVKDTEFNKNLGWQFMFTMKQNEYFVFPNEKTGFNPKEINLLDSKNYKEISPNLFRVQKIATNDYWFRHHLETTVDVNTQLKDIAYRRCSLNGIKEMLKVRINHIGQIVKVGEY

SEQ ID NO: 2389 - protein, 1091 aa, unidentified
  REGION 1..1091: note = Description of Unknown: Cas Enzyme sequence
MKLAGFESLQGRRMEKTAEGWRQVPESAEEKKRRAMLEREFPAKGDETQYNSAVLRILLLEGKVKLEEWQVYKALRSAIQKRGYGRVPWSNRDEKRGGKSDEEMEKEMAKKDPGYRAAIEAWPKFKQQTPAEFHSPCYYDASHMGLWSAANPGVVKLRQDHHAASTRRVRFDREDVNKEIARLMEAAAAEWPALRGAFERIRSEGWRYTEHTTKRERTLPVVAETLGEFLVHGPAGAPSAEALSDFHRYLEERRARGIRPGTEDDWQAATGQKTPRFDNRIVEPCALLDGLRVCNVAVRLDPKTKAAQPNSLLYSEVTFLMKLKNTRVQPREGHPALSVEEIRHILEAVREDARCIPPDAKDYGKKVAASYALSKADWGKHKQIKPLALRPMAGQEEIKAPKMEGRSRFSRPALKLIRALVLSGQKPSVFRARLLAREKALLDELRLDVLDVPPVREVNGATVYVEQPRPWILVKHLKFLEDLAGESDTWERIHIPEQRLDALEARHTSDGHLDREAAVRELIGSINDPIVRHRLGVFTDRLRELEGKFGTPEQIVLEFVREDFMGAKAKLDLFKFQNERERKRKDAREKAALAGASGKMAGLKFELYEAQNCTCLYCGENFTYTSLDDYRIEHIVPRAQNGPDAVVNYVLAHESCNDDKDDRTPYQWLHGREGWDAYVKRVTACGTNLRNKKVQLLTREDAAELVQRYTALAETAWISRLAQKISGLWFGWRNGNDDAGEKRIVVIAGGLTARIRRRYRLNTLLNPAPADCTDPVAWEETAEKNRDDDRHHALDAMVINFLPQWTRNAKKEHFFRFPAAIHANAKAFFEKRLAAVTPRRIVRERAPMEETFYGKRQILGQVFMVKRRALFDLATKEEKGKVKIKPRKDIETKKIVDDAIRRVVEEFLETQEELTLEAWAAFCRQARRGASGPRIIQISMTETRAGAVDEYGNFAKAGDSARGQYRRGASHAGYFILTRPAPTAKEPEKKKIEVRPVFAFQSEKDVRALLCSEPGVAIIDYFWSNCQVLIREEWEFKGEVFPAGEYTLKTLWAQGNAVLKHGGRGMIGSKPKHNAPVPLRALVDAGIKRVK

SEQ ID NO: 2390 - protein, 1275 aa, unidentified
  REGION 1..1275: note = Description of Unknown: Cas Enzyme sequence
LEEHCPQITLLVEDSNSNLEIQNEIKDYFLDKGILDESEKSGYAKDLDEGDKKLVSLYKSMLAILKKNENDFEKCKVEIIERLNRKEDLGKVKGEISEISQAIKDGGFKTLGQYFFSLYNKSKIRNHYTAREEHYLNEFEIICITQEIEGIKKDQQLPEKRYVGLAKELYKAIFFQRPLKSQKSLIGKCSFEKSKSRCAISHPDFEEYRMWTYLNTIKIGTQSEKIMRFLSQEEKQKLIPKFLRKKDNFNFEELAKELVPKGASFGFYKSSRANEFLYLFNYKNNDTVTGNPICASLKNILGEEWKSTSMNYKTKNSQNIEVERTVDYKDLWHLLSVSTSDLYLYDYAKSKLGLDDKQAKAFSKIRLKKDFASLSLNAITKILPYLREGLLYAHAVFMANIESIVDESIWKDQNQRKYIQNKIAEIIENHTHDNGLVEVINALIKECKNDNAFYSKEAEFAYRDDLKKQLTYFFKHQKIEEKRHQEKVINDLFPVFIEQLKKYEFIKIKRLDEKVLDFLNGKNADGEVFCNDDKKLNKLYHPSDIEKFKLNIVKDEKGNIIETSLGSPISSSIKNPMAMRALHQLRKVINTLIQEGQIDQKTRLHIEMARELNDANKRKGIQDFQNENKKNREGYVKEIKELYFAECKKEIEPTEDDLMRYQLWIEQDRKEIYEKGNNISISNIIGANPAFDIEHTIPRSRSQDNSLMNKTLCSQYFNREVKKNKMPVELSNHADILSRIDHWRVEFEALSRDIEIISRSIKAATTKEAKDKKIRRRHLLSLKRDYLKGKYERFIWPEPKVGFKNSQIPDTGLITKYAQAYLKSYFQRVESVKGGMVAEFRKIWGVQESFIKDGKKYYDEKDRSKHTHHTIDAITIACMTKDKYDVLASAWTAEDNEDNEDINTARKLLADSKPWKTFKEDLIKIEDEILVSHYTPDNLKKQSKKVIRIRGKKQFVALMEQDSNGKLVPKTDSNNKIVYKLNEKGLKIPRLQQGDTVRGSLHQDSIYGRILDPLTQEEKSVIRKPLDSIKATDIENIVDEEVKQKVKKAVEDKRLILSSNAQQKNKVEGIVWMNETKGVEIKKVRIYANSVKNPLEIKAHAPLSKSRHKHKQYIYAQNDENYALAIYEGTDKKGNVKRAFESINNIDAGNYYKLSFNKNDNYLVPDKYFGTELPLKYLLKKGDMVLFYQKNVEEVFELSQVDLNKRLYKLAKFDAQGRLTFRYHKEARQASDLKEIYNVDFEKPFEQIRLQVSKLDILLENKDFKLSSSGKIIFK

SEQ ID NO: 2391 - protein, 1449 aa, unidentified
  REGION 1..1449: note = Description of Unknown: Cas Enzyme sequence
MKRILGLDLGSNSIGWALVQQNFENKQGQIMAAGSRIIPMDQGVLGDFEKGNTVSQTAERTAYRSTRRLRERHLLRRERLHRVLHILGFLPPHYDSQIDFSKRYGKFIDNAEPKIAYNNGNFIFMNSFNEMIEDFKKHQPQLFYKKSNGEESKIPYDWTIYYLRKKALSQKITQQELAWLILHFNQKRGYYQLRGEEETEGNDMEIISSKVLSVIKKNKDKKYDKYWYDITLENGLVYKAAFYNDLVYSWIGQEREFVVKRTLLKNGDEKIELSYLPTFDEIAKMDKKQQDKFYQKIKVKTESSIGNKTVGAYIYDHLLQNPNQKIKGKLVRTIERKYYKDELKAILAKQIALQPEFFTENLLADCIRKLYRKNETQQQNLLSKDFLHLFLEDIIFYQRPLRSKKSTIANCTLEKRSYIDKETNERKDVPIKVCAKSNPYYQEFRVLQWLQNLRIYEIETNREVTAEFIETAQDYEALFNFLMSQKEIDNEGLLKYFLLTKNPQIKDKAAKSELKKYRWNYVYDVADNSSKKYPMNETGYELQRYLQKVEGLPANFLTFDTTYRLWHLLYSVKDKVEFEKALKKFAQKYQLNEVSFVDSFKNFKPYPNEYGSFSEKAIKKMLPLMRFGKHWNFKNIDVHTQKRIDDIINGVANEDIRTIIREKAEKYQLNSETCFQGLPLWLAQYIVYNHHAEATDIEKWTSVSDLEAYLEDFKQYSLRNPIVEQVVTETLRVVRDIWQQYGGGQANFFDEIHIELGRELKNTSKERERLSKQNQENENTNLRIKKLLAELKEDANIQNVRPYSLVQQELLKIYEEGVFSSTDEIEEDIQKIRKKAEPTTPEIQRYKLWLEQKYKSPYTGEVISLTKLFTEDYEIEHIIPQSRYYDDSLSNKVICESAVNKLKTNQLGLEFIQNHHGEKVRIAGNKEVTIFTEEQYKEFVKKYYANNLAKQQKLLLNDIPEKMVARQLNDTRYISKYISEILSKIVRSDEKDEGVNSKNIIPCTGKITTALKQDWGLNDVWNELILPRFERMNQLTQTQLFTSYNDRLQKNLPTVPIEYSQGFQKKRIDHRHHAMDALVIACATREHINYMNNQHALDKSKDKKEKQQSRIDLRTILCEKKNNNWQFKKPWRTFTQEAKEALEHIVVSFKQNLRVINKATNYYEKWEEKNGVLVKKKVKQEGTNWAIRKPLHKETVSGKIVLDRKIGKDKILTATRKTVDITFTEKIISSITDTGIQKILLNYLKYKGSPEVAFSAEGLEELNKNIAQYNDGKKHQPIYKVRIFEEGSKFPLGETGAKVTKYVEAAKGTNLFFGVYQGKGKRTYATIPLNGVIERQKQGLPSVPEHNEKGEPLLFSLSPNDLVYVPMVGEATDTIDFSNLSKEQKERIYKTVSFTGNQCFFVQEAVAFPIVNKMEYSPLNKMERDILGIMIKEVCIKLKVDRLGNITKA

SEQ ID NO: 2392 - protein, 1107 aa, unidentified
  REGION 1..1107: note = Description of Unknown: Cas Enzyme sequence
MISQSLTFSFDIGYASIGWAVLEANPDGSQDADPVVQGCGTVLFQADDCQAFKRRSYRRLRRNIRSRRIRIERIGRLLVQTQIITQNMKDAPGHPAPFYLASEALQEHRVLSPLELWQVLRWYAHNRGYDNNASWSNSSSAVENKEDTEKLRNGHELMKKHGTCSMAETICRELKLEEGKQDAPMSFSTPAYKTLNTAFPRSHVQKEVRQILELSAPQIPGLTPEIIELIVQQELFTTEQRERLLQFGIKLARRYQGGLLFGQLIPRFDNRIIRRCPITWAQIYEAELSLGSSEKQAREKAEKLSKVPSADCQEFYEYRMARILCNLRADDQPLPASLRRQLMKEALKEGKLTKSSLKKIISSQALTENTNIDNYFNLHPDSEEALYLDPAVEVLQRTGIHDVLSPSVKRMALTRLRRGKTCTPRYLLKLMRSHGEPVDQLEAKIEKRRIQQGERKKGKEHVPAGKDWAEEPLLPKCATGRAPYARPVLRKVVEEVLAGEDPSRPARDENHPDGEVKTHHGCLYCLLDPKSKVNEYQRNRSIDSLTNNHLVRHRMMIVERLLKDLIQDFAAGRKERVEKVCIEVARELSSFSGMDSKKIQAELNLRQKSHAMAVERLEKDLPGLALSANLIRKCRIAEDMNWTCPFTLQKYGPHDLDRLELEHIVPYAFRQSNALSSLVLTWKEVNKMKNRRTGYDFVEQCEGSPVPGSNLSICSINNYKTFVNGLDERKWHADDQKRKKKRKALLMVRGLSSKNQAQANIGMTEGMMTQSSHLMKLAARVVSRILPDVSIDMIPGAVTAAVRKSWDVSGCFKELCPELSGKINKQDLRSCTHLHHALDACVLGLIPYIVPAHRNGLLRRVLAMRRLPEELMREVRQIADKRHYILNDDGRIMLKDLPNSVKENIREKLMEQRVIKHIPANMSGASLKETMQRVISIEGNGEDAMVCLRKSSFMVGEDGKRTTVKANKLVGIFPEGSSKLKPLKAAIEIDGNYGVALDPSPVVIRHVRVFKQILALKKKNGGKPVRILKNGMLIRLTSPQDTKREGIWRIASIKDNKVGIALDLQRPHYAGSGSKKHESNWINIRLVTLRTKYHLEIHPTSYTGNPR

SEQ ID NO: 2393 - protein, 1031 aa, unidentified
  REGION 1..1031: note = Description of Unknown: Cas Enzyme sequence
MENSCRRVLGLDLGVASIGWALLECDSDGQPQGLVASGVRVFEPGMEGDISAGRAESRNLKRRDARLARRQTDRRRRRRRKIFGFLQQHGLLPGGEAEKILPDLDKELLKKHQPAGTDATRFAHLLPYFLRTRSLDERLEPFELGRAIYHLAQRRGFKSNRKTDAAEDPKDLGPVKQGIADLDKRMKQANARTLGEFFFGLDPEQERIRSQWTARDMYEREFNAIIDSQSAHHPTLLTPEMRKELFKCLFDQRPLKSTADLIGPCELERDRRRAPWARLEAQRFRILQRVLDTRLLHPNGAEEKLTPEQTQALKDALDKTAYLTFVSARKLLEIRKGVRFNWEEGGEKSFKGNTTNAKLAGVLGDRWYGMPYADRCQVVEDLHSFQKEEALCRRGRTKWGLPKNAAQAFSKLALEEDYCRLSTKALNKLRPLMENGTPYATAVKEVYGEFHRRVDQDELLPAVWKTFPALLNPTVNRMLNELRKVVNAVVQQHGCPDIIRVELARDMRKSKKQRQEFTKRNRKNESNRDRARNGLEKLGITNPKQDDIVKWQLYEECNGECPYTGRTIDLTNLFGPAPQFDVEHIIPFSRSLDNSFLNKTLCYHGENRNEKRNQTPWEAYSHDQQKYDTILQRVKSFSGDAKVEKLRRFKKEDVDDDIEEWASRQLNDTRYASKLAVQYLGLLYGGREDESGNQRIFATSGGATGHVRAVWNMNSLLNDGPHKTRDDHRHHAVDAIAIALTTPGTIKMLSDAAEHAWQQRSRRFAPVPEPWPGFLPDIRAAVDSIKISHRASRKARGAMHNETNYSPPRTNDNGKQVVHVRRLLIKPLTASEVEAIVDPAVQQAVQKKLAELGGDLSAFKDKANHPVLVSKDGASSRPIHKVRVRQSVAVTPVGRAARQRFVASGSNHHMEIFKVKDKRGNTKWDAEVVSMFDAIQRKKNREPIVRSDRPGFVCSITSGDMALLEDQGVKKLVVISSVWEEQGGSKRIQFCEHTDARIKKGLPKKAVNALRQMSFQKVIVTPFGEIRRAND

SEQ ID NO: 2394 - protein, 1166 aa, unidentified
  REGION 1..1166: note = Description of Unknown: Cas Enzyme sequence
DTSHANLNSAAPTSSSGLPATSVKPGSQNSSWYKKRVVKKDGEQLHLGLDLGSSSLGWAITKAVVENGAVVSQTIVGSGVHLYQSGLVPKSSASLTSVRSKKKSARRTKNRKNIRLRRLARHLHESGLAPKRGEVGFESYITLDPINCRARAVTELVAPFEFSRALMHMAKHRGYKSNRKDRRTLDSAANATVVVVTEEPADDVDKADAAEAKEKKKILARIASTKEVMTLKGWTAGQYLADERVRAGVNSIPVEEQSFFDRQMIDAEFLQIVEMQKRSGGALGLLDDRDVLIQSVSQAIFYQRKLAPGNVGRCTIDIAERRAAKYLATSELMRLAQDINHIRYFDMIGTSTSLTPAERDVLMVAALFQTEKKAPKRQSKKVKARVFFSHLRDTLARVQGGVRSGDDIILLNETEALDDIAVPLVLPLTAALIPGVDVQQIRRDIYGGDVEVAARAARAFIDIALAHLDTLDVLATALQAAEDDAAAEDVMRAICNTAGWDIDDDDVLCALAVMPESEYGNISLRVARDILPHLCAADSVNAFVTSVNNAGYSLPTIKERDALPYYGEVLPHITSPVQQPVGLSAEREAEWKKSVNDDEMKYGRVTNVNVHIGLGQLRKVHNKLAGKFGNFDAVSIETGREFGDSAKRKNKRNATHTKNRQAKVALNEKLAVLTQSQSAANRDRLTLFNSMKSEHRMCVYTGVPITLDNLFSGEIDVDHIVPRSRGGSDRLWNKVLVTRQSNRSKSDSTPFEKWGGSAAWDGIAGRANKVYEDEQKKMAMILKTSVDEGSDEFMPRQLTDNSMLSKRAVQYLSSVCPNVRSVSFEVSSKMRDYWGFDEILAPNNSAMKKFTLGEVDYFSWEKNRNDNRHHAVDALVLALMPSHLEGVVEMMRHARKHFGVHDSPDTFLPKGFASRGDLYAAVRKSVLSVRISLRPDRTSNMTFSDETNRRVLGLVGNGSEKPTSTKKSKLREVWESMTAEEKTDMLLGKPRNFYTPASGKKAKPGEVTSALMSFGFDRSGSAPVPVRAFELGSNAWIGVTLEGCKRHGGERTAFVQNAMGVARGTAQDCCIRIYKDDLVRFSESTAKKINAGSASGGALVSHHYVYRVKGMSKNARGAQVVGVSNINGGDPAHERMLTIAHLYDAAILSSSLLGGHKTRGCESLTN

SEQ ID NO: 2395 - protein, 1355 aa, unidentified
  REGION 1..1355: note = Description of Unknown: Cas Enzyme sequence
MEGIKMNKKYVLGLDIGITSIGWSIIDEVKGKLLDMGVHMFEQAIPAQEVRLNRSARRTLRRRNWRKKQLKNAFVEFGLISKDEINQRDYLSYTANSDTFSRPEEDTVYHLRLKALNDKVSLRELLLCLYNICGTRGHFLMENINFASSEPITFDFFVEQFYEFTHAYVNFTENTKEFEKTILRPIFEKGKVKSNELKSLLKDEYTVEAEDNDALLEILKLICGFKCDLKKISESVVLVQEDKTKESVKLDELLKMDSLNEFLNNAVELHDVIAVSQILKDHNYICEVAVEKLNEVLKIQKLEHSDPDKYKEEKNNIQKKMSKAIGNRLRVVKNMENKYPNGLYVKEASDILHKQQQFYPNLITDNFIEACISTIKARIPYYIGPLSSQAKNSWINRKDGTFKYGYEYCKDALVNEEESIQNWKLNMISHCTYLPEEYALPKGSFIAETFSLLNELNILTAIDKDENRYYLTREDKLKVFDELFLKRTDYVSHKEVAELLNLKSFGPKDSRKEGKFKNRYTLYQNIISVFPQFELHSILDLFNENEKEKVDKIEDIILNLNLFDEEQSKINYFTKKLNLDEKDAKKLARCKSNGFSAFSKQFIMETKMNVDGETLLEEMLRDNSENQKNEQMTLITEATDLDGNRINFESNKYMTLLKDTKKLSIDLLIQEGKPFIPIARPVIRALNECFKLYEEIIRTYGVPDRVVIETARDLKDSAHDGDEPAKHFDQMKNLYDYLTKQMKEQKDNAKISKQYLEDWDVIEPYLEKNKRKVELYIRQNGRDMVTGDEIDIQKLEDYEMDHILPRGFGDNSMDNLMLIKKEINGKKADRLPLEYIEAETVTNKAGKRIISSDFKRRCYELNGMKLISDKKLKRLLLASTDEAMGFINRNLVDTRYIIRELMAILRAYNTVNNYDTHIVSLRSSFTTVYRNAFNMKKNRDIGDQHHAHDASIVAIADMVLSTYYPNYDERGNNKYYQEFLKRMMESQGPDSDKSENQKLYGFIKYAYFKRFGNYPNDNDSLVSQVRATVPLYSVKAEKNYKGAFFDATIYPQMDKKKNIPREKGVLGLLGVNNDKRIYSSINCVAVDFYKYTDKKGKKVHVGIHIPKVIVNNNGEINKEQYVKLIRDYYKVPELLDENGKVKECYFRMRVFKNDLIYDTNNYTIQKFNIGSIVNKKLEMKHLYVFSYDEIYKQVYFYKKELAGQFDFKLPKINPDGKKKFSDYKIFEIISYCVDNLMDIRDLNRYKGTIEKILKEKTNYQEFLETMAYLDLIVNRNCTPPTIVGQYLPVAGSIDDKTDKENKAQYVKIKSSILGIRYIYNENGKLLISGPRKAPGKYSKIKKEKFSWKICSDVLQ

SEQ ID NO: 2396 - protein, 1350 aa, unidentified
  REGION 1..1350: note = Description of Unknown: Cas Enzyme sequence
MDNKYVLGLDIGITSIGWSIIDEVRGKLLDMGVHMFEQAIPAQEVRLNRSARRTLRRRNWRKKQLKNAFVEFGLISKEELNQRDYLSYTANSDTFSRPEEDTVYHLRLKALKEQISLRELLLCLYNICGTRGHFLMENINFTSSEPITFDFFVEQFYEFTHEYVNFEEDTKEFEQTILKPIFEKGKVKSNELKSLLKDEYTVESEDNDALLEILKLICGFKCDLKKISESVVLVQEDKTKESVKLDELLKMDSLNEFLNNAVELHDVIAVSQILKDHNYICEVAVEKLNEVLNVQKLEHSDPDKYKEEKNNIQKKMSKAVGERLRVVKNMENKYPNGLYVKEASEILHKQQEFYPNLITDNFIEACISTIKARIPYYIGPLSSQAKNSWIDRKDGTFKYGYDYCKDALVNEEESIQNWKLNMISHCTYLPEEYALPKGSFIAETFSLLNELNILTAIDKNENRYYLTREDKLKVFDELFLKRTDYVSHKEIAELLNLKSFGPKDSRKEGKFKNRYTLYQNIISVFPQFELHSILDLFNEYEKEKVDKIEDIILNLNLFDEEQSKINYFTKKLNLDEKDAKKLARCKSNGFYAFSKRFIMETKMNVDGETLLEEMLRDNSENQKNEQMTLITEATDLDGNRINFESNKYMTLLKNTNELSIDLLIQDGKPFIPIARPVIRALNECFKLYEEVIRTYGVPDRVVIETARDLKDSSQDGDVPAKHFDQMKKLYDYLNNQMKEQKKKAKLSKQYMEDWDVIEPYLEKNKRKVELYIRQNGRDMVTGDTIDIQHLEDYEMDHILPRGFGDNSMDNLMLIKKEINGKKADRLPLEYIESETVENENGKRILSSDFKRRCYELNEMKLISDKKLKRLLLASTDEAMGFINRNLVDTRYIIRELMAILRAYNTVNNYDTHIVSLRSSFTTVYRNAFNMKKNRDTGDQHHAHDASIVAIADMVLSTYFPNYDERGNNKYYQEFLKRMMESQGPDSDKSENQKLYGFIKYAYFKRFGNYPNDNDSLISQIRATVPLYSIKAEKNYKGAFFDATIYPQMDKKKNIPREKGVLGLLGVNNDKRIYSSINCVAVDFYKYTDKKGKKVHVGIHIPKVIVNNNGEINKEQYVKLIRDYYKVPELLDENGNVKECYFRMRVFKNDLIYDTNNYTIQKFNIGSIVNKKLEMKHLYVFSYDEIYKQVNFYKKELAAQFDFKMAKINPEGKKKFSDYKITEIISYCVDNLMDIHDLNRYKGTIEKLLKEKTGYQEFLETMAYLDLIVNRNCTPPTIVGQYMPVASTIDDKSDVENKIQYIKIKSSILGIRYIYNENGKLLISGPRKAPGKYSKIKKEKFSWKICSDVLQ

SEQ ID NO: 2397 - protein, 1337 aa, unidentified
  REGION 1..1337: note = Description of Unknown: Cas Enzyme sequence
MEKFYIGTDIGTNSAGVACTDENYNLLRAKGKDCWAVRLFDEGKTAVDRRTFRTGRRRLQRRKQRIAWLQDLFAPYMEDETFFIRLNNSQFLPEDKDALLGGDKNTLFAGVYDDKKFHTEFPTVYHLREALMRGGVNDLRLYYLALHHIVKYRGHFLTEGSIDDVRDFGRLLGNLNGVISDVYGDEVPLFSEAAVDEAKNVLLDKTLGIKDRSTELEKIFGVKDKTSKEIIKGLCGGKISPAVLFGDEYKEEKSFSFKEITDDNFESMRGTYGDNFTVLEVIRSIYGYVIIENLLSGHDDLSSAMIAVYDKHKKDLLALKAFIRSERPEDYNKIFKSTDEKYNYVNYIGYTKKGGDKKKVKKCKDDEFYAYIKKYLQGLTDVKDIAARDKFLKDIEAGSFMQKILHSDNGLFPKQINEYELKKILENMVKSFPATAEIKDKIVTLFNYRIPYYVGPLAGKEETCWAVKKSNEKITPWNFDDVIDKAKSNEKFMLRMTNKCSYLRGEDVLPKASIIYQKFDTLNQLNKLRVNDELLTVDLKQKIFNELFLKYPKVSDKKIIDLLVREGKISQNDRSEVTLSGKDGEFKASMSSYIHLKNILGDFVDKDLSENGGVCENIILWHTLNTDKNIVVDLIKENYGKIPEIKNAIKQLKGLVFHDFGRLSRKLLCEIYTVKEDTGELWNVLDALYETNENLNELLNDEKFSFGRNIKEENGEMTSDVGYKDVEELYVSPAVRRGIWQTLTVVDEYVKAIGKAPDKIFVEVTREDGIKGDAGRTQSRKRRLQEKFRTVSDAYADVIAELGEERFTDLKLRQERLFLYFRQLGRCMYTGERIDLNSINDITRYDVDHILPRTFIKDDSLDNKVLVLRSKNAKKSDTYPLPAGFSNQRDFWKMLLDKGLIAKVTYDRLTRTEPLREDEYQDFINRQKVITDQTVKVVAELFKRRYPTAKIVYSKAKNVNDFKQKFDLFKCRETNDLHHARDAYLNVVVGNVYDTVFTTPMSMYRKDGDVWRTYNLNKLFTRDVKGAWDNAQSIATVKKVYSKNSMVVTRYATCNNGGFYNATVYSKDEKGITAPRKGKGSLSDSSKYGGYMTQPTAYFAVVSSKDKNGNEIKTIEAVPVLTTYMAKNDPKAVERYFSERLKDAKIIVPKIKGKQLVSYNGTQCYLAGTTGKQILVHNAVQLFTDGKTDEYVNSLLKLADMKARGVINVGQEEFVMKTNRDGERKLVIDRANNADLYGMLKRKLERENYAGLSAFATFRKNLEKGEEKFNSLTVYEQTVVLLQILKFFKCNAETADISSIGGGKIVGKIYVNINITNVDFRLIDLSPAGLTERVRKV

SEQ ID NO: 2398 - protein, 1378 aa, unidentified
  REGION 1..1378: note = Description of Unknown: Cas Enzyme sequence
MEKKYYIGLDLGTSSVGWAATDENYNFLRLKGKTAWGARIFSEAVDCKGRRSFRSSKRRVARRKYRLLLLKNLFAEEMAKVDKTFFLRLENSTYWAEDKAKDDKGNDLGKTLIFKTTEEEREFHKAYPTTWHLRKKLVDNDEQALSDLRLVYLAIHHIMKYRGNFLSDGTKDNEEPSKDTIDRINVILNLLEAKDNESGISDNITYLSKESYNELIETLENKNLNKKKKQDEIKKLFKNVDKTNEDIKVYIDLFKTLVTGGVFSVKKINEEYDKLKIDFNNGFDDNADEISKALGDAYELVLIAKAYNDYISLKDLLGGKPYLSYVMADIYDEHKKDLRSLKEILISIDNKLGNEGSNRVYNLVFKPVIVPKEERKDKDGKKNKKLTTPNYASFIQGDDVEKKSVTLENLNKNIKEILEANKQYVDEIDKEEFDRLLDKASNNELFKKQATVSTSLIPHQCHLKELKIILENAGEKYPFIKENSDKIIQLFKFRVPYYYGPLNNESKEHAWIVKNEGKERTKITPWNIDEVVNKEKTREGFFKKLTNSCTYLVGETVLPKVSLVYEKYLALERLNKMQVNGNYLNHSDKMDLLNYVLGNSNTTIENIRKKLASDTGMKINDIVISNIKNNVPFTATSHAFFRKHFNLENSEEFELCEEVIKYATIYADDKKELKKFLSENFSFDEKLIKEIANLQTNKWGRLSKKFLCGGAKDEMYYTDENGVMYTILGLLEETNQNLQEIVNSGKYGFDEKIKEFNDALTKDETIDEQISKILEGTPALMVRSITQTMKVVDDVIKAAKCEPKKIIMEVTRTDEKKGQEVASRYIQLKKKISEDKEIDDKEKEGLLSDLEEANKTKKLKGKHLYLYFSQLGIDLYTGKKMKIEEVLEGKYDIDHIVPQSLIKDDSLDNQVLVNKKYNQDVKKDIYPICDEIRSKMLNLWYNYKERGIIKEEKYNRLIRTTDLTDDEINDFVKRQINVVNYSNIQIKRIFELKYPDTEIIFSKAGFPSLLRKEYEIAKMRDLNDAHHAVDAYLNIVCGDILTSLYTDVFYLIKRKKEKKENPTFNMERRLLGYIKKNDLMNKIKSNCLRHDALITFKPDYDSGMFYKQTIFKKSGDKETGLIPLHTKGPMSDVKKYGGYSSLSQSYILAVEYKVKKKTVKKLLRIPTMYIKLYGEDLNTIAKLMIDDEKAINIKILRKICLNQKVRFNNCYYLIYTSDDTRCKLKMAYQNYIDNDALVYLNKCLKKIDELDDKDKTEQEIIVNKDGDKLKITKEENLKIFKLIKEQYSKSIYNSITYIVKSRDILEDSFNNLSIKKQIDTLFNMIKILSRSNEDAKFDESLKNGGIKYYRISMNIDNNQIYIVNESPSGLFKGKEELI

SEQ ID NO: 2399 - protein, 1411 aa, unidentified
  REGION 1..1411: note = Description of Unknown: Cas Enzyme sequence
MDKKRPYYIGLDCGTNSVGWAVTDGTYRLLKGTHRIKSENGTKTKKQTLWGFRLFDEADTAAERRIHRSARRRGERAKTRLKLLRLLFRDEIAKVDPEFYQRLKESFYYEEDKRLQKNSKNTLFDDSSFTDKDFHKKYPTIWHLRQAIIKADESESFDIRLYFLAIQHILKHRGHFLLNGNIGSSGINFEELFEDFREEAERVGYNIAEIPGEIESILTKKASKIDKKKELKEILYIEDDALDEDAPKGQLELAGLLVGSKVDLKKIFASEDDDKFSYSFSEGVFEDKLPEIEQTIGSDNLDLIFAAKNIYDYVILHNLLGSHKMISDAMVANYIQHEDDLRKLKKVLKPHQNIYRQLFKTELYDEKSPSYNAYIGKAYTEDKSERRASKNISQENFNKYLHKLLEKIKLNTSPELLPVVDELLDRTDTSEKSTSPLLLPKQRGQAKGAIPMQLHANELKIILEKLQRDFPSFAEEVPNESNDYNTKAKKINKIHSFRIPYYCGPLVSKKKSDFSWADEEISELVYPWNFDQLVNKDGRAKNFIRRMTNECTYLFGEDVLPKCSLTYQKYMVLNELNNLKTNGYRIDNKLKQQIFERGYKNGEIKGNITLRKLEKWCKENGFITNDDELSGTSEVKILPKYQSYQDFSRFLGVDFEKKYPLAKLEKVIELITILGDEKSMLEKNIKEELVCDDKSAKNLSKLSYKDWGRMSARFLNAITVNNCTILDWLWEDNKNLMELLGQEVGFGKVVDEYNEAKRPKSKKISYLDIEKLYCSPAVKRSVWQTIKIVNELVKDLGHAPAKIFLEVTRGEDEKSKGKYTLARKKDLETKLKAVKTDDAKAILKELDGYEDRSLQSKKLFLYFSQMGKCAYSGEPINIEELNNSQLYDIDHIYPRSRTKDDSITRNLVLVKANLNREKTNIYPISDSIRSKMRSIWSVWYRTGLITKEKYERLTRITPLTNDELGGFIARQLVETSQSVKAIRDLLKRAYPDTKIVMVKAGQVSEFRHLMGGDKKDQNGNVYEQGRYEFIKVRDINDLHHAKDAYLNIVVGNVMNETFTDNPYEWIKRRDGKDYSIRPERIFRNSQKYTKANGEETIYPEVKGWNYADSIRTISNVMKRNDVIWTRMNYIESKEISDLQLVGKGKNSDGLLKIKQQKRLDPKKYGGYNSLKGAHFSLIECKDKKGNTQRRIIQIPIIAKDNIEKYVIENYSSAKVILPVIKYKSLIKINGCPLHLAGKTSTGLVLYIGKQFLLDIDFNRYVKLVQKFVDKNKVAKNNYKIDELKDGVNSSDNILLMNQICSRLSILSSVPSFGDKISEIKKRNELNFRELDLKTQCEVISGMIKAIKCNAETGDISILVPKSSHFGKPTMPEDILPRYDSAVLINQSPTGLYEEIINLKTVHPKISKQDKK

SEQ ID NO: 2400 - protein, 1417 aa, unidentified
  REGION 1..1417: note = Description of Unknown: Cas Enzyme sequence
  MOD_RES 424..428: note = Any amino acid
  MOD_RES 1043..1048: note = Any amino acid
MDKNKPYYIGLDCGTSSVGWAVTDEEYHLLKGTHRIKSEKGTKNKKQTLWGFRLFDEADTAAERRTHRSARRRGARAKTRLKLLRMLFRDEIVQVDPEFYLRLKESFYYEEDKKLQKNSKNTLFNDANFTDKDFHKKYPTIWHLRQAIIKADKIESFDIRLYFLAIQHILKHRGHFLFDGKLKNGRGDFGEIFAEFCDIAKSYGLEIEESMQSEVERIILSDSTITDKKKQLKDLALFLEQDEAEDAKTLLRQQRCLCDLIAGGSVDLAKLFALELDEKCSYTLSQLDEKEDEIAGKITLDNMPLLVSAKKLYDYGILSKLLGEHSMLSDAMVANYEQHKKDLKELKRVFKPHEKIYAQLFKDNKYSKKSNKFDVSKNSSYDAYAGHAYQKEGDRNGHVIVSQEDFNKHLKRLLEEVGYNGELXXXXXEKGYLLPKQRGQAKGTIPMQLHANELEVILEKLQRDFPSFAKVVPGEDETCNNKAKKIMKIHEFKIPYYCGPLVKRKFDDDGNSVANGKSQFSWADEEIVKLVYPWNFDKLVNKDKRAKNFIRRMTNECTYLIGEDVLPKCSLIYQKFMVLNELNNLKVNGHRIDNSIKQQIFERGYKEGEIKGNITLKKLEKWCKDNSFIGADDELSGTNEVKILPKYQTYQDFSRVLGIDFEKKYPATKLEKVIELITILSDEKSILKKSIKTELNCDDELTTHLSKLSYKDWGRMSACFLNGININNRTIIEYLWEDNNNLMELLGQEVGFGKVVEEFNSDKRSKATKVNYRDIEKLYCSPAVKRSVWQTIKIVNELTENLGYAPKKIFLEVTRGEDEKAKGKYTLARKKDLEAKLKAVKTEDTRAIIRELDGYEDRDLQSKKLFLYFSQMGKCAYSGESINLEELNSSRLYDIDHIYPRSKTKDDSITRNLVLVKASLNREKTNTYPISDSIRNKMHAMWGAWYHSGLITKEKYERLIRGSELTNDELGGFIARQLVETSQSVKSIRDLLARAYPGTNIVMVKAGQVSEFRHMMSCDKKDCDGNVYRPGKYEFIKVRDINXXXXXXKDAYLNIVVGNVINETFTNDPYKWVKDRNGKEYSINQKRIFRESKVYRKANGEETSYPEVQAWQFADSIKLISDVMKRNDVIWTRMNYIESKEISDLQLVGKGKNADGLLSIKQQKRLNPEKYGGYNSLKGAHFALIECKDKKGNVQRRIVQIPIIAKDNIEKYIANNYSEAQVILPVIKYKSLVKINNFPLHIAGKTSSGLVLYSAKQFLVDEDTSRYLKLIQKVIGKIKAAKNHYEASSKDAVSQSENIKVMRKICDRLEILSEMPSFGDKVQEIKKYNELKFQNLDLESQCNILNNMMKVTKCNAETGDISILVPKSSHLGKPTMPEDIMPRYSAVALVNQSPTGLYEEIVDLKTVQPKINKQGEN

SEQ ID NO: 2401 - protein, 1453 aa, unidentified
  REGION 1..1453: note = Description of Unknown: Cas Enzyme sequence
MNNIFSTSLSLDLGARYTGAFITNSCNEQDPLGGNTLKTKAFSIVMPNSDKFTYSTVGRTAVRHRLRGNQRFKLARRLLRVIVLEKVNDYLKQNSLDKSSFDEKATFNALFGLLKRRGYSRIEAEINLDILDTVEPSVFANFEKLGNNFDKIESIYAQWEKLSQDLQKVRCLNELISKISDKDFDNYFKNEYKNSILDAKQHKEAFKVLKKACNEIANQESLGHKHRSKYLDCIKAEISSDSRLNLVKEVFGGEDALWSLVGNISNLHLRDFRLYFNDPKMKGGDYWKESELKESLVRAFKYLHPTREEKANIDDLVQIFESSQDIIKTLCSIDPNRTIPPYEDQDNRHPSVDQTLLLSPVSLNNLYGHQWIKWAEKFLAAEPFLESNLDDILLKGVDRKSRVKAQGANPLAVEFYRGSYILQRLLDRSKDCDVYELRRVCSLNNPEDDDLKELKRVLADPNDLKLFLSFANAYYLEIKRAKDGLWLQSSDSLLERADIHPPKMNKVINIVVGNILSSDSDVGDKFINKIWNKMKVKGNSSVRSICKSLEDLRKKNQGIFNTNYNKAKYRLKQQEENKKLKIEPELKDYVNAVNNVMLVSNFIANELGLNTIALERIQNAFSLAQLYTIIETERAGFTSTSIAVHKENYWRMTANKGNAICCRLPSDSIRPFDGVLRKSLDRQAWELAKQIVANVKENAKFNGGIINIAIAIEQNKFAFSANLDAIKKGRNLDKVDTENPNESNWTDKNERIKKASLGICPYTGATLGDSDGEIDHIIPRASTKKQLGTIFNNEANLIYVSQVGNQKKKNQNYFLKDLNKFYLEKKFKTSDIKVITSTIEETVSSLKKKGILGYWELLNDFERDCVRHALFLDFSNEARVEVENTLKSLYSSKVNGSQGWFVRQIVEKVQNNLKEWCKTTNNKLDFRAVKIKTDDAGQFRTSLGENYPEMVKNKPQPVLSHAVDAMCVFAAACAQDDFVAFTQADARFSDCANISEIHDLFPTESELIRVKARDLSDKDDFGSRPIFKEGILAEHFLPLIYCHKKVYIGYTLPNKDEKSVSNTSRKKYPTSLQVTGNAVDLLNILNPYIEETLALEKPVATYHIAKSKAFELFTKVAQKQANADEILAATVISSISYVTSSKDVKSVLTTDANQTKVCSVADLKLDKRLKENNYVVKLDVGSKATSFKCSGKIELPLAHDWERVLNNEGIVKAATSKELEELDNAIDKLWTQGAKRAHKAVRRVHSLPIIPTTGALFRIKRTSIHGDDVYQLSDSNLTAVGFQKDNNGNVNWKSPVLFKDLNSHAVTPRGLDDLNLSDDFIQMNKWRDIDLEDDEISLQMCPGSADRSLIRLTITFEKFNEILKAHKLDTYSSYLSVPSEVKLPKLKSDKDSKLVDKVDPFSCVFKQEFRQLIGVPREGSALIIESLGNKITFCYKAERCNKTMKDAYNKGHI

SEQ ID NO: 2402 - protein, 1368 aa, unidentified
  REGION 1..1368: note = Description of Unknown: Cas Enzyme sequence
MRKNQEPYNIGLDIGTSSIGWSIMNDNFDLMRVKGKKGIGVRLYNEGQSAAERRMHRTARRRYGRRKWRLRLLEDFFDEHMAEVDDTFFARLKDSNISPKDDKKYRKSLLFPKSKGVTYQDDGEFYKKYPTMYHLRYALMTEHRKFDLREIYLAFHHMVKYRGNFLYDTSVDSFEAKNLDIKGKFDEINDLLSSYTDFYVDNSNAALVESILLEKNTTRKDKSKKIAKLLHVEDKEKGKNKKAKDLATQISNAVLGLKCNFHLIFELQQKYSFDLCSEKTEENIANLSEVLDENQKMLLMILKEIQDQVMLNAFVPSGMSLSEAMMQKYDDYGEQLKIYHELEHSVSDDSAAELRGAYRDYNDNIAKRDEFYNKLKKILSDMDQENVDQDVLESCGKLKKLIDENKLFIRQRTAANGVLPHQLHQIEMRKIIDNQKEYYPWLAESNPNEKRRVYSKYKVEELIAFRIPYYVGPLVDPNNADKNKEARFSWMVRKKDGEITPWNFDDKVDRAESANNFIERMKSKDTYLLGEDVVPKESMLYQKYEVLNELNNVRINDNGLSDSSVDVNLKQAIYSDLFKKYKVVTVEMLQNYLVNDYKYPVRPKISGLADENRFLSSLSTYSDLKTIFGDKVDDRTYFNDFEKMVEYSTVFEDGHVYNQKLDEFTWLTKEEKDKIGKKRYRGWGKLSKKLLTGLRDKNDHTIMDNLWGTNRNFMQIQTADEFPKQIAEENERHLKGSVSDAINDMYTSPANKKAIRQVLRVVDDIQKAMGYAPSSISLEFAREDGPSVRTVSRANRMKSIYEKYASEVSEEVMKDLDSVIKDKKGLNDRLYLYFEQQGKDMYSGHPLDFDKVISGQEYDIDHILPQAVIKDDSLDNRVLTTKALNNDVKSKGVPCRMFNGMHSFWKNLYDKGFISRRKFNNLTTNPENIDKYKMKGFVNRQLVETRQIIKLVANVLNDKYQNDDVDIIEVRAELTHDVRKHFKFYKNRNVNDYHHAFDAYLTSFIGHYLFKKYPNLRPLFDYNDFMKVSDNVFKQLRGNNFLGEFLNKTGDIISTDGNFVLNKEEMINKLNKVYAFKKILVTKEVGQRTGAMFNETRYPAPNSRKAALKYRRMPKPDSLISVKDYKNTDIYGGYSGKNDAYMVIVDMGKQYMVVGVPVRYTEKLDKLRIKHSELYRDELRKVLSRDKTLLDSKGNVKRFDIVLDRVLYGQLIEDGNELFTLGSSKYKRNFRQLFLDKQCIEILDSSATPQPTDEELIWVYDQILDKVDKYFELYDINRQRETLRKGRAAFCSLPNISMKKDDVTKKKILNEILVALHANESESNCEKIGKKVFGRLQVPGGIKLSKEAKLIYQSPTGLFERVVYLKDL

SEQ ID NO: 2403 - protein, 1353 aa, unidentified
  REGION 1..1353: note = Description of Unknown: Cas Enzyme sequence
MRKNQEPYNIGLDIGTSSIGWSIMNDNFDLMRVKGKKGIGVRLYNEGQSAAERRMHRTARRRYGRRKWRLRLLEDFFDEHMAEVDDTFFARLKDSNISPKDDKKYRKSLLFPKSKGVRYQDDGEFYKKYPTMYHLRYALMTEHRKFDLREIYLAFHHMVKYRGNFLYDTSVDSFEAKNLDVKGKFDEINDLLSSYTDFCVDNSNAALVESILLEKNTTRKDKAKKIAKLIHVENKEKGKNKKAKDLATQISNAILGLKCNFHLIFELQQKYSFDLCSEKTEENIANLSEVLDENQKMLLMILKEIQDQVMLNAFIPSGMSLSEAMMQKYDDYGEQLKIYHELEHSVSDDSAAKLRGAYRDYNDNIIKRDDFYNKLKKILSDMDKENVDQDVLESCGKLKKLIDENKLFIRQRTAANGVLPHQLHQIEMRKIIDNQKEYYPWLAEPNPNEKRRVYSKYKVEELIAFRIPYYVGPLVDPNNADKNKEARFSWMVRKKDGEITPWNFDDKVDRAESANNFIERMKSKDTYLLGEDVVPKESMLYQKYEVLNELNNVRINDNGLSDSSVDVNLKQAIYSDLFKKYKVVTVEMLQNYLVNDYKYPVRPKISGLADENRFLSSLSTYSDLKTIFGDKVDDRTYFNDFEKMVEYSIVFEDGHVYNQKLDEFTWLTKEEKQKIGKKRYRGWGKLSKKLLTGLRDKNNHTIMDNLWETNRNFMQIQTADEFPKQIAEENEKHLKGSVSDAINDMYTSPANKKAIRQVLRVVDDIQKAMGYAPSSISLEFAREDGPSVRTVSRANRMKSIYEKYASEVSEEVMKDLDGVIKDKKGLNDRLYLYFEQQGKDMYSGHPLDFDKVISGQEYDIDHILPQAVIKDDSLDNRVLTTKALNNDVKSKGVPCKMFNGMHSFWKNLYDKGFISRRKFNNLTTNPENIDKYKMKGFVNRQLVETRQIIKLVANVLNDKYQNDDVDIIEVRAELTHDIRKHFKFYKNRNVNDYHHAFDAYLTSFVGQYLFKKYPNLRPLFDYNDFMKVSDNVFKQLHGNNFLGEFLNKSGDIISTDGDFVLNKEEMINKLNKAYAFKKMLVTKEVGQRTGAMFDETVYSAKSGKTLIKLKNDRNTSIYGGHSGNKDAYMVIIYTSKGYKVIGIPVRYAERLDSLRKNDVDGFNDMLNRLIESKFGKKSKNKQFRVVIDKVLYNQLIQDGNLLFTLGSAAYQHNFRQLFLDKKALEILDKVATPKPTDDDLIMVYDQILERVDKHFELYDNGGCREALHKGRELFCKLPVSKRNEKDVTKRDMIYTILDGLHANGKTVSCLEIGKGGAFGKFQKKNGINLSENAKLIYQSPTGLFERVVYLKDL

SEQ ID NO: 2404 - protein, 1022 aa, unidentified
  REGION 1..1022: note = Description of Unknown: Cas Enzyme sequence
MPFRYRLALDLGPTSLGWAVFRINAENKPIALVLSGVRIFSDGRNPKDGTSLAVTRRLARAMRRRRDRLLKRKSKLIAALIKHGFFPADEKERKALEVLDPYRLRAEGLNRALAAHEFGRALFHLNQRRGFKSNRKTDKRETDSSVMRTTISSVRNALEEGGFCTVGEWLYQRSRQGQKVRARFNAQRITTDAGKTKIEKSYDLYIDRAMVEHEFDVLWARQAKLNPELFHEQARAELRDILLFQRRLRPVDPGRCTFYPKEARAPLALPSVQRFRFYQELNSLRWLDDSLVERPLTLAQRDAMAAALETSIKKTFQQLRAIAGLGSGATFSIEDLKRQEFKGNTTSCILSKKQHFGSRWGRFDEALQDEIVMRLLMEENESALIAWLQEHTGVDEAQAEAIANVALPEGYGRLSLKAIRKILPALREDVRTYDKAVLAAGIGHHSDLGARATGEILPELPYYGKALERHVGFGTGNPEDPEERRFGRISNPTVHVGLNQVRVVVNELIRRYGHPAQVVIELARDLKQTWEQKRETEREQAANQQRNTLYRREIADVLGIGEEQVKRELIEKRILWEELSFDPVKRCCPYSGEQIGLKMLFSDEVEIEHILPFAKTLDDSLNNKTVALRRANRLKGNCTPWEAFGRQEVAGFKYDDILQRAQAMPQRKRYRFAQDSMEQWLKNDKSFLDRALNDTRYLSRLAKEYLEWICPQATWVVPGQLTSVLRRIYGLNNPDILGWRGQKNREDHRHHAIDACVIGVTDRWLLQIMSDTSARARDQLHGRLLKNMPMPWPTYRDHVKRAVSHIWVSHKPDHSYEKAMHNDTAYGLLPGGYVRVRKEVDGVRVRTTEKLAVIPISSAKAGPRHGFLPDGSPKPYKGYKGDSNYCIEIVRDEASGKWMGEVISTYQAYQVIREHGRVNGWNRLRHPGCGLSGRSLVMRLMINDIVRLEDNGELKTWRVAKISGNGQIYFADIHEANVDARNRDKNDSFSYVSKMAGSLNKAKARRVTISPAGRLADPGYIP

SEQ ID NO: 2405 - protein, 1020 aa, unidentified
  REGION 1..1020: note = Description of Unknown: Cas Enzyme sequence
MSLRYRLALDLGPSSLGWAVLTLDEKNQPKAIAAAGSRIFSDGRNPKDGSSLAVTRRLARALRRRRDRLLRRKSRLLDALVRFGFFPKDIQERKALEVLDPYELRAKGLDQALTPYEFGRALFHLNQRRGFKSNRKTDSRENDSSVMKGAIRKVREVLAEGNFRTVGEWLNHRKKNGETVRARFRQERVASDTAKVKIEKWYDLYIDRAMVEEEFDTLWRKQAQLNPDLFREGVGAQLKDILLYQRKLKPVDPGRCTFLPDEKRAPRALSSVQRFRIYQEVNHLRWLDDQLCEQTLSVEQRDLVIQALDRNAKRSFQQIRSLLGLGSGAIFNIEDARRQELKGNATNVTLARKQHFGPDWYAFSPQRQDDIVNRLLTEEDESTLISWLQKETGIDEARAEAIANVGLVDGYASLSSKAIDLILPQLQGEVCTYDAAVQAAGFEHHSHMGARATGEILPELPYYGKALQRYVGFGTGVITDTEEKRYGRIANPSVHIGLNQVRVVVNELIRRYGLPNQIVVELARELKLNQEQKRETERQQAANQKRNDRCRQEIAKVLGIDENQVKRDLVQKMILWEELSFDPTERRCPYTGVQISLGMLLGDEVEIEHILPFSRTLDDSLNNKTVSLRKANRVKSNLTPWEAFGKNATVGFDYEAILARAQHMPLHKRYRFAPDGYERWLKDEKNFLARALNDTSYLSRVAKEYLTLICPQGTWAVPGRLTGLLRGHFGLTNADILGWRGKKNREDHRHHAVDACVIGVTDRSTLQKLSTANASARERLLGKLVDTMPLPWPTYREQVKRAVNNIWVSHKPDHGYEKSMHNDTAYGLLDDGKVRVRKDVDGVRTRVIENLDVIPFASVKAGGRHGYLPDGSPKPYKGYKGNSNYCIEIVKTESRRWVGEVVSTFQAYQTVRQYGAVEGWRQLRNKRQGLSGKPLMMRLMINDVVRLEEDGRARTMRVATISANGQIFLADIHEANVDARNRSKSDPFVYISKTAGSLQKAKGRCVTISPAGRLRDPGVL

SEQ ID NO: 2406 - protein, 1118 aa, unidentified
  REGION 1..1118: note = Description of Unknown: Cas Enzyme sequence
MQNNSQISYRLGLDLGTNSIGWAMLALNQNNEPCKILDAGVRIFSDGRNPKDGTPLAVARREARGMRRRRDRFLTRKSQLMNCLIKLGLMPKDEIERKKLELLNPYQIRAKALDEALNPFELGRAIFHLNQRRGFKSNRKERVTDYKKLSETKRNQENLANKISETNSRTLGEFFYRERILKELTARAKPDESGLYPTRVMYENEFNEIKKVQFQNQKLSEENWQKIKEIIFHQRPLAPQEKGVCQFINKFKSLPNWAAEIFENYQKLSERNKNSKGLPRAYLALPSYQKFRILSEINNLKIIRNNREEILLDAAQKRKLIEYLHENKSAKFSSLRKQIGYGAEEFQFNFEGGKRDKLQGNETEIFLKDKKFGEKWHNFSLQKQDEIVEFLLDTENEEAIHQKALQEWNCNEEQALEIKKITPNNFKSGVGNLSKEFLQKIVAEIAEKNCRYDEATENLGFHHSKKEFGEIQSQLDYYGKAIPASTVPVKSGSEEEVFYGRIANPTVHVAPNQVRKVVNSIIKENGSPSEIHIELARDLKISQKEKDEIESQQKKNEKENEYLRKELENLNQRNTYGNRLKLKLWKELNPNDCNDRKCPFCGTQIGVNKISSHEIEIEHILPFSKTYDDSIANKTLAHRNCNQKKGNLSPFEAFGDSTFERIQNLPKNKKWRFYENAMEKFSDESGFQERQLNDTRYLSKIAHQYLAQICDPNKIKVANGKLTSLLRHHWGLNSILNKETERPLDQQNPEIENLREATFDSETDEVFESKSQEKNKKQKPKNRDDHRHHAVDAIVIAMTETKLLQQISRDNAIGHDLDRLIINVPNHWNRFREDVVEAIEKIVVSHKVDQSANSELHSQTSYGVLKKKIADEDSKKQSFNVVFSKSGGITSLNKNEIERIRDKKIRNNLMELTKDISKSKSDEKRLLSILQQFSRESGVKNIRILDKIQTAVKIEHGKNNQFSKAISPDNKSHISLWQMPNGGIITDVVSSLRMTSIYEIIERDGMCLINKSKKFPQDQVYEKLKPHPAAKLIIRLFKDDMVRLEKNGETLTAKITSVPDSTQCSYALHTSFSSNKEAKGTFYLNKNTLVDKKLRKIFVSPSGKVFDSGPILKTTKEN

SEQ ID NO: 2407 - protein, 1130 aa, unidentified
  REGION 1..1130: note = Description of Unknown: Cas Enzyme sequence
MQNIQKQNYRLGLDLGTNSIGWAMLALNQENQPYKILDAGVRIFSDGRNPKTKEPLAVARRTARGMRRRRDRFLARKSKLMNCLVNLELMPKNEIERKKLESLNPYELRTKALYQSLNAFELGRAIFHLNQRRGFQSNRKEQVADEKKLSETKQNQEALKNKIGETNSKTLGEFFYKERILKELTARAKPDESGLYPTRDMYKNEFDEIQKAQFKNQKLSEENWQKIRDIIFDQRPLKAQEKGVCQFINKFNSLPNWAAEAFENYKNSDKENKNAKGLPRAYLALPAYQKFRILSEINNLKIVKNNREEILLDAPQKKKLVEYLHENKSAKFSSLRKQIGYAGEEFKFNFEGGKRDKFDGNSTEIFLKDKKHFGAKWHDFSLKEQDEIVEFLLDEENPEKIYQKAVNSWQLSEEQALEIKKITPNNFKSGVGNLSKEFLQKLVVEISEKNCRYDKACENLGFHHSQKDQPEIQNQLDYYGKAIPASTVPVKSGSKEEVDYGKIANPTVHVALNQLRKVVNAIIKESGNPSEITIELARDLKISQDEKREIEKAQKKNEENNKKFGEELNSLNPPQRNNYENRLKLKLFYELQKANNGVACCPYSGKTINIANLFSFEVEIEHILPFAKTYDDSVANKTIAYRAENQKKGNRSPFEAFGDATFERIKNLPNNKKWRFYENAMEKFKDENTFQASQLNDTRYLSKIAKQYLAQICDPNKIKVANGKLTALLRHNWGLNSILNKQEEENFDPETGEILAKKPVKKTRDDHRHHAVDALVIAMTETRLLQQISRDNSRGHDLDRLVINLPSHWNRFREDAVEAIEKIIVSHKPDHGKNSQLHEETYYGIIEPSIAIEREGKKDEGYNFVYSKPFASLSENEIERIRDERIYQELKEKLAGISGKKEFENALSNYRLKTKNGEIKIKNIRLIKKESRFTTISNNQLVLQKKELGGVEEKTHTKAVVGSNHHIAIWQMPKLEFLPLIHLKEKKLEAALNKLSEAEKVKFERFKNHQEKLKNWISKDCHYAVSCASSFEAAKGDENQFKPHPAAKLLTKIHNGDLMKFKIKDSQIIAKTLKLVPSNDGIALLKHNETGKEIKQIWLSFSKFKEVELTKIFITPTGKIFDSGAILKTT

SEQ ID NO: 2408 - protein, 1101 aa, unidentified
  REGION 1..1101: note = Description of Unknown: Cas Enzyme sequence
VAYRLALDVGTASLGLVALTLNDQQEPVDVAHSAVHIFSEPLLPAKSGGVGEPKKAARRLARQRRRLTERRARRLRRIAHLSPLIGLQASQVEPDDGQHIHALRAKAINQRIELPELLNVLLKLAKRRGYAGGFKVKKDGEDAGQVQSGIENLKTRLSDNSCSTLGELLHKRFGDTEHAGRGPRESLKLKTLGLYAHREMLEDEFERIWSEQARHHPILKTEAAAYSVRGVAEKLPIKQHFKEAIFYQRPLKSVAGMVGQCVLEPTLPRAPAAQPAAQAFRIEKQLADLRWGMGRAQRALSKEQRDHIRAMLLDPEQLNRDGALTFGKIYKSLEKAGLRQDFPTQFNTDRFSRETLLGDRTTKAMSEAKMLGRWMALDTITQLRVINFLANLGSPESVDSPNWQERMEPAPKPEVVAFVNQWVDSGTFDRLGKMGFDTGRAAYSIKALKQLAGKMQKGEGCDEHAARDILYKPSAPTGELLMHLSQPAPAGNVVVDVALRVVRHAVNQCLQAMGQPPAQVIVELSRDMALGLKARGEKEKGIDKQRRARLYAKSQIEGSQPGRTATNNDIFRYLLAQEQDFHCPYCTRRLELGEALDGNATNADHILPRSLTRVKRERSHLVIAHRACNAAKGDSVPLEAFKGDADRISAIENCANILKRKRSFRKASYLLSESYDAEKLDDKSLEDFTARQFAETSWIAKLVAQWMTDVCQDVSVSRGELTAQLRRAWKLDTVIPQVRLETKVDPTSDHPDNHLPLLDDNKPAKPVSREDFDRFRACWENHHSPEVERTDRRIDKRIDHRHHLIDALVIGLTDRRLYMNMARGYKERMEQRAAGVRGIKPWQTPEPPLRNIREIALRLVREVNVKHKAHRYPAGAFFQQMAYAKTYTDDGKSRIALSIDLIALTDSNHSLDKARKGISDIVSPGTKEIVSNEFERRISAGQSVKTALSTPIADPRYGTLICQVRVYQRLGRGYASGEDAIKVDLVGRPYRASTPAEKHYLSDGYAFIALIANEADLVIDAVSVRSADAPNFDLSRVARRIFRSDTLVDESGNRHLVHQILADGVIRTAPLTESRSWIQLGAEAGAKQFGKAAVMQLKIER

SEQ ID NO: 2409 - protein, 1096 aa, unidentified
  REGION 1..1096: note = Description of Unknown: Cas Enzyme sequence
MNYRLALDIGTASCGLIAVKLDENREPSEIIHHGLHIFSEPVLPHAAGETGEPKKASRRKARLARRNIDRRVRRLRRIAMLSSLLDLDHKTIPPDKGQHIHEARANAPQKRIELDDLVRVFLKLAKRRGYAGGFRTKTDKQRDEDSGVVQPGIEKLQEAMKAADCKTVGQYLSHRFSNGETLKLKEAGLYTHRDMLIGEFEAIWTEQEKHHPILRESRLDPVAKFADGKEKIRPLREQFREAIFYQRPLKSIAPMVGNCALEKSLPRAPMAQPAMQAFRIEKQLADLRWGMGRSALPLTSEQKSVIRDMLNDPDQITKEGKLTFKKIYAALEKKSLMPASRRSLNMERSSREELYGNRTFRAMRDLDAIEQWLTFDSPTQIRIINFLADLGSPEQVDLPDWQDRFTKRKRVKNHRTGRWEEKHEKRNLDRNLVNFVNKLVENGKFGRLGGMGFESGRAGYSVRALKILTDMMRNANCDEHAAIQTCYPPPPPTGELLMHLSPHPPTGNVVVDVALGVVRHAVNDALAKLGEPPTEIVIELSRDMALGLKARGKIEKKIDKNRKLRDKARQELEANSQLGTERNILRYILWQQQDTHCPYCGDRISLGEAVDGNSTNFEHILPRSLTRVGKQRNHLVLAHRRCNDAKGDRTPYEAFGHDEMRWNAVKYCADVLEKKKQFSKSKLLILNEYERETLDEAAIDEFSDRQLHETSWIGKLAALWLQTICPTPVAPSRGTLTAHLRRIWKLETVIAQARLEAGLPVLDQGGEKITPEEFDRFRPYWEGHTGKGIERTDRKIDKRIDHRHHLIDALVIAQTSRSLYQRMAKNYKSLAERQQAGEAVRLRLFVEPPLKNVREQALALAQGADIRHKPDRQISGNFFQQTAYRKTYTEDGKSRAVVRIPLIQLTDTKGSLEKAKKGISDIVSDHTRRVVSSSFEQRISSGKSVKEALTEPIYDPQFNTAIKRIAVYQRIGRGFLDGSNTFPIEHGYGFVKHYVSDGYAFVSITEKNGRIESADSVPLFRAHRLNGYPKDGERRFFRGDTLLAPGNGKKYVIHQLLANATVRVAEVTESRSWIALGAESGATQFGAASLIKMKRL

SEQ ID NO: 2410 - protein, 1092 aa, unidentified
  REGION 1..1092: note = Description of Unknown: Cas Enzyme sequence
MKYRLALDIGTASCGLVGVKLDENYEPTEIVHHSLHIFSEPVLPHAVGETGEPKKASRRKARLARRNIDRRARRLRRVAMLASLLDLDHKTIPADKGQRIHEIRAQAPQKQIELDDLVRVFLKLAKRRGYAGGFRTKTDKQKDEDSGIVQPGIEKLQIVMKAVDCKTVGQYLQHRFRNGETLKLKEVGLYTHRDSLVHEFDCIWNEQAKHHPILNETKPDPVHGGERAIRQQFFDAIFYQRPLKSVAPMVGNCALEKNLPRAPMAQPAMQAFRIEKQLADLRWGMGRSAQTLTSEQKSLIRNLLNDPDQITKEGKLTFKKVYAALEKKGLMPTTRRSLNMERSSREELYGNRTLRAMRDLDAIEQWLTFDPVTQIRIINFLADLGSPEQVDLPDWHDRFTKRKRAKNPKTGRWEEKQEKRDLDTNLVSFVNKLVENGKFGRLGDMGFESGRASYSIRALEKLTRKMHETNCDEHTAIQSCYPPPPPTGELLMHLPLHPPTGNVVVDVALGAVRRAVNNALTKLGEPPTEVIIELSRDMALGLKARGEIEKKIDKNRKLRENAKKALEANDPPILGTDNNVLRYILWQQQDNHCPYCSDRISLGEAVSGNATNFEHILPRSLTRVGKQRNHLVLAHRRCNDAKGDRTPYEAFSHDEERWNAIKYCADVLEKKKQFQKSKLLILNEYERETLDDAAIEEFSERQLHETSWIGKLAALWLQKICPTPVAPSRGTLTAHLRRIWKLETVIAQARIEAGLPVLDQDGEKISPEEFERFRPYWEGHSGKGIERTDRKIDKRIDHRHHLIDALVIAQTSRSLYQRMAKNYKALAERQQAGETVRLRLFVEPPIKNVREQALALMQSADIRHKPDRQISGNFFQQTSYRKTYTEDGKSRAVIRVPLTQLTDTKGSLEKAKKGISDIVSDRTRKIVSGAFEQRISSGKSVKEALAEPIYDPQFNTMIKRIAVYQRIGRGFLDGSSTFPIEHGRGFIKHYISDGYAFVSIIENDGRIESADSVPVFRAHRVNAAPKDGERRFFRGDTLLAPTNGKKYVIHQLLANATVRAAEVTESRSWIALGAESGATQFGATALIKMTRL

SEQ ID NO: 2411 - protein, 1088 aa, unidentified
  REGION 1..1088: note = Description of Unknown: Cas Enzyme sequence
MKISYRLALDIGTASCGLIAVSLDSRGEPAEIAHHGLYIFSEPLLPPKAGGIGEPKKAARRNARLARRVIDRRARRLKRIALLSRLLGIDHSNVTPDDGQHIHALRAKAATEPLEIEDLLRVLLKLAKRRGYKGSFKVRKEKDEGVVEPGINQLRQHIADAGCNTLGQYLSKRFDAGDTLKLKEAGLYAHRDMLEAEFEEIWTEQAKHHPLLSESRPDPLDEHKRLRSIRDQFHGAIFYQRPLKSVAPMVGNCALEPSLPRAPMAQPAMQAFRIEKQLADLRWGMRRNAPGLTAEQKTLIRKLLNDPGKLTKEGKLSFKKIYEALEAEGLRPDYPRSLNMERSSREDLTGNRTLRVFKDIVLLDEWRALDEITQLRVINFLADLGSPEQVDQLDWHDRYTKTARVKNPKSGKWEEKHVRRDLDHKLVEFINRMVDTKKFDRLNKMGFETGRASYSIRALEKLAAAMREENCDEHEAIQHLYPPPEATGELLPQLLPHPPTGNVVVDVALRQVRRAVNDALTRLGQPPAEIVIELSRDMALGLKARGDIERKIDKNKRQRQDAKKALESNEPPIPGTDRNVLRYILWQQQDTHCPYCGERISFGQAVDGNATHFEHILPRSLTRVGKQRNHLVLAHQSCNNAKGDRTPFEAFGHDGERWKAVEYCASVLKSNKQFAKARLLALTDYEHEILDDESIADFSERQFVETSWIGKLTAQWMKEVCTKVSVSRGLLTAHLRRIWKLETVIAEARLNAEPPLPVLDADGNKITLDDFKRFKPFWEGHNGKDHPRTDRKIDKRIDHRHHLIDALVIAQTSRSLYQRMAKHYKELAERRREGEAVRMTFSVEPPLRDVRSQALVLVREAAIRHKPDQFSSGMFFQKTAYRKAYSDDGDSRLSVRIKLEELTDNKGSIDKARKGISDIVSSHTRRVVSNEFERRIQAGESVKQALSLAIIDPQFNTPIKKVAVFQRVGRGFVDGSSAFPVKNSWYLSDGYAYVSITEEDGRIVAAESVPLISAAAQHASRTAGERRFFRGDTLRDKATGTMYIVHQILANATVRVAPVTESRSWIELGADAGATQFGARALIQLIRA

SEQ ID NO: 2412 - protein, 1182 aa, unidentified
  REGION 1..1182: note = Description of Unknown: Cas Enzyme sequence
MVVKYRLGLDVGTASVGAAAVSLDKDGQPDALIWHHVRIFNEPLENGQAGLVSKKAGRRKARMQRRQIDRRASRLRHIAHLSSLLGLKRAEITPDDGSTLPYLRAQAATERVELDNLLRIFLRLSKRRGYKGEFKAKKKGEVAEGSSELSFAMRALATERGIVLKNENDTGITLGQYLLYRLESGLPTKLKIKEINDESKNKKGEDANAPKNLYALRKMIEHEFNTIWDTQAKFHNILNGTHDGIPIREHFYEALFYQRPLKSAAELVAQCSLEPTLSRAPRAQMAFQRFRIEKTLADLRWAAGKRAEPITPDQKRVIRDLLDRNDKVKFDEIYEALKNAECAKPETKGLNLERASREELLGNSTLAALRKLDKYSTKHHPERAANLEQAFRALDEKIQIATINFLAEIGSPEQLDDPEWHTCFVKSVKDVKVKDNKSKEQWKYKNVPRVFSPELISFVNCIKEHDNFDRLSKMDFDGGRASYSVKALNNLAGWLEEPNWPGDWQDDMKRMDEEAAIRVCYPKSLNPEIKRLQTLPSPESTGNAVVDGSLRQIRWTVNKMIAELGGPPDEIVVEMAREMSLGIARRNEREKEITNNQKARREAEKTIREHGEVPTRPKIFRYLLWAEQDESFCPYCNKTINLTEALSGGATANEHIIPKKLTQVGKKRSELVLSHSVCNDAKGDFTPFEAWGNGKNEMRWQAVEAAAKRFLAKALSLKKKIDNARRNDTLAPYRGEMNGLFRKAALLRLQDAGDDESVEGFADRQLHQTGWIAKEAVQWLECLCPKRVSVSRGELTAMLRRSWKLETVIPEVRIENNLPVLDNEGKPIEPEYFSQLKKYLEGHPVRREDREANPGFEFNRRPDKRLDHRHHLIDAITLSLTSRSLFQQMAKNYKAAAEKMQPRDGETADDRERRIKNETRLRLEVPEPPLRNVRAAALDAVRECRITIKPDRYPDGALFKETAYGVAQRDGEDRLRLSLRQPVARLGKAQGKTNLEAARKAIANIISDNVRRIIAETFEVRIAQGMEAGASLTQPILHPFYGKLIRKVRCFETYAEDAQPIGFTSRHGEHRKYLINAGYAYLELCTDGSREPRLVKTRDAMHEKGKPTPQNSMRIYKGDVVMDSKDSLLYKACFFKAAGVIGLLPIWEPRSFKEANEKADKGIKVGGTISFTPAAKRLKVVC

SEQ ID NO: 2413 - protein, 1156 aa, unidentified
  REGION 1..1156: note = Description of Unknown: Cas Enzyme sequence
MAAKYRLGLDVGTASVCAAAFSLDKDGFPDKLIWHHTRIFNEPLEKGQGGLVSKKAGRRKARMQRRQIDRRAARLRRIAHLANLLGLNREEIPPDDGSSLPRLRAQAATEKIEPADLLRIFLRLSKRRGYKGEFRAKKKGEVAEGSNELKQAMRALATERGIALKDENDAGITLGQYLLYRLDNGLPTKLKVKEDDDGDFKGKRTEKANAPKNLYALRSMVEHEFETIWNTQAKHHPILNSVYKDKPIREHFYDALFFQRPLKSAAGLVAQCSLEPTLQRAPRAQMAFQRFRIEKTLADLRWGSGKRAEKLTCEQKQIIRDLLDNQEKATFESIYEVLEEAGYPKPQGKGLNLDRSSREELPGNKTLAAFRKLDKHSAKHHPERANNLEQTFLKLDEKTQIAVINFLAELGSPEQLDDPEWHNSFVKRDRSKREFREPLIEFVNRIKDHDNFDRLSKMGFDSGRASYSVKALRKLTDWLKEPEWPGDWSDTEDGAMSVDEEGAIRACYRAEIKKRRKVVQQNRLPAPKPTGNAVVDGALRQIQWIINKMIAELGYPPEEIVVELSRGMNLGITRRNEREAENAKNQKVRRDAEQEIRDHGMYPTDTKVDRYLLWSEQDKSFCPYCNQSISFEQAMSGAATECEHIIPKKLSQIGKKRSELVLSHSSCNHAKGDFTPFEAWGMGRNSIRWQSVESAANRFLAKALALKKKFDDARRNDRQAPFRGEMNGLFRKAALLKLQEAREDETVDGFADRQLHQTSWIAKEAALWLACLCPNKVSTSRGELTAMLRKSWKLDTVIPEVRYENKLPVLDEEGKPVTPEDFAQLRKYLERNVSKEERGADKKANPGLNFNRRPNKRIDHRHHLIDAITLALTSRSLFQQMAIAYKIAAEKEERPRLKAPAPPLLNVRSAALQAVRECKISFKPDRYPEGALFKDTAYGVAQRDGEGRLRLTLRTAVAGLGKIKGKTSLESARKAISNIVSDSVREIVSEVFESRIKQGLAAGTVLEKPIFHPRYNKPIKKVRCYETFAEDSLPIMFRSRHGEHRKYLVSAGYAYVDLRTDGSKEHRLVKIRDALCNRKRAAPENVLRLYKGDTVLDSKDGLLYRVCLFKAAGTIALLPIWEPRSFKEANEKAEKGSKVGGTISFAPAAKRLKRID

SEQ ID NO: 2414 - protein, 1275 aa, unidentified
  REGION 1..1275: note = Description of Unknown: Cas Enzyme sequence
MAVKYRLGLDVGTASVGAAAVSLDKDGQPDALIWHHVRIFSEPLENGQAGLVSKKAGRRKARMQRRQIDRRASRLRHIAHLSSLLGLKREEITPDDGSNLPRLRADAAIQRVELGDLMRIFLRLSKRRGYKGEFKAKKKGEVAEGSSELSLAMRALATERGIALKDENDTGITLGQYLLHRMESGLPTKLKVREISDEPKSKKGEDANAPKNFYALRKMVEHEFNTIWDTQAKHHDILNGMHDGKPIREHFREALFYQRPLKSAADLVAQCSLEPTLSRTPRAQMAFQRFRIEKTLADLRWGAGKRAEPITPDQKRVIRDLLDRNDKVKFDEIYEALKNAGCAKPETKGLNLERASREELLGNSTLAALRKLDKYSAKHHPECAVNLLAAFQSLPKETIADVNGKRIVEKTQIAVINFLAELGSPEQLDDPEWPRQIAASDGTRPYVLAYDNPEKYLLKYNSTPVNKRGANYVELIAFINRIKEHDNFDRLNKMDFDGGRASYSVKALNNLTDWLEEPNWPGDWQGDMDGRDEETAIRVCYPKSLNREIKRMERLPAPKSTGNAVVDGSLRQIRWTINNMIDDLAKLGQKYELTEIVVEMAREMSLGITRRNEREKENTSQQKARREAEAEIRKVNVTPTPPRIRRYLLWKEQDSHCPYCENNIRIGEALDGAATEFEHILPKKLTQVGMKRSEIMLAHYACNQNKGDRSPWEAWGDGRNDARWQHVEAAANRFLSKAISLKKKIEDARRNDRQAPYHGEMNSLFRKAKLLRLQDIGDDESVDGFADRQFHQTSWIAKEAMQWLECLCPSKVSVSRGELTAMQRRSWKLETVIPEIRIENNLPVLDNEGKPIEPEDFAKLKKYLEGHPVLKADREANPGFDFNRRTNKRLDHRHHLIDAITLALTSRELFRQMANNYKAAAEKMQSRDGETPEERERRMRSETRLRLEVPEPPLLNVRAAALDAVRECDISIKPDRYPDGALFKGTAYGVGQREDEDRLRLTLRQPVEGLGKVQGKTKLEAARKAIASIISDDVRRIVGDTFEDRIANGMEAGAALALPIRHPLYSNPIRKVRCFEGYAEETQPIGKTKLFSIATLGITNNGSNLESVRAAIASIAREDFRRIISQTFEERIAEGLELKNTLAIPIFNSLNGKQIRRVRINCTGNWRPKYLINEGYAYLELVMNGSREPRLVKIRDAMRDKNKHVSQGVVRFYKGDTIKDSKDGKLYRVGYFKAEGNIFVIPIFDPRSFDKITEAGSGKKKVAFTQAIKRLTLIG

SEQ ID NO: 2415 - protein, 1159 aa, unidentified
  REGION 1..1159: note = Description of Unknown: Cas Enzyme sequence
MAMKYRLGLDVGTASVGVAAVSLDKGGQPDALIWHHVRIFNEPLENGQAGLVSKKAGRRKARMQRRQIDRRASRLRHIAHLASLLSLNRTEILPDDGSSLPYLRAQAAIERVELDDLLRIFLRLSKRRGYKGEFKAKKKGEVAEGSNDLKQAMKALAIERGVELKDENDTGITLGQYLLYRMEQGLPTKLKVKEIGDETKAKKTEDADAPKNLYALRSMVEHEFNTIWATQARHHAILNGTHEGKPIRDHFYEALFYQRPLKSAAELVAQCSLEPTLPRAPRAQMAFQRFRIEKTLADLRWGAGKRAEPLKPAQKKTIRELLDHNDKVKFEDIYEALEEAGCEKPQGKGLNLDRASREELPGNGTLAAFRKLDKHSKKHHPERAANLEAAFRALEEKTQIAAINFLAELGSPEQLDDPVWHTSFVKRDGKPRQFSEALVSFINLIKEHDNFDRLSKMDFDGGRASYSVKALNTLADWLEEPNWPGDWQDNMKRMDEEAAIRVCYPKSLDREVKRLDKLPAPASTGNAVVDGSLRQIRWTINKMIDDLAKSERKHELSEIVVELAREMSLGISRRNERESDNTKQQKARREAEKEIRAHGKAPTPSNIRRYLLWVEQDKSFCPYCNKTISLAEALSADTEFEHVLPKKLTQVGFKRSEIVLAHYNCNQEKGDRTPWQAWGEGRNDMRWQSVTAAAARFDAKKNFRKAKLLRLEDFEREVLTDESIDGFADNQFHHTSWIAKEATQWLECLCPNKVSVSRGELTSMLRRGWKLETAIPEVRYESNLPVLDTGGKIDDKGKASPAQPITPDEFAILKKYLEGHPVRSEDRKANPGFDFNRRPDKRLDHRHHLIDAITLALTSRGLFQQMAKNYKAAAEQMLPRDGESAEDREHRIKTHSRLRLEVPEPPLRNVRAATLDAVRECNITIKPDRHPDGALFKDTAYGVAQRDGEDRLRLALRQAVANLGKTQGKTSTEAARKAIANIISDDVRRIVSEEFETRLAQGMDANTALAKPISHLLYGTPIRKVRCFETYAEDAQPIGFASRQGEHRKYLVNEGYAYLELFTGSSREPQLVKIRDAIREKGKPVPKNVMRIYKGDVVKDSKDGLLYRVCLFKAAGTIALLPIWEPRSFKTANEKAEREAKVGGTISFTPATKRLKLAD

SEQ ID NO: 2416 - protein, 1096 aa, unidentified
  REGION 1..1096: note = Description of Unknown: Cas Enzyme sequence
MSYRLGLDLGTASIGAVAVSLQDNKPSAIVWHTVRIFPEPVQRNASGGLVLKKADRRQARQLRKQIDRRARRLRGIAQLASLLKLDKTQLLPNTRQNLIALRAQAARQRIELTDFYRVLLQLAKRRGYPGSFSQKKKGKVKDKSDKLQLAMQELATTKKLPSVTLGEYLYECRMMMGLPTKLGAEHPENHEPLCALRQMVKEEFEQIWENQAKYHPLLKTQSIKDKFNSAIFYQRPLKSPAAAVGKCGLEKNLPRAPRAHMAAQNFRIEKTLRDLRWGSKNGELLSEEQLNVLRKLLETPSNSDGKVSFENINQALKEAGLQDEKQRKLNLSQHRRYLIGNKTIAVWKKIGLLESWDALSENSQTTIINFLADLGSPEILEDDKWHLKIRGAKSLVCRQFAQEVIEFIDKLRSNEAYDRFSKMDFEAGRSSYSIKALNKLNEWLKNPWWPADTDDTNIELYGKVDEDTAIRVCYPDYFKKPASLLDRLDKPSRTGSVVVDIALRELRNVINECINKLGESPKEIIIEMVREVNMGIDARNEHEKRRAQNELDNQRIAKEITERDEKATDTNIKKYRLWETQNNKCPYCGGVIKVSDVFDGRVTNFEHIQPRSWTQVGQKQSEIVLAHTTCNTKKKNQTPWQAFGNDPDLWEAVKNAAKNFEEQATKANIKKDFAKKQMFKRKSQLLLMEDWIEEEETIDDFVDRQRQQTSWISKAVSKWLRTIAKSVSVSRGQFTATLRRKWSLETVIPEARLQEGLEILDTQGKKISQETFKQHKLQWEGHSANRLEATDQKLNKRIDRRHHAIDALIIALTDRSLYKNLTENRRDEYKKPKESGTRIKGDLSIEPPLPNIRDQASKMIQDCHVHYKSDHNVNGKFFQDHAYGTLDKEDGEQSQLTIHKSLKDLIDSKSLDKTNKNIESIVSPTVKAIVEKAFKEGMESGKNYKEALCEPIFYPAYKTKIWKVLCFAKRYTKEANCIVHTSRNGTHKKYLLNNGYAYLELRIKNGKPTTKLVAYQEAKNIGFVKTQEKDVVRFFKGDVVLNKVDNLKYVIGKYSAQSDGTLFLFPIAEARTVSELEKAKVRKTVSGKNLLNLQLV

SEQ ID NO: 2417 - protein, 1064 aa, unidentified
  REGION 1..1064: note = Description of Unknown: Cas Enzyme sequence
MAQLKYRLALDVGANSLGWCVYALNDQDEAHAIRRLGVRIFSDGRTPKTLASNAADRRAARQARRRRDRVLKRRQRLLQQLVRFGLMPEDETQRKAIQEVDPYALRARGLDEPLTPHELGRAIYHLARKRGFQSSRKDRKDKDRKDAEAVKEEGKVNSAISALRERIAHAGCRTVGEYLAAQHAERRPVRGRRAADGGYVLYMQRGMVEDEFDQLWKAQRQHHPTLLTDAARDTLRDTILFQRRLKPVLPGRCQFEPDALRAPLCSPLQQRFRILQELNNLRVRDGIGQRPLTLAERNVMRDALLHSKESISFVNLAKLAGLKNAKQFNLESEKRKGLRGDSTGASFAAVETLGQDWHRLDDMQREAMALLVERTDQEDRLVAALVALPDDLAAARDAMRPHPHEQALLESLGGLPFRLDDARARRVARIVLPDDFGSLSYKALARIVPELEREVVTYDVAVQRAGYVHHSQLHTGEIFDRLPYYGEVLRGFTAPMPTAKVADENRWGRIPNPTVHIGLNQLRQLVNALSKRYGPPSEVVIELTREFGLSGQRRREIEKEQADNQARNERYNDKLRSLGQAPNRTNREKLRLWEELGRDDAMDRCCVYSGERLNQTLLFSDEVEIDHILPFSKSLHDGIGNKVLCMRQPNRDKGNRTPHAAFSHSPGRYRWDEIEERASRLPARKALLFRESALEDFLGDRDFLDRHLTDTAYFGRAAKQYLSYVCHKDRVWVSSGRLTGMLRGKWGLNALLSGDSRKNRNDHRHHAIDAAVIGMCTRSLIQRMANAAAEAERCGENRLLERLELPWPTFRDDLKANVDKIVVSHRPDHGPEAALHNDTNYGWRGEPDKRGTRLVGHRIPLEAIKSAADTRKIADSRLREKLEKLLAPLSGKAINAALHAFSQRTGIRRVLVEERYAVIPICDRRSGEPYRYVRGDGNYCYDIYCRDDGRWDGDIVSRYDANRPGFDVRARVSRNGIPLRMRLRRDDLLALELEGQRLLFRVAEMSKGKVILAPHGEANTNARNKDENDPFKYLQKAPSQLKSLRARIVGVDMLGYVNDPGFVD

SEQ ID NO: 2418 - protein, 1064 aa, unidentified
  REGION 1..1064: note = Description of Unknown: Cas Enzyme sequence
MRYRLALDLGTASVGLVAYELNETNAPLGVAYHVVRVFDEPVLPAKGGSVGEPKKAARRQARQQRRQLERRARRLRGLAQVLGEALGLDLRSVPPDPGQHIHALRSASAHERVELPGLLNVLLNLAKRRGYAGGFRAVADDNDDSQVKAGIDRLRTEMAERGCDTLGDYLSWRAANGQTLKLKTVGLYADRDMVREEFERIWRIQATHHPRIAAGGEALRKRVAERIFHQRPLRSPAPAVGNCPLEPSLRRAPMAQPAAQAFRIEKQIADLRWTNGRWSQPLSPAQRGVVRDLLAQHPRQTFTQIYRALQKRGCPRPEIGWLNLDRSSREELIGNKTDAAMARLGLAEDWAGLEAGQRVTVINLLADIGSPETLCIPGWHEQLVTGGKQRRKRVLPAAVVAFIDKLAAQPAFGRLGAMGLDGGRSAYCVKTLCRLADAMGEKGIDEHEAVARLYEAPKTQQQATAAELGRPRPTGNTVVDVALRQVRYTVNAAIRHLGTPPTQIIVELSRDMALGINRRREIEYRINKNQRARRQAAEAIAAHDGRVTHSAIRRYLLWREQDEQWCPYCERPINLSDALDGNATHYEHIYPKSLTRIGKQRDFLVLAHRDCNDFKGNRTPWEAWGEDDARWQIIKQRAARFREKRLNGKAKQLLAQEPVDRALNDKVINDFSARQFHESSWIAKQAARWLREVCGDVAVSRGMLTAHLRRSWALETVIPEARLAEGLRLRDTDGKLVSAAEFQRYRRYWNGDRSGEATERELDKRIDHRHHLIDALVIGLCDRSLYQRMARDYKQAQERGETRLTLRVKPPLPNLRAVAVELVRHCNLSRKADRYVSGRLFQDTAYGCTPDGQHLTKRKAVAELGGGAKATLSKVRKDIDKIVHESTRDLVRQAFERRVAAGRSPAEAISEPIQHPAYGTVIKRVLLLDEKTEGTKAVDHYARGDHLFKHLKPFDNAYLELVAGSGSKFEKRLIRRYEAKNHTMPVGVVGFAKGDTVRHPDNGLHYVVGQIKTERGGVLLLARLVETDPVDKVKGSPGFAYMSSGPALAKLEIVPDVIAPDSSD

SEQ ID NO: 2419 - protein, 1100 aa, unidentified
  REGION 1..1100: note = Description of Unknown: Cas Enzyme sequence
MRYRVGLDVGTASLGVAAFSLDENNNPLELVWKHVRIFDEPLEKSQAGLKSKKAGRRAARMQRRQIDRRLGRSKAIAALAPLLGIQMEPSIDSGCTLLEIRAKAAREQIDLSDLIRVFIRLGKRRGYGGEFRPKKEGTKLGEVEGGNHDLKTEMQGLAESKGFDAVTLGEFLYQRWLDGKPTKLKIKEPDDKTTEGKNLYALRGQLVAEFEQVWQTQSAFYSILNSQHEGKFLKDIFNNVIFYQRPLKAVGGMVGQCGLEPTLARAPRAQLAFQRFRIEKTLADLRWGAGKRAEKLSATQKAVIRELCDEKELVKFDAIYNALEVAGCPKPETKGLNLDRLSRDEIPGNKTNHVFHKLGLGDSWLALDERTQVQVINFLADLGSPEQLDDPLWHTRFAKADGTMRQLPEAFVIYVNLLKAHEKFDRLSKMGFEGGRASYSIKALNKLTDWLDTPWWPDGWQGEMRPDEDAAIRVCYPESFNKPLVLKEKLDFAPSTGNAVVDGSLRQMRYVLNHMMADLGAQPEHIVVEMAREMSVGVSKRNERESENNKNRKARLAAEAEIRNHGVTVTPSRVRRFLLWVEQGKGHCPYCTKPITLGDALSGAETEYEHILPKSLTQVGLKRSEIVLAHRSCNQEKGNHTPYQVWGHDADRWQVIQVRAKYFADNKQYRKAKLLLLEDFEVEVLTDESIDGFADRQFHQTSWIAKEAAQWLQSVCKTPVSVSRGELTAMQRRKWKLETVIPQARVEEGLPILDEEMQVVSLVDFEKYRDVWEGHRVLDSHGHLDKSRHTDRKLNKRIDHRHHLIDAITIGLTSRSLFQKMARQYKIDSEREARGQKPRLEVGEPPIKNVREIALAAIRECPLSIKPDRYPDGAIFQETAYSVAVKDGEDKARLALRVKVADLIDRKKGTVEHARKAIQSIVSTTIRDIISKEFEGRIVAGRAAPEALAMPIYQTLYGQRIEIKKVKCFTGNYADDVAIISHTSKDGREHLKRLANGGYAYLEAEIRDGRLVGQPNLVKMQQAMMLKKSPKKEGVVRFYKGDTVFDTKENKKYRIGMFKAAAGFFLVPFIDPRAYNSIEEPNSGKKSLAFSQASRLKLVD

SEQ ID NO: 2420 - protein, 1093 aa, unidentified
  REGION 1..1093: note = Description of Unknown: Cas Enzyme sequence
MRYRVGLDVGTASLGVAAVSLDANNNPTDLIWKHVRIFDEPLEKSQAGLKSKKAGRRLARMQRRQIDRRKGRVKKIAILANVLGIQIEPSADSSSSLLTIRAKAARERISLSDLIRVFIRLSKRRGYGGAFRQKKEGAVLGEVEGGSNDLNKAMSLIAESRGLSSITLGEYLHERWQQGLPTKLKVKEKRDKEDELQNLYALRSHVEAEFEQIWQTQSAFYPILNSQHQGKSLKEIFGQAIFYQRPLKAVGGMVGQCGLEPTLARAPRAQLAFQRFRIEKTLGDLRWGAGKRAEYLSALQKAVIRSLCDENEVVKFDAIYKALDAAGCAKPDGKGLNLDRLSRDEIPGNKTNHVFNKLGLGEAWHGLDERTQIQVINFLADLGSPEQLDDPLWHTRFAKIDGTPRVLPQPFVAFLNQLKTLEKFDRLSKMGFEGGRASYSIKALKNLTEWLETPWWPEEWQGEIRPDEEAAIRVCYPHMFNQPITLKQQLDAPPPTGNAVVDGSLRQIRYVLNRMIADLGAPPEQIVIEMAREMSVGVSKRNERESENNKNRTARIKAEDAIRGANATVTPSRVRRYLLWQEQGAGHCPYCSKTIALADALSGAETEYEHILPKSLTQVGLKRSEIVLAHRSCNQEKGNRTPYQAFGHDANRWTIIQSRAKLFADKKAYRKAKLLLLEDFEAEVLNDDSIAGFADRQFHQTSWIAKEAAQWLQTVCKTPVSVSRGELTSLLRHKWKLETVIPQARIAENLPILDTEGRVITIDEFEKYQKIWEGHRAEDKANHTDRKLDKRLDHRHHLIDAITIALTSRGLFAQMARQYKINSEAVVHGYKARLEVIEPPIKNIRELAFAAIKECPLSIKPDRYPDGAIFQETAYGVAIKDGEDKARLTLRTKLVDLIDRKKGTVEQARKAIQNIVSDTIREIVSKAFEARIASGKTAPNALSEPVYQHLYGKQTKIKKVCCFTGVYADNVAIISHKGKDGRGYSKRLINGGYSYLEAEIIEGRLVGQPNLVKIQQAMKNKKLPKKDGIVRFYKGDAVLDKADGKKYRIGMFKAAAGFFLVPIVDPRAYNSIEEPNSGKKSLSFSQVARLQLI

SEQ ID NO: 2421 - protein, 941 aa, unidentified
  REGION 1..941: note = Description of Unknown: Cas Enzyme sequence
DAKGLESVTLGEFLYQRWLDGKPTKLKIKELDDKANTDKNLYALRSQLEAEFEQLWQTQSAFYPVLNSRHDNKSVKEIFQHAIFYQRPLKAVGGMVGQCGLEPTHARAPRAQLAFQHFRIEKTLGDLRWGAGKRADKLSAAQKAVIRNLCDEKEVVKFEAIYKALEAAGCAKPDGRGLNLERLSRDEIPGNKTNHVFNKLDLGDAWHGLDKRTQIQVINFLADLGSPEQLDDPLWNTRFAKVDGTPRQLPEPFVAFINQLKIHEKFDRLSKMGFEGGRASYSIKALNNITEWLDTPWWPEGWQGEIRPDEDAAIRVCYPHLFNQVITLKTQLDAPPATGNAAVDGSLHQIRYVMNRMIQELGAPPEQIVVELAREMSVGVSKRNERESENLKNRKARLVAEQAISDSGVTVTPSRVRRYLLWVEQGEGHCTYCSKTINLGDALSGAETEYEHILPKSLTQVGLKRSEIVLAHRSCNREKGNRTPFQAFGHDADRWQIIQMRAKFFTDKKAFRKAKLLLLEDFENEVLNDESIAGFADRQFHQTSWIAKEAAQWLRSVCKTPVSVSRGEMTAGLRRKWKLETVIPQVRAEEGLPILDEEGAVVTPEDFAKYRDVWEGHRVLDGHGKLDKARHTDRKLDKRIDHRHHLIDAITIALTSRSLFAQMARQYKLESERVGLSEKPRLRIGEALPLKNLRELALAAVRECPLSIKPDRYPDGAIFQETAYGKALKEGEDKERLTLRVKVVDLIDSKKGTAEQARKAIQSIVSDTIREIVSKAFEARIIVKTAPDALSEPIYQHLYGKQMLIKKVCCFTGIYADNVAIISHVDKDGREHSKRMINGGYSYLEAEISEGRLIGQPNLVKTQQAMKAKKLPKKEGMVRFYKGDTVLDVGNGKKYKIGMFKAAAGFFLVPITEPRAYNSIEEQNSGKKSLSFSQVAKLKLI

SEQ ID NO: 2422 - protein, 1092 aa, unidentified
  REGION 1..1092: note = Description of Unknown: Cas Enzyme sequence
MKYRLGLDIGTASVGAAAIRLSDNGEPLDLVAHEVRIFDEPLENGGLGKLQSKKAKRRQARMQRRQIDRRAGRLRRIAALAPLLGLKREELQPDSGANLPRLRAQAARERVELEDLMRIFLRLAKRRGYAGDFRPKGENAKVGEVEGGSNELKRQMAELAEARGVPYVTLGEFLYHRLQQGFPTRLKLAEQPTPELQNLYALRSQVEQEFSHIWDTQAQYHPVLNTSRDGRPLKALFAEAIFHQRPLKSPRDLVGHCALEPTLPRAPRAQPAFQRFRIEKTLADLRWGVGRHALPLTPQQKDVIRRLLDEKEKVSFKTILAALEKAGCGQPPGRGLNLDRASRDELPGNKTNAVFRKLGLENEWRLLDERTQVQVINFLAELGSPEQLDDPQWHTRFAKADGTPRTLNPDMVAFVNRIKETGKLDRLSAMGFDAGRASYSVKALNRLADWFAEPWWPDTAERGKIDEEIAVRICYPEKSANVRNATLRYLPPAKRTGNDVVDGALRQVRFVVNRIISALGTPPHEVVVEMAREMGVGIAMRNEREKTMDRNRRARDNAEKVIREHGAKVTPSRVRRYLLWTDQGQKFCPYCNRTINLEAALSGAETEYEHIVPRSLTQVGYKRSEIVLAHRDCNAAKGNRTPWQAWGDGRDPERWQIVEERAKWFEKHKQFRKAKLLLLKDFEQEVLNDEAIADFADRQFHQTSWIAKEVAQWMGSISARPVSVSRGELTAFLRRSWKLDTVIPEVRLTEGLPIADEDGKIITPEEFERFRPVWEGHHAPSTDSYTDRRLDKRIDHRHHLIDAIVIALTSRALFQRMARQYKEDSERCLNGERPRLKAPAPPLHNLRDVAVRAVSECRLSFKRDPYPAGPIFKSTAYSVAQRDGEEKLRLTLRVPLSELINRKTGTVEQARKAIASIVSDETRALVSREFEARIAAGARAAAALAQPFYQEKYGKKIPIRRVRCYTDNYAEEVAIVAHTDRRGTVHTKRLRHAGYAYLEFKVENGKARDCRLVTMWEALRSNSKPAKGRVRLYKGDVVRDTKNGRYYRVGYFKSEGNICLVEHTDPRPFDDKPLSRQKVSFGQAGRLRLVKD

SEQ ID NO: 2423 - protein, 1094 aa, unidentified
  REGION 1..1094: note = Description of Unknown: Cas Enzyme sequence
VKYRLGLDVGTASVGLVAYELDDSGRPVSVPYHSVRIFDEPLLPAKQGGVGELKRAARRETRQQMRLHQRRARRLRKLAHLAHLLGIDSEAVARRRKPHILEVRAQAATQKVALEDLLRIFLHLSKRRGYAGTFRARKGGKMGEVQTGINDLRKAMDEAGCETLGEYLLHRHRQGQRLRLKADDKKLYANREMIRNEFDCIWTTQEREHEQLCGGHEGRPLREIFEEAIFYQRPIRILSAGNCSLETSLPRSPMVQPAFQEFRIEKQIADLRWAKKGRRHPKPLEEPAKQVIRRLLADRERVKFEQIYKALEKAGIPPAPGEYLNLSNGDREDLRGNGTNVCMKKLGLEQEWRNLTDGHRITALNLLADVGAPDVFSTQDWHKRIARGRKRADGKPEYRRIPREVANFINGMAEMEKFDWLSKMGFEAGRSSYSIKALRRLTDAMREKNLDETDAIGLLYPQATARREELLGELPPHEQTGNIVVDVSLRQVRREVNAAIRQLGGPPESVVVELSRDMPLGVKRRGEIVGKIKKNRVSRNKAKEDIEAHTKRAASESDIGRYLLWSEQDKRWCPYCTEPINISAALDGLKTNDDHIFPRSLTRIGKRRDFLVLAHRSCNFEKGARTPREKWGDDPERWKVIEERAKQFGKKKMLGKMRQLLSKESGESVLDDEELGDFSDRQFHETSWISKSCAQWMKAICSDVAVSRGFLTGVLRRKWGLDTVIPEVRIEEKLPIFDRDKQLITREDFERHRAFWEERGGTEDSGKTSRKIEKRIDHRHHLIDALVIGLTSRSLYQKMARAYKMDAEKADFSTKRRSIPLRAEPPIRNIRKLALGLVRNCNLTHRRDRWIAGPFFELNPVSIYGPEGQEKFSRRWELTKLAKKLSDKVSDDAEGRDKDKKAGLKQIDKIVNEKTREIVKHVYEDRIDSGQSPKQALSKPIHDPRFNGRFGTEIRRVLVSYKEKAKGQIVVKHGRNKELKKYLKTDGYAWLEWDAQKGETRLVTLYEAMKSGRSAAPKGVRFFKGDTVLDTRDKKRYVVREIRSEGGGSLVLIFHTETRETKKLRSASGKKLVSGKKLSKLNLISDVQPPHSSD

SEQ ID NO: 2424 - protein, 1091 aa, unidentified
  REGION 1..1091: note = Description of Unknown: Cas Enzyme sequence
VKYRLGLDVGTASVGLVAYELDDSGRPVSVPYHSVRIFDEPLLPAKQGGVGELKRAARRETRQQMRLHQRRARRLRKLAHLAHLLGIDSEAVAHRRKPHILEVRAQAATQKVALEDLLRIFLHLSKRRGYAGTFRARKGGKMGEVQTGINDLRKAMDEAGCETLGEYLLHRHRQGQRLRLKADDKKLYANREMIRNEFNCIWTTQEREHEQLCGGREGRPLREIFEEAIFYQRPIRILSAGNCSLETSLPRSPMVQPAFQEFRIEKQIADLRWAKKGRRHPKPLEEPAKQVIRRLLADRERVKFEQIYKALEKAGIPPAPGEYLNLSNGDREDLRGNGTNVCMKKLGLEQEWRNLTDGHRITALNLLADVGAPDVFSTQDWHKRIARGRKRADGKPEYRRIPREVANFINGMAEMEKFDWLSKMGFEAGRSSYSIKALRRLTDAMREKNLDETDAIGLLYPQATARREELLGELPPHEQTGNIVVDVSLRQVRREVNAAIRQLGGPPESVVVELSRDMPLGVKRRGEIVGKIKKNRVSRNKAKEDIEAHTKRAASESDIRRYLLWSEQDKRWCPYCTEPINISAALDGLKTNDDHIFPRSLTRIGKRRDFLVLAHRSCNFEKGARTPREKWGDDPERWKVIEERAKQFGKKKMLGKMRQLLSKESGESVLDDEELGDFSDRQFHETSWISKSCAQWMKAICPKVSVSRGFLTSILRRKWGLDTVIPEVRIEEKLPIFDRDKQLITREDFERHRAYWEERGGTEDSGKTSRKIEKRIDHRHHLIDALVIGLTSRSLYQKMARAYKMDAERAASSTKRRNIPLRAKPPIPHIRNLALELIRNCNLTHKRDRWPSGPFFTKQPLAIVEIDGQDWFAQRKTLTEIATGKVETVRNRINRIVSQSTREAVLEAFDERIELGKNPKEALSEPILDPHFSKPIRRVKMRVWERADGAISVKHMGKIQNKIFAKYLKTDGYAYLELDKRQGNASLVTLYELIKSGERKLSQDSCRFFKGDTVLDKSDNKLYIVRQIRANDKGTLAMTLITESQIFVEIQKMDMSINKKGGYVGRSRMVSGEELLKLQPIPDGWPPHSSD

SEQ ID NO: 2425 - protein, 1100 aa, unidentified
  REGION 1..1100: note = Description of Unknown: Cas Enzyme sequence
MRYRVGLDVGTASLGVAAFSLDAENNPIDLVWKHVRIFDEPLEKSQAGLKSKKAGRRAARMQRRQIDRRLGRTKRIAALAPLLGIHMEPSPDSGRSLLEIRANAAKQQISLPDLIRIFIRIGKRRGYAGEFRPKKEGAKLGEVEGGNNDLNIAMKALAESKRQETVTLGEFLYQRWLDGKPTKLKIKEPDDKTTTDKNLYALRSQLESEFEQLWQTQAAFYPVLLAAHDGKPLKETFRHAIFHQRPLKAVGGMVGQCSLEPTLARAPRAQLAFQRFRIEKTLADLRWGAGKRAEKLTPEQKAVIRQLCEEKEVVKFEAIYKALAAAGCPKPETKGLNLDRLSRDEIPGNKTNHVFRKLEMGDAWLALDERTQIQVINFLADLGSPEQLDDPLWHTRFAKGDGTPRQLPEAFVAFINQLNDRGKFERLSKMGFEGGRASYSIKALRTLTEWLDSPWWPDNTQGEMRSDEEAAIRVCYPDSANKKVVLQERLDKPPITGNSVVDGSLRQIRYVVNRMIQELGATPEQIVVEMARDLSLGVTRRNERESENTKNRKARLEAEEQIRQHGGTVTPSRVRRYLLWKEQGAGHCPYCSKTITLADALSGAETEYEHILPRSLTQVGLKRSEIVLAHRSCNQGKGSRTPFQAWGHDSERWQVIRARAKYFADNKRDRKAKLLLLEDFEQEVLTDESIDGFADRQFHQTSWIAKEAAQWLQSVCKTPISVSRGEMTAGLRRKWKLETVIPQARIAEGLPVLDEEGQVVSPEEFAKYRDVWEGHKVLDGHGKLDKSRHTDRKLDKRIDHRHHLIDAITIALTSRALFQQMARQYKLDSERVGTGEKPRLRIGEALPLKNVRELALAAVKECPLSIKPDRYPDGAIFQETAYGVALKEGEDKSRLTLRVKVTDLIDRKKGTVEQARKAIQNIVSDSSRELIAQAFDNRIASGMTAPEALAQPIYQTLYGKCMEIKKVRCFTDKYADDVAIISHTSKDGREHLKRLPNAGYAYLETEIRDGRVIRQMLVNTQQAMRRKRKAIGENVIRLHKGDVVLNRENGKCYRIGYFTSEGNIFLIPHTDPRAFDAIKEAGSGKRKMAFSKVLHLTVVN

SEQ ID NO: 2426 - protein, 1120 aa, unidentified
  REGION 1..1120: note = Description of Unknown: Cas Enzyme sequence
MRWRLGLDVGTASVGAVAIELDANGNELGVPWHLVRIFQEPNEKGQTGLTPKKAARRLARQQRRQLERRARRIRKIAHLAPLIGLDPAGVPPDGEAGRNLPALRARAARERIELPDLLRVLLRLVKRRGYAGGFRAVKADKELGIVQQGSSELRQQMEELAQKRGMASVTLGEYLLDRIERGLPARLKIGRADEGIRDVFALRDMVRSEFDQIWAEQEKHHPILKGIYLDRPVKSWFDEAIFFQRPLKSAAPSVGLCPLERNLPRAPRAQMAVQAFRIEKTLGDLRWGTGARATPLESGQLTMLRDILNTPGLLTKDGTITFKKIYKILEERGCAAPANRSLNLERASRDELKGNVTLKAFDLMGLLEPWQALASGHQISVINLLADLGSPEQLDTDDWHERFVKSGADKKKKAAARSGDLGARRRFKPEVIAFINTLRNNDGYGRLAAMKLETGRAAYSVKALQRLTEWLQSPSWRDEPGPVARVDEDAAVRECYPERFKPVNVSGELAPPPKTGNDTVDVALAQVYWVIKDALQTLGNPPTEIVIEFGREVGLGAARRNEWEQESKKNQVQRKRARDEIEKHGHEPRKVAIRRYLHWQEQDTHCPYCTRQISLNDALDGQETHIEHIIPRSLTQVGRKRSEVVLAHANCNTQKGDRTPYQAFGETDRWVVIEERAEALVKHKQYRKAKLLLLKDFEQEVLTDESIAEFADRQLHQTSWIARDAAQWLRGLCPDVFAARGEFTAILRRSWRLDTVIPEVRLECGRAVLDTEGNEISREQFDELRHRWEGHGRAPDRVIEKRLDHRHHVVDALVIAQCTRKTYVKLAANYKASLEANAGRASAPPKWQIEPPLADIRGTALWIVRECRVSQKPDRYVSGKLFQDTAYSEVKGVTSKSGKGAIASRTQLIDLVDNKSLEKTRAKIRLIASDEVRDVVLKEFEARISQGQTPRQALSRPVLYPRYGTQIRAVRVIRDDTSLENAVPIRFRGRRGQGEHVKLLLPDGNAYLEMSGEGKEVKGEPVPLYKAVKAKGTETDVGQRFFKVDTVIDSKDQAVLVVKWIKAEAGGSLILAPVFESRPIEDLTARDGRRKISGKGLKRVTRADVGPPNTTAGGSTPPGD

SEQ ID NO: 2427 - protein, 1087 aa, unidentified
  REGION 1..1087: note = Description of Unknown: Cas Enzyme sequence
MPYRLALDVGTASLGLIAVNIGQDGKLENICHTDLRIFSEPLLPAKSGGVGEPKKAARRAARQSRRLFERRARRLRRIAHLAPLLGLDPASVSADRGQRIHELRAKAIRERIELPDLLNVLLKLAKRRGYAGTFRIKKEGDEGQVESGIRALKEQLASHHYETLGEWFCQRQHKGESLKLKEIGLYAHREMVVEEFNRIWDQQQKHHPILFQSATVLGREATIRQHFFDAIFYQRPLKSVAPMVGNCALEPSLPRAPWAQPVAQVFRIEKQLADLRWGMGRNAKPLDAEQKALIRKILSDPERLTKEGKLSFKKIYAALDEAGLRRLTHRSSFSMDRASREELKGDTTRKAFHTLGMLEAWDSLDKAAQVQIINLLSEQDPSLFDTDDWPARLVVERKTKDPATGKTIVSRKKRELNDLTVSFINDMAKDGKLGRMKDMGLDSGRAGYSLKALEKLTGTMQADGVDEYGAIAKCYPPPAVKQELKPQLPEPKSTGNVVVDVALRQVWHAVNQAISTLGEPPAQCIVELTRDMALGIKARNEIEGKINRNRKERENAKKAISAAGKTPSDRNVLRYLLWSQLDQQYCPYCDKSINLEAALDGNQTNIDHILPRSLTRVGRQRTHLLLAHRACNNEKGDRTPFQAFGHDAERWNIIKHRASVLEHNRQRAKARLLLMEESEEEVLDDKAIADFSERQFIETSWIAKLTAQWLRDICPDVAVSRGELTAKLRRTWKLDTVVPQVRLGAGLPVLDEDGKPILVDDFSRYRACWEGHNGEKVEQTDRRPDKRLDHRHHLIDALVIVQTDRSLYQQMARQYKAIREQQHEGVPVKLRYFPAPPIDNLRDRALDIVRGAEIHHKPDRYPSGAFFQDFAYGVAQKAGEDRARLVRKFELAKALDKKSSLEQGRKFVASIVSDKVRDIVNAEFERRIASGKTPWEALSAPIFQELYGKKLPIKRVRCYTDKYAEDIALVGHQSRDGSVHVKRLLHAGFAYLEADMEDGQVVSPRLVPVIAANNRQGKSEDVMRLYKGDIVVDSKDGKRYRVGYFTSEGNIFLIPDVDPRAFDKIKEPGSGKKKISFGQLNRLRVMN

SEQ ID NO: 2428 - protein, 1090 aa, unidentified
  REGION 1..1090: note = Description of Unknown: Cas Enzyme sequence
MPYRLALDVGTASLGLIAVALEENGTLGEIRHADLRIFSEPVLPAKSGGVGEPKKAARRAARQARRLFERRARRLRRIAHLAPLLGLDSAAVPPDRGSRIHELRAKAIRERIELPDLLNVLLKLAKRRGYAGSFRVKKEGDEGQVESGIRALKAQLAEQHCETLGEWLYLRHQKGESLKLKEAGLYAHREMLIDEFNRIWDEQQKHNPALSATATVLGREAPVREHFFEAIFYQRPLKSVAPMVGNCALEPSLPRAPWAQPATQAFRIEKQLADLRWGMGRHAKPLDAKQKALVRKLLSDPEKLTKDGKLSFKKIYAALDEAGLRRPDQRASFGMDRASREDLKGDTTRKAWHTLGMLEAWDRLEKNAQVQVINLLSEQDPALFDSEDWPQKLVVERKTKDAATGKTILMREPRKLHPQAVSFIDELAGAGKLGRMKEMGLDGGRAGYSLKALEKLSKAMQAEGIDEYGAIAKCYPPPAVDQKPKAQLPQAKPTGNVVVDVALRQVWRAVNEAIDRLGEPPAQCIVELTRDMALGIKARNEIEAKIDRNRRERENARKAIAAAGETPSDKKVLRYLLWSQLDQKYCPYCDKQINNLEAALDGNQTHIDHILPRSLTRVGRQRAHLVLAHRSCNDEKGDRTPFQAFGHNAERWNVIKHRASVLEHNRQRAKARLLLMEESEEEVLDDKAIADFSERQFIETSWIAKLTAQWLRDICPDVAVSRGELTAQLRRAWKLDTVVPQARLEAGLPVLDEEGKPISEEEFVRYRPYWEGHSGPNVELTDRRPDKRLDHRHHLIDALVIAQTDRSLYQQMARQYKAIRERQREGVPVRLRYFPAPPIDKVRERALEIVRNANIHHKPDRYPSGAFFQQTAYRKILSDDGKVRLASRVEVHGLADTKGSLEKTRKNIADIISKDTRDIVSKAFEARIAEGKAVKQALSEPILDPRYETVIKRVTVWLRSGRGYAGEDAVTRIEHMGRSGGRLPLYKYLPHDGYAFIAISCEGGRWAKAESVRPVHANAARFWKEGIVRIFRGDTLLDPKDGARYLVHQILADGAVRIAPLTEARTWLQIGSEGGARTLTESSLLKLQLG

SEQ ID NO: 2429 - protein, 1088 aa, unidentified
  REGION 1..1088: note = Description of Unknown: Cas Enzyme sequence
MRYLLSVDLGTASLALAAFGLDPGDAPSDVVYQDIWIFPEPLLPAKKGGVGEPKKAARRAARQARGQFSRKAARLRRVAHLAAQIGLRPNEIKPDTGQRIHELRARATTQSIELPDLLRVLLKLVKRRGYSGRFKVKVKKVKAKDRDDADPKEAERGKVESGINVLKDEMKRTRCETLGQYLWHRFRNGETLKLKEVGLYVHREMVEYEFDRIWSEQEKGHPALNRIHEGRPLKKTFREAIFYQRPLRSPAPMVGKCPLEPSLPRAPWAQTAAQEFRIEKQIADLRWGKGRLAVPLSPQQKDILRRLLRQRDSLTFEQAYREFERAACPRPDGRRLNFHRASREDLKGDTTRAALCSLDLFEAWNELDELTKVRVINFLADLGSPEQVDRPDWHAQFRHQDGTPLVLDPAMVNFVNGMVATGKFDRLSKMGFEGGRASYSVKALRTLTALMQEGCDESQAINRAYPEWRKVPVLEPMLPRHALTGNTVVDVALRQVRQRVNRAIHELGGPPTKIIVELSRDMALGLKKRGEIEKQITANQNARKRAKKDLESCNLPATETNILRYLLWEEQDKRFCPYCADPITLQDAFDGNVTNFEHILPRSLTRVRRKRSQLVLAHRRCNDEKGDMTPYERWGGDPSRWRVIEECAEAFKKNRRKAKARLLLLKDWEREVLDDDAISDFADRQLHETSWIAKLVANWVRQICPDVAVSRGQLTAYLRRIWGLDTVIPEIRYAEGLPVIDTEGKEIIRTEFDRFRHYWEGHDARDGNERTDRRVEKRVDHRHHLIDALVIGLTSRGLYQSMARHYKACADRVHAGQPVRLSLSVPPPIPDIRSRALDVVRDCEPRHRPDRYPDSQFFKETAYGLAAPNGAAEAGGSLLTLRTKVSDLADAGNDVEKTRRNLMDITSRTTRESVLQVFERRIAEGKTPREALAEEIRHEGNKTPIKKVRVTQGEASSAQRIEHRSRTAVHVKYLLHNGYAYLELGPRQGKKPQARPVTPLEAVKVKHAPAPPGAIRICKGDTVIDQRDGKRFVVKQIQAAGGGALMLVPVTEAREVKELSSRAGLRKVQGKGLLRLRPFHEPCRNTGS

SEQ ID NO: 2430 - protein, 1099 aa, unidentified
  REGION 1..1099: note = Description of Unknown: Cas Enzyme sequence
VKYRLGLDIGTASVGLVALELDGKDRPVKPVYHSVRIFDEPLLPAKSGGVGDTKKSARRVHRQQRRLHMRRARRLQRIAQLARPMGLDPKTIPADKGQRVHKLRAQAATVEIPLEDLLLVFLKMAKRRGYHGEFRVKKSGDAGKDVGMVETGIGKLKTEMKKAGCRILGEYLWHRIQNGRHLRLKEEGLFVHRDTVEEEFNRIWDVQEEHHGELSKVYKGRPLREWFHKVIVLQRPLKSPAHMVGNCSLEPMLPRAPMAQPIVQAFRIEKQLADLRWGASSRAEPLTAKQREVIRGLLQAKKEVTFPACYKALEKANCPAPQGRELNYAHGDRQAMTGDRTAAAMKGLGLLQEWNALDAGHQISVINLLADMGSPDAFDDSQWDKKLVGANNTPRKIKPEVKLFIDRMVDSEKFDRLSKMGFDGGRANYSIKALNKLVPIMRGKNKDEHYAIDKAYPDSEKPDAKLEKELPLHRSTGNTVIDVALGQVRREVNAAIKKLGTPPSEIIVELSRDMKVGLEKRGKINNKMRANEKRRKDAAAAIERRTGRAASESQIRRYLLWQEQGEKYCPYCEDRHINLSDALNGNETEYEHILPQSLTRIGKKRDFLVLAHKSCNQAKGKRTPRQAWGGDNKRWSIIERRAEQFARGYKVVVGGKERTFKHNGKARQLRMKDFEDEALSDDVIGNFTDRQFQETAWIAKACGTWLRSVCADVSFSRGLLTAHLRRNWKLDTVIPEVRYEEDLPVFDEDYQPGKSESSQKTSMVSKEDFEEYRRYWEGHRGDGVPRTCRRLNKRIDHRHHLVDALVIALTTRGLYQRMARHYKQVTDAGGSNLRLYAGPEIKDIRARALDMVRECQPSHRPDRWLGGGFFKDKPSVVLKEDDEKFYAQRKTLVDLALDKGKVLPADKAHKRLKDILPEKTREHILKEFDSRIGKGADSRQALDNILHHKWKTPIRRVLVRGSKAADPMLIKHGNPQRIQNKGKAADSKLGLQKYLEPDGYAYLEYIPGDSATEPRLVRLHEAKSTSSQTVRLYKKDTVRDGEDGQRYVIHQFGARGPALFLSPVTEAIADIGKIQGKRKKKISGKQIAKRLTLVKDERP

SEQ ID NO: 2431 - protein, 1073 aa, unidentified
  REGION 1..1073: note = Description of Unknown: Cas Enzyme sequence
MAKILGLDIGTSSLGWALVDDQTIIDCGVRIFEMGNKVTQHGEESRREDRTLARSARRRNQRYKLRRSNLLTVLKENGMIPNSSNQGDSLGLYRTRAKALDERISLPALGRLCLYFNKKRGFKSNAVLERALSDDSGAVKQGIAELKVVLETQGHRTVGEYFAHLKEAHHRGERLHERILQRWIGRDQYWEEFNLIWQQQKNHYPSILTDDLLKRVRDRCIFYQRKLKSCKHLVNKCRFESDKRVAPKSHFLYQEFRLLQQLANIRITHGERVDERLNEHERRVLLEVLRTKSTVKITAPNILKKMGLSSRDVQINDVPEVLHGLDSKLKLRKALGSAYWNNLTDSEQERFWHTLYFWDDKKTLLHHAQHKLGLDGEQAEAYVDIRLEPDYGSLSIKAIKKMLPHLKEGMRYDQACAEAGYHHSFEAIKQSKERTLAAHMPEPDQGRVRNPVVLKSLYQIRSLVNELIKVYGKPDMVRIELTRQLKMPRIRRERMRLDNINRERERQGYADFINARAVLNGSIHWKDPLIDKYRLWLELGCAEEDLEDFNGFASRIRPGDMDRYQLWLECNRISPYSGKTISLSRLFSAEIEIEHILPYSKSFDNSFMNKSLCERSENLRKGNRLPAQYMNEVEFKALKRRVKRLPKPKRDRFLMEAIDNEFLHRQLSDTGYIAREAVGLVSRAVRDVQVIPGQATANLRKTWRLNPLLHVEEDATNPFGITKEVSKNRQDHRHHTLDAIVVAYTTRSILQEMARLSQFNELGRLERDMIIDYPIDQFHATIKYMLDRVYVSHENRKRLLSLSINQYRNSKAKNKSIQQGKAPRGSLHEETHYGQIMHPEKEVYVYVSKKFVVGLSNKQVGLIIDPTIRELVKRRLESGVKIDASSPLFIDKQMYGEIRQVPLRHVRVESKKKKMVSLRPSLNPNLFVPTGNNYCIVLYEGLVKGKTKRCYRSIPFLEAIKKAQAKAPLFLQSVSEGDNAFALHTVLKANDFVLMFDQHPDDIEWDNPEWLFDRLYYLIKWSGADGKMTFHKHNIAENDPNTTPKPVVLRQMPNTFSGLKVVVDRLGNIRPIR

SEQ ID NO: 2432 - protein, 1041 aa, unidentified
  REGION 1..1041: note = Description of Unknown: Cas Enzyme sequence
MRYRLALDLGTSSLGWAVLRLNEAKQPVAIVRSGVRIFSDGRHAKDGSSLAVQRREARAMRRRRDRLLRRKTRMMQKLIEHGFFPASKMERKALERRYPDPYVLRVRGLDEALPPEAFARLLFHLNQRRGFKSNRRTDKADAEGSVLKNAIGSVHRELDERGMRTVGELLYYRLAEQRRSTPGHEKGIRARYRETKIVDSDGKKRINKSYDIYIDRQMVADEFDRIWEVQASFDPDLFNERARQDLRGTLLYQRDLRPVVPGRCVLLPSESRAPLALPICQRFRIYQEVNNLRVQDEFLRDVPLTLEQRNMVVEALEKYSKRSFDQLRTLLQLSGNSQFNLEDVKRRELKGNATTAILSGKKYFGKDWHEFSHEMQDEIVEKLCTEESETHLVKWLVERAHIDESRAREVANVTLPDGYGSLSHAALKRLVPVLKASVCSYSDAVREAGLGHHSQFEFSYEADEVEDWVNPETGEVSVAFKRLPYYAKALRRHVAFGTGEPGDPDEKRYGKIANPTVHIGLNQLRVVVNALMDRYGRPSEVVVELARDLKESKKRRAEIINQQADRQKKNEEIRKKIADARGCREDEIKRWEIEKWILWEELSRNPATRCCPYSGEQIGVEMLLSNEVEIEHILPFSRTLDDSLNNKTVCTVAANRVKGNRTPWEARDDFALRGWDYSGILARARQMPSKSKISRFAEDGYEKWKGEGEGFLARALNDTRYLSRVAKAYMQLVCPGSGVRVIPGRMTAILRRHLGLDELLSDSGVKNRFDHRHHAVDACVIGVTDQGLLQRFANASAQAREEGLRKLVKDFSPPWPTYREHVKRAIDSLWVSHRPDHGYQGAFMQEEAYGFSQDGKVKQKAKGEDSREVKNLIKISDSKQSERHGVNPDGSPRPYKGYIGGSNYCIEIFRNDEEGWGGDVISRFEAYQIIRNAGGEKEGVEKLRNPSRAQNGKPLVMRLMIDDSLRLELSGGVVTMRVVRISQNGQVFMAPLNEANVDARDRDKGDPFKLVSRKPGTLWALKARQVTVSPIGELRDPGFSG

SEQ ID NO: 2433 - protein, 1148 aa, unidentified
  REGION 1..1148: note = Description of Unknown: Cas Enzyme sequence
MAKKYRLGLDVGTASVGAAAVELNDRNEPVNLAWHLVRIFDEPLEKGQGGLASKKAGRRQARMQRRQIDRSASRLRRIAHLSALLGLKHEEIPPDDGNHLPHLRADAAVKRVALADLLRIFLRLSKRRGYKGEFKAKQKGEVAEGSGELENAMKTLAEERGVAEITLGQYLLHRLESGLPAKLKVKEQSEEPKGKKGKPDADGANAPKNLYALRRMVEREFDILWQTQSAFHDVLNGLHDGKPIREHFRAALFFQRPLKSAADLVAQCGLEPTLPRAPRAQIAFQRFRIEKTLADLRWGMGKSAKPLEPQQKAVIRELLNRHDKVKFGEIYEALEKAQCPRQGKGLNLERVSREELLGNSTLAALRQLDKHSRKHHPEQAANLEAAFRALDEKTQIAVINFLAELGSPEQLDDPEWHTCFVKSVRDFKIKDGAGNEKWVYKNMPRIFSPALVDFVNLLKEHEKFDRLNKMGFDGGRASYSIKALNKLADWLEETRQESVKPLDEEAAIRVCYPQVLDRETKRMDKLPTPNPTGNAVVDGALRQIRWTVNRMIAELGAPPSEIVVELAREMSLGITRRNERESDNNAQQRARRDAEKEIRAHGQTPTPSKIRRYLLWAEQDKSFCPYCNKTIGIADALSGATEFEHIIPKSLTQVGMKRTEIVLAHYVCNQEKGDRTPWDIWGGTDRWQSVEAAAARFEKRKSYRKAKLLCLRDFEREVLTDESVNEFADRQFHQTSWIAKEALQWLQCLCPNKVSVSRGELTAMLRRKWGLETVIPEARIEDNLPVLDDEGKPILAEDFARLKKHLEGHPVLREDREANPDFDFNRRPDKRLDHRHHLIDAITLALTSRGLFQQMAGNYKAAAEKMRPRDKETQQERERRMKHETRLRLEAPEPPLHDVRRQALAAVRECRISIKHDRYPAGRLFQDFAYKVIYPDGGEPARLARRKNLVDMAGDSVEQTRKNINDIVSPSVRRLVLEEFEHRLLPGDKTLKQIFSKPFPHPLYRTEIRKVFCLQKKGRGYISTDDTFRLHYKSRDRDHEKRLLHDDYACIEVRFVDGKFESAKPIRQQEAQSSAFATPAGGVVRYFKGDTLLDSVNGKKYLVRGIKKQGGGMLVMSPITETLGVDKLSSDFGLHFPSGKSLARFKLI

SEQ ID NO: 2434 - protein, 1079 aa, unidentified
  REGION 1..1079: note = Description of Unknown: Cas Enzyme sequence
MAYRLGIDLGTSSAALFAWKWDFQQQVPEQALHSELRIFDEPLEPKTLQTKNTNRRLKRQQRRLHKRRSLRMRSIARTLARLLDTQPSTSSRQVIRWRAEATHSQLSRSQLFAVFMHLAKKRGYNGKVSLAQREKIRKEQEKRHSKGNHSKEPGTQEGIINLEHALKQAECATIGQYLYHLQKKGGTTKLKELGLHCTREQVHAEFNAIWQEQSKHHKELTKAGYEQLTQAIFFQRPLKSVAGMTGGCQLEPNLPRAPRAHPLAQEFILRKQLVDLRIYTLGNRKHARSLDQAQVQFLLTLLQQQQSISFEKIVKTLSSHGLVKADSKLNHTSLSKPELKGDTTRATMRKLGMLEQWQALEPGNQTTIINLLADMDSSLFKQPDWHMSIANAKTSECRQFKQPVIDFINQLAQHPKYGTLSAMGFASGRLAYSLKALRNLNQYMADNPKSDEYEATQAYYGDRLQEREQITRTNQLLPPPNTHNVVVDRALRQLYYSINHVIEKLSEKPQEIVIEYMRDLPKSPTRRHEEQKAMRANEKINKQAKEELKKHGSPQTNNNIFRFKLFKQQKHYCPYCNAQINLSQAVDGNATNHEHIYPKAITNVGRQSKHLVLAHIACNNKKGKRTPYLAFHNDPSRWQAVERMAKIFTDSKLDFKAKALLDDTETIEDVTEKQISDFTERQMHETRWIAKECGKWLRQLCSVESSRGKLTDLVRRRAGLHMLIPRLRWEAGLPVFERGQATTKIKERALIIKEHESEVQKGKISIDKRTDHRHHLVDAAVIGLLTRSLYQRMANEEKAKGHLKDLSIGKLTSSGLNIYAEVEEKVRSTYIHFKPDYHPSGAFFQDTAYRVEHFEEGDRNSRLSHRIDLREQLVGLKKYEKAEKYLQSLVSRNTAMAVAQALNERRQKGKSYKEAITEPFYQHCYGKHTPIIRVRAYAKIGKGHINGEKALPIVKQSKGGKIHKASFLSSGYAYVRVIFDEAGKFIASQSVNLLEHKQREQLPLELGQMETRYYLNEVVMHNNAHWRVAQFKEGGTLCLQQSTEAIPYADARALSKGRVSLVTEIKGKNVAKLVKANGC

SEQ ID NO: 2435 - protein, 1018 aa, unidentified
  REGION 1..1018: note = Description of Unknown: Cas Enzyme sequence
METRKLRYRLALDLGTTSIGWAMLRLNADDDPIAVIRAGVRIFGDGRNPQDGSSLAVTRREARAMRRNRDRKLKRRAKLMSALIELRFFPQDEEARKALDSLDPYELRARGLDHRLDPEEFARAVFHLNQRRGFKSNRKTDKADNESSALKFAIKRMREGLAEEGLRTVGEWLFKRHSRREPVRARYRETRVAREDGKSRILKSYDLYIDRAMVEHEFDLLWAKQSGFDQSRYSEAALILLKGILFHQRPLKPVKPGRCTLLPEEERAPLALPSVQQFRIYQELNHLAILTDDAREQFVTLDQRNAVARVLNEHSKSTFTKIATLLKLGGSVRFNLEDIKRDSLKGNLTAAKLSDDEMFGASWHGFPLERQDEIVWALLKEEDESALIGWLTKEFDLDEARAERIADARLPDGYGNLSRKALARILPELKAGVVTYDKAVVAAGFASHSALSHGEQTGEILLTELPYYGEPLQRHVGFGTGDPNDPPERRFGRIANPTVHIGLNQLRKVVNALIKRYGNPSEVIVEVTRELKQSRERKIEIQREQAARQTQNEQWRTDIQAVTGHDATAIDLQKMKLWVELNIKDAADRRCPYTGEQISVTRLFSDDVEIEHILPFSKTLDDSLNNKTVSLRRANRDKGNRTPFEAFGESQSGYEYATILQRANAMPKEKAKRFAVDGYERWLREDRDFLARALTDTAYLSRIAREYLSLVSAPNKVRVIPGRLTALLRGKFGLNAVLGLKGEKNRNDHRHHAVDACVIGVTDQGLLQRFANASASARDQQLSRLVESMPEPFPNYREHVARAVGSVIVSHRPDHNYEGQMHKDTAYGLVGAGVVRHTKVVDGKRVRESERLSVIEFSEPKAAHRHGLLPDGSARPYKGYKGDSNYCIEIIRTDAGRWAGEVVSTFAAYQIVRRSGVAGLRNPGTGIGGRSLVMRISKGDVLKVQIDGELAVFVVAWIRTDGRIALYKCHEANADARDRDKKDEFSYLVKSPGPLQKIAARRVTVSPIGDVRDPGFHE

SEQ ID NO: 2436 - protein, 953 aa, unidentified
  REGION 1..953: note = Description of Unknown: Cas Enzyme sequence
TLAPAEFARALFHINQRRGFRSNRKTDKKDNDSGALKTAIGTLRQAIATYPKGSDGKPLKPGNFNLLDWVNRQLPETENDLPRTVGELLWRRMQAGQEVRSKNKSVKPNKVQYDLYIDRAMIEAEFDALWAKQAEFNPAVFTEAARAELKESLLHQRPLKPVKPGRCTLEPHEERAPLALPSQQRFRIYQEVSNLRILREDLRDEPLTLGQRDLVVALLERPQRDKKTAHEVSFDQIRTALSLGGNTKFNLADAKRSSLKGNATSSTLSKKELFGLDWFGLPLNRQDAIVMRLLTEESEAALVVWLQEEFGFDEARAEAIANAGLAEGYGSLSAKALSHILPALQAEVITYDKAVQAAGYEHHSRLNTHGEIPGLTFDTDHERINQSTGEIEKLHAHHQLPYYGEYLQRHVGFGSGNLDDPPEKRYGKIANPTVHIGLNQIRVVVNALVKRYGHPSEVIVEVARDLKQSWEQRKEDQKQQAENQKRNERLRTDAARILQIAPERVKHADIQKLILWEELSFDIAERHCPYSGVQIGARMALSNEAEIEHILPFSQTLDDSLNNKTLATRRANRVKGNRTPAQARDDFEREGWAYDAILQRAERMPRNKRYRFGPDGYEKWLREDKDFLARALNDTRHLSRVAREYLSLICPQGTRVIPGRMTAMLRAKFGLNDILGLQGEKNRNDHRHHAVDACVIGVTDQGLLQRFAQASASAREKQLDKLVDSMPLPWTTYREHVERAVHNIWVSHKPDHGYEGSMFKETAFGIRRDGSIVQKASAEGSKERIIEYVVPITAPGQLARHGLDDKGQPRSYKGYVPDGNHCIEIIANDKGKWEGEVTATFEAYAIARSRGKAALSDATKSLSGKPLLMRFMIDDFIRLEIDGCQRVMRIASINAAGRLSLADHNEANVDARNRDKESSWRYTYKQAGSLQAAKARHITVSPIGELRDPGFKE

SEQ ID NO: 2437 - protein, 927 aa, unidentified
  REGION 1..927: note = Description of Unknown: Cas Enzyme sequence
PAPPREDIKNKANYCANPNFTNQIRTYLFHERYTTSSLTQGETDKKDNDSGALKRAIKELREKITQEGCRTLGEWLHQRHQKGDSVRARLRGKTQKDKAYDFYADRAMIAHEFDLLWQTQAAYNPALFNAAAQAELKDILLYQRNLKPVRPGRCTLIPDEERAPAALPSVQRFRIYQELNNLRVIDPDFRERALTLAQRDTLAALLEVGADVRFGAMIKALKLPGATKFNLEDIKRDRLKGNATSVTLAKADHFGPAWHGFPLALQDEIVLQLLGEASEAKLVDWLQTHTAADESHAEKIANTGLPEGFGRLGRTALGRILPLLIAEVVTYDKAVTGAGFASHSALSHHLQTGEVMALLPYYGIPLQRHVAFAKDTPRNEEERYGKIANPTVHIGLNQVRAVVNALVQEYGPPDEIIIEVARELKLGRERKLDIQREQKVKQDLNDLHVNEACTVIGQDAAHIDRQKRRQLSQKMQLWVELNPKDIAGRCCPYTGEQISIARLLSDDVEIEHILPFSMTLDDSMNNKTIAVRRANRDKANQTPYEAFGRMVRPGYDYQDIQARAAQMPTNKRKRFAPDGYQQWLKDDKDFLARALTDTAYLSRIAREYLSCICPDNKVRAIPGRMTAILRGKFGLNQLLSGTGQKNREDHRHHALDAMVIGITDQGMLQKFANASASARVQELDRLVAGLDDPWPNYRDHVARALAHIVVSHKPEHGYQGAMHEATAWGLRGDGQVQRWVRAEGSDVRELEKKSLKVIAINSSSGNAIGRHGADAEGNVRAYKGYVGGSNYCLEIWRDEKGHWNSDVVSTFQAYQIIRQFGEDEGGQRLRHPALAQAGQPLVMRLMIKDYVRLDVDGVTRTMVVVTIKSSGQILMADHNESNVDARNRDKDNSFSYISKTAGSLQKIKGRRCTVSESGKLRDPGFKG

SEQ ID NO: 2438 - protein, 1029 aa, unidentified
  REGION 1..1029: note = Description of Unknown: Cas Enzyme sequence
MTAMRYRLALDLGSTSLGWAMVRLDAASNPCAVIKAGVRIFSDGRNPKDGTSLAVTRREARAMRRRRDRLLKRKARMSALLVQYGFFPTDEKLRKELVTLNPYLLRAKGLDAALTPAEFARALFHINQRRGFKSNRKTDKKENDAGALKTAISKLRQDMAATGCRTVGEWLHKRDHHGETVRARYRETKVTKDNGKVGVHKSYDLYIDRAMIEAEFDALWSKQSELNPQMFTSKAREDLRYCLLFQRKLKPVVPGRCTLMPEEVRAPLALPSVQRFRMYQEVNNLRILSDGMREEPLSIAQRDQVIALLEKSRKVTFTKIKKTLGIGSVSFNLEDAKRTDLNGNATSAELARDGYFGNAWFDFENTKQDAVVAQLVSEENEAALVRWLCAETGVSAERAEAIAEAGLPEGYGSLSAKALERILPALRAEVITYDKAVIAAGFDHHSNISAASTGEILPELPYYGIPLQRHVAFGSGKPEDTDEKRYGKIANPTVHIGLNQVRVVVNALIKRYGHPSEVIVELARDLKQSKDQREEENKRQAENQKRNARMRTNIAEVLGITQERVRVADLQKMILWEELSFDVAERRCPYSGVQISVNMLLSEQVEIEHILPFSETLDDSLNNKTVAMRQANRIKRNRSPWQARSDFAAQGWTHDDILARAEKMPKAKRYRFAEDGLQRWLKDDAGFLARALNDTRYLSKISKEYLSLICPQNTRAIPGRMTAMLRGKFGLNEVLGLDGEKNRNDHRHHAVDACVIAVTDQGLLQRFARASAQAREHHINRLVENMPLPWDSYRAHVERAISRIWVSHKPDHGYEGAMFDATIYSAEGDSKVAAKRRAVIPFSAPPDRPTVVARHSTKRNPGGPYKGLLSNSNYCVEICRNEDGNWDSTVLRTFDAYQTIRQASNHAEGLKRLRHRLIGNNGRPLVMRLMIGDAVKLTVNGSPTVLQVLKINGSGSITFVKPNESNISARYAAKLKAQSASKEGLPYDAVALADDFFQQAFSAGSLRAGQVRQVTISPIGELQDPGFRD

SEQ ID NO: 2439 - protein, 1013 aa, unidentified
  REGION 1..1013: note = Description of Unknown: Cas Enzyme sequence
MSAMRYRLALDLGSTSLGWAMVRLDADSAPCAVVKAGVRIFSDGRNPKDGSSLAVTRRDARAMRRRRDRLLKRKSRMMKLLIEHGFFPADEAQRKALELMDPYALRAAGLDRSLLPGEFARALFHINQRRGFKSNRRTDKKDNDSGALKSAIAKVRETLVAQGMRSVGEWLHKRQAEGQTLRARFRQDRVTVDSKTKIDKRYDLYIDRQMIEQEFDHLWVKQRELNPAQYSDAARADLKDALLHQRKLRPVKPGRCTLLPDQERAPLALPSTQRFRIYQEVNNLRILRAGLKEEPLSVEQRDCLVDALEHNSKRSFIQIKKLLGLGGGVDFNFEDPKRQELKGNVTSAILGKSTLLGTAWFKLDEATQDEIVERLVGDENESALVAWLVHKTGIDEARAESLATVALPEGYGNLGREALGMILPELRSRVVPYSDAVRAAGFDHHSNISAAATGEILAELPYYGQPLQRHVGFGTGVVTDSDEKRYGRIANPTVHIGLNQTRAVVNALIKRYGHPSEVIVELARDLKQSKEQRDEDTKRQADNQRRNAKHKTSIAAILQISEERVRVADIQKMVLWEELSFDPADRRCPYSGVQISAHMLFSDEVEVEHILPFSDTLDDSLNNKTVAMRAANRAKGNRTPWQAFGMQPVAGFEFADILVRAERMPKGKRYRFGEDGYKQWLRDDAGFLARALNDTRHLSRVAREYLSLICPQNTRVIPGRMTAMLRAKFGLNDVLGLNGQKNRNDHRHHAIDACVIAVTDQGLLQRFARANASARERQLNRLVEDMPLPWSSYREHVQRAVQSIWVSHKPDHGYEGSMFKETAFGIRRDGSVVQRANAEGETGRKVDYVVPRIAPKALARHGLDDKGLPRAYKGYVPDGNHCIDIVRSDTGHWQGEVTATFEAYETVRRRGIDALQSQTQSLSGKPLVMRLMIDDFVRLEIDGRTRLMRVASINAAGRLSLADHHEANVDARNREPGGDWRYSYKQAGSLMAAKARRVTISADGRVSDPGFRP

SEQ ID NO: 2440 - protein, 1019 aa, unidentified
  REGION 1..1019: note = Description of Unknown: Cas Enzyme sequence
MSKMRYRLALDLGSTSLGWAMIRLKDDQPFAVIKAGVRIFSDGRNPKDGSSLAVTRRMARGMRRRRDRLLKRKARMMRLLIEHGFFPDDTAIRQALTNINPYELRAKGLDTALSPAEFARALFHINQRRGFKSNRKTDKKDNDSGALKTAISALRQQLDPEGSEGKARTVGELLWRRMQSGTGVRARYRETRVTKDDGKARIDKSYDLYIDRAMVEAEFDALWAKQASLNPQQFHEAARLALKDCLLHQRRLRPVVPGRCTLMPDFERAPLALPSQQRFRIYQEVNHLRVLGPHLQDTALNLAQRNAVVDALEHHGKRSFTQIKALLKLPGSAKFNLEDEKRLELKGNATSALLSKKDFFGPTWFDFSHQQQDAIVMRLLTEESEAALIAWLQTDFELDEPRANAIANASLAEGYGNLCAEALARILPCMQGDVMTYDKAVQAAGFDHHSQISHAAVSGEILPSLPYYGEYLQRHVGFGTGNPEDPPEKRFGKIANPTVHIGLNQVRTVVNALIRRYGHPREVIVEVARELKQNQEQRKEQQQQQAQNQMRNERLRADAAGILGIAFERVRQADIQKLILWEELSRDPAERRCPYSGVQISAAMVLSDEVEIEHILPFSQTLDDSLNNKTVATRRANRVKGNRTPFDARADFEREGWTYSDILNRAELMPRNKRYRFGADGYQKWLRDDKDFLARALNDTRYLSRVAREYLSLICPQATRVIPGQMTAMLRRRFGLNDILGPDGEKNRNDHRHHAVDACVIAVTDQGLLQRFARASASARERQLDRLVDDMPLPWPTYREHVARAIDNIWVSHKPDHGHEGAMMEETSYGIRRDGSIKQKRKPDGSEGREVSKLVRIAEPSQALRHGTDAEGQPLPYKGYVGGSNYCIELVRNDKGRWTGEVVTRFDAYQIVRTRGSDRLRHPTLSMSSQPLVMRLMIGDTVRAELDGESKLMRVVKIDPSTNVVLADINESGELKKRHDDTSDPFRYTNLRGESFRRTKARRVTISPIGELRDPGFKE

SEQ ID NO: 2441 - protein, 1029 aa, unidentified
  REGION 1..1029: note = Description of Unknown: Cas Enzyme sequence
MKYRLALDLGSTSLGWAMVLLNGRTEPCALVRAGVRIFPDGRNPKDGSSLAVTRRNARAMRRRRDRLLKRKARMQRLLIEHGFFPADEAARKALETLNPYELRAKGLDAALTPAEFARALFHLNQRRGFKSNRRTDKKDNDSGALKAAIGSLRAQLDPAGTDGKARTVGELLWRRMSDPSVRTVRARYREQRVLKDDGKTRVDKSYDLYVDRAMVEAEFDALWAKQAEINPAQFSEVAGAALKDCLLHQRNLRPVRPGRCTLESDEPRAPLALPSQQRFRILQEVNHLRLLGGRLLEEALSVDQRDKLVAALEEGSKSFKTAIPKLLGLPGTVQFNLADAKRTELKGNATSMLLARKDFFGPAWHDFSQARQDEIVMRILEEESEAQLVEWLVESTGVDEAHALKIANAALPDGYGSLSAKALAKILPAMRAEVVTYDKAVLAAGYDHHSHISHAASTGEILAELPYYGEYLQRHVGFGTGELKDTPEKRFGRIANPTVHIGLNQVRVVVNALIKRYGHPAEVIVEVARDLKQSQEQRRETQEQQAKNQKRNERLRKTAAAIRGCAEEQVRLTDIQKLILWEELSFDVADRRCSYSGVQIAAADVLTERVEIEHILPFSMTLDDSLNNKTVALRQANRIKGNRAPWDARADFAAQGWDYDGILTRAERMPRAKRQRFAADGYEKWLKEDKDFLARALNDTRHLSRVAREYLSLVCPAGTRVIPGQMTAMLRAKFGLNEILGLNGEKNRNDHRHHAVDACVVAVTDQGLLQRFAQASADARGKGLDRLVETMPDPWPTYREHVRRSVNAIWVSHKPDHGFEGAMHEDTTYRPPHLDPKSMWRTRGIGGGKPNEKDADSKAMVGFTGPEHLQRHHRDEAGQQLPYKGYVASPKFCMDIVRNDKGRWEGEVVSTFEVYRLVGEFGKDAALARIQSKSYSISGKPLVMRLQGGNLVRFEDDEGRLMMLRVVNMTGNGQVFFAPHNEANGDARNRDKQDPFVYLSKYAGSLQKARGRRVSVSPSGELRDPGFKE

SEQ ID NO: 2442 - protein, 1064 aa, unidentified
  REGION 1..1064: note = Description of Unknown: Cas Enzyme sequence
MRKKSEYETKGAAVAKERYRLALDLGTNSLGWCAYRLDETDEPCGILRMGVRIFSDGRSPKNLASLAQDRRLARQTRRRRDRVLKRRQRILTALSRFGLLPSDLAQRRKLAELDPYELRARALDAPLTPHEVGRALYHLTRKRGFKSSRKDRGDPEKEKETGQVKEAIRLLREKVHSTGCRTVGEYLAREHAERRSVRARRRSDGQYVLYLQRDMVQEEFEAIWLAQSPHHPDLMTKEAHDCLLDALLFQRPLKPVQPGRCLFEDGEPRARLSSPLQQRFRILQELNNLRLISPTEERALTCVERNLLATALRDNEELTFAQMRKLLGLPRGSLARFNLESEKRKKLKGDVVSAQFAAPEALGNAWHDWPAERQETLAELVAVADDDKKLVEALVAEPWGFSDAVARRITRCRLPDDFGSLSLKALRRIVPELERDVVPYSTAVLRAGYDSHSDFYTGEVFMQLPYYGELLRGYTTPAERAKDTDEARHGKVPNPTVHIGLNQARQLVNALIRRYGHPYQIVVEMTREFGSSGVRRREIEREQADNQSRNERFDQELRELGQRPTRVNRLKLALWDELARDAVSGDREALERRCIYSGRQLSKALLFSDEIEIDHVLPFSRSLHDGTGNKILCVRQANRDKGNRTPFEAFGHSPGAYVWDDIVQRAGRLPGRKARLFQTDALDRFLDGRDFLDRQLTDTGYLARAAKRYLSAICPPNQVWVTSGRLTGMLRSKWNLGTLLWDDARKNRNDHRHHALDAAVIGLCSRNLIQRVATAATRAEQRGENRLLEGLDVPWLGFREELQRVLHSIVVSHKPDHGREAQLHNDTNYGWRADPDKTGVPMVGRHVPIDSLTSVASLEGIASAPLKSRLAELIRPLSGAKAVRETLQRFSAETGIRRVLKEERLSVIPIKDRRTGVPYRFVKGDGNFCYDIFGREDGRWNGEIVNNFTANQPDFRHDATKASNGRTLLMRLHGGDMLSLVVRGHRKIMRAARISEGIISLAEHFEANVDGRNRDKTDPFQYVYKSPSALQAAEAQLVGVSVLGYVNPKAEVTSDGRPHRRSRK

SEQ ID NO: 2443 - protein, 1061 aa, unidentified
  REGION 1..1061: note = Description of Unknown: Cas Enzyme sequence
VAKIKYRLGVDLGANSLGWCVYRLDAQDEPDKIVRLGSRIFADGRDPKTLASRAADRRQARQARRRRDRVLKRRHKLMQALIKLGLMPADGAARKAMQGSDPYALRARGLDQPLALHELGRALYHLARKRGFRSSKKDTRGDDAAKEAGKVNQAIAMLRARVQEAGCRTVGEYLAYQHAERAPVRARRSSDGGYVLYLQRTMVEEEFDALWQAQQAHHPDVLTDTAREILRDILLFQRRLKPVEAGRCLFEPSEYRARLCAPLQQRFRMLQELNHMRVKDGIEERALTLDERNRMLAVLEKDVGPRPVSFAKLAKAAGLRTSDFNLGRDGKRTGLRGDAVGSRFASDNALGNAWMSLSSTQQYAMAVLTTLADQVPVLEAALLALPANSPACEDILKGVFDKDEREAVALVLQSLPLRLSEAQARTVASFNLPDDYGSLSLKALARIVPELEREVVTYDEAVRRAGYTSHSQLHTGEIFSRLPYYGEVLAGYTAPTPTAKNPDEQRYGKIPNPTVHIGLNQLRLLVNALIKRYGSPHQIVIELTREFGASGEKRREITSRQKENQERNAAYDQELRALGVRANRENRQKLQLWEELGKDDAMDRFCIYSGKHLSKTMLFSDEVEIDHILPFSQSLHDGIGNKILCTRQSNRDKGNRTPFEAWGHTEGWADIEARAERLPAHKRKLFREAALQELLGDGDFLARHLTDTAYLSRAAKQYLSYVCPQNEVWVSSGKLTGMIRGKFDLSRLLSEDASKNRNDHRHHALDAAVIGLCSRSLIQRMANAAARAEEHGENRLLERLDLPWPSYRDELDSALAAVVVSHKPDHGKQAALHNDTNYGLRGSPDKRGNPLVGRRQTLDSIKNAKDAESIAGEALREEIVRLLAPLSSPKEIKAALEAYSARTGVRRVICEKRLSVIPIMDRRNGQPYRYVKGDGNYCYEIFRKPDGRWDGEVISTFEANQKGFKESATHAQNGMPLVMRLHKDDVLAINDGDSMTKMVRVAYFTPGKIAMVGIVEANADARVRAKHLNYLFKTPSTLRSLCARAVGVDVLGYVNDPGFKG

SEQ ID NO: 2444 - protein, 1058 aa, unidentified
  REGION 1..1058: note = Description of Unknown: Cas Enzyme sequence
MARIKYRLGLDLGANSLGWCVYRLDDNGEPIHIVRMGSRIFADGRDPKTLASRAADRRLARQARRRRDRVLKRRHRLIQGLIGFGLMPEDEQARKELQASNPYELRAKGLDQPLTLHELGRALYHLCRKRGFRSSRKDSKSEEDEKETGKVKEAIQRLRSQIESHACRTVGEYLAKQHAERKSVRARRNDDGQYVLYLQRDMVAEEFDRLWESQRRFHPAELTDQAFDYLRDTLLFQRKLLPVMPGRCLFEPEEYRAPLCSPLQQRFRILQELNNLRLIEGTEQRPLTLDERNSLRDLLLVNPKQSFAKLRAAIGHGRSSSARFNLEADTKRKDLKGDLVSAQFADPACIGPDWFNLPPDVQEGLALLVARADRMDELISALRALPSDTGPAMEVARPHSHEKLWLEALSRLPSPLSEIQCDAIARVRLPDDYGSLSHNALARIVPELEREVITYDVAVQRAGYSHHSNFYTGEFFPRLPYYGELLRGYTSPTEKAKDDAERQFGKIPNPTVHIGLNQLRQLVNALIRRYGHPHQIVIELAREFGLSGEKRREITKKQAENQERNERYDAQLTRLGERCNRENRQRLQLWEELGQDDAMDRYCIYSGKRLSKALLFSDEIEIDHILPFSRSLHDGIGNKILCTRASNRDKGNRTPFEAWGHAERWEDIEARAERLPVHKRKLFREEAMESFLGDHDFLARHLTDTAYLSRAAKHYLSAICPPNMVWVSSGKLTGMLRGKWGLNKLLSNDSQKNRNDHRHHALDAAVIGICSRSLIKRMADAARIAEERGENRLLEQLELPWPEYRHELESTLAKIVVSHRPDRGRQAALHNDTNYGWRAEPDKKGGNPLVGRRVALTEIKNAKAAEAIADPVLREEISTLLTSLSKPKDIKTALLAYSQRTDIRRVICEERLAVIPIHDHRTGKPYRYVKGDGNHCYEIFRKPDGRWDGEIISSFEANQKGYKESASHAQNGLPLVMRIHRDDILAVEHDEQTRFMRVAQLSSGKILMAGQHEANVPNRAREGELKYLQTAPSGLPKLKARLIGVDILGYVNDPGFRE

SEQ ID NO: 2445 - protein, 1020 aa, unidentified
  REGION 1..1020: note = Description of Unknown: Cas Enzyme sequence
VGKMRYRLGLDLGTNSIGWAMLRLDSQNEPCAVIKAGVRIFSDGRNPKDGSSLAVTRRLARSMRRRRDRLLKRKARLLKLLTDLGFFPQSVGERKALLNLDPLALRVAALDQQISPAEFARAIFHLNQRRGFKSNRKTDKAANDSGALKSAISETRKEMQEKHLRTVGEYLLHRRKTGLGVRARYRELRIEIDGRNRIQKSYDLYIDRQMIEEEFDAIWSSQARHNPTIYTDASRALIKDCLLFQRPLRPVKPGRCTFFPDEERAPLALPSLQQFRIYQELNNLRVINADLSETEIDLSQRDKAYNLLNGQRQATFGKLRTTMGISKASTFNLEDEKRTGLKGNLTAAILSSDECFGAAWHHLSLVDQDAVVTKLLEEENESLLIGWLTNRFGLSEAIAEKVANAGLPEGYGALSRKAIDLILPCLKQTITTYDKAVKAAGIEHHSDIAPHRTGEILDALPYYGEPLQRHVGFGTGNPADTPEKRFGRIANPTVHIGLNQTRLIVNQLIKRYGHPSEVIVEVARELKQNVEQRKEDVKKQAENQRRNDRIRDEVAKLTRVDPENITRTDIQKVILWEELSPDLMSRCCPYSGKQISFQMLMSPEVEIEHILPFSRTLDDSLNNKTVSLRSANRIKNNRTPAEAKTDFEKAGWKYEEILARAASYPRAKRYRFAQDGYEKWLKEDKDFLSRALNDTRYLSKVAFQYLALICPQATRVIPGQMTAMLRGKYGLNTILGPSGEKNREDHRHHAVDACVVAVTDQGLLQRFSKASASAREQQLNRLVSEMPLPWSSFRESVQRAIHSIKVSHRPDHNYQGAMHNDTAYGLLSDGKVSVTKLDENGRRVKEVSTLAVIPFTSTNDPKRHGLMPNGELRPYKGYKGDSNFCIEIFVSEIGRWESVVITTYEAYQIAKARGESSLYSPKQASNGRPLVMRLMRDDIVSLDSESGRSLYRVCKMRSNGTIYFAAPHESNVDARDRRGELSYLTKGASGLQKLGARQVFITPIGELCSSEGGRSYGSNR

SEQ ID NO: 2446 - protein, 1020 aa, unidentified
  REGION 1..1020: note = Description of Unknown: Cas Enzyme sequence
MLPTMRYRLALDIGTTSIGWALIRLNSEQQPCAIIRMGVRIFPDGRNPKDGTSLAVTRRAARQMRRRRDRLLKRKQRMLDALIKLGFFPADSAARHALVPLDPYALRAKGLREALSGPEFARALFHINQRRGFLSNRKTDKKDNESGALKKAIGDLRRKLDDENCQTLGEWLAKRHAARQSVRARLRGKTQKDKAYDFYADRAMIAHEFDTLWTTQQTFNPTLYSDAARDELKDVLLFQRPLKPVKPGRCTLIPEEERAPLAMPSTQRFRIYQEVNNLRILNTSLQEVPLTREQRDKVVALLEHKSEVRFTAMLTELKLPGTTKFNLEDIKRDRLKGNATSASLSKPDFFGKQWHEFALALQDAIVDRLLHEASESALVRWLQEQTGVDEDRATHIANAGMPEGYGSLSLAALDLILPELTANVVPYSEAVTRAGLGTHSALSHAQATGEIMMALPYYGEPLRRHVAFAKDNPRNDEERYGKIANPTVHIGLNELRKVVNALIKRYGHPSEVIVEVTRDLKIGHERRLEIQRDQKAKQERNNILIADACTVLGLTPDNLDRAKRRDLSQRMQLWIELAKDVADRRCPYTGEQISMERLLSSEVEIEHILPYSITLDDSLNNKTVAMRRANRDKGNQTPFDAFGKHAQAGYDYEAILQRAAKMPKEKAKRFAPDGHQRWLKEDKDFLARALNDTAYLSRIAKEYLSLICPHNKVRAIPGRMTAMLRGKFGLNQLLSGSELKNRNDHRHHTLDAAVIGITDQGLLQRFAKASEQARARQLDRLVEDMPLPWPTYREHVMRGLQGVIISHKPDHGYQGSMHEDTAWGLREDGQVSRLVRPEGGGARVRETKNKSVIQINSTRNLDRHGLDEAGQPNAYKGYVGGSNFCLEIWRDEKGKWNGDVVSTFTAYQVVRELGEEAGLNRLMQSHTAQNGQPLVMRLMINDLVRMEVDSVMRTMRMVKIFSSGQFFMCEHNEANVDARDKDKEDAFNYVSKMPGSFQKAKGRRVTISPIGDIRDPGFKG

SEQ ID NO: 2447 - protein, 1039 aa, unidentified
  REGION 1..1039: note = Description of Unknown: Cas Enzyme sequence
MAYRLALDLGSTSLGWAALSMDETGKPIAVRRAGVRIFSDGRNPKDGSSLAVTRRAARAMRRRRDRLLKRKDRMLNKLIHYGFFPADDAARKALEKLNPYQLRAKGLESGLTPGEFGRALFHMNQRRGFLSNRKTDKKDNDSSALKQAIGTMRAQLAETGCRTVGEWYWKERMQQRPEGVKDQGVRARYRETPFVNKDGKNRIDKRYDLYVERAMVAQEFDALWAAQAAINPDLFTEAARVDLRDTLLFQRNLRPVKPGRCTLIPEEERALLALPSTQRFRIYQEVNHLRILYPDLREERLDLAQRDQIVALLEASQKVTFTRIRKALGLSSECQFNLEDAKRQELKGNATAVVLGRKDVFGPQWAEFDAALQDEIVQQLMTNESEDQLVAWLQSTTGVDEERAMVAANVGLPEGYGSLSLKALAKIIPELERDVVTYDKAVAAAGFAHHSDLGFDFDHDVGDVEQIGERTIASSGEIKPVFAFKQLPYYGRALQRHVAFGSGKQEDTDEKRFGKIANPTVHIGLNQVRLVVNTLIRRYGRPSEIIVELARDLKQSRDQKQETQRRQADNQKRNARIRASISETLGISEERVRTADIQKWILWEELSFEVADRHCPYSGVQISAAMLLSERVEIEHILPFSQTLDDSLNNRTVAMREANRVKRNRTPWAARADFESMGWSYDGILQRAERMPRNKRYRFAEDGYERWLGEDQDFLARALNDTRYLSRVAAEYLRLVAPGSATRVIPGQMTAMLRAKFGLNNVLSPEGVKNRNDHRHHAVDACVIGVTDQGMLQRFAQASADARKSGLTRLVDDMPMPWPTYCAHVQRAVDHIWVSHRPDHGHEGAMMEETSYGIRRDGSIKQRKRADGSAGRKISNLIRIAEPKQLQRHGVDAQGQALPYKGYVGGSNYCMEITPGDKGKWEGKVISTFEAYSIARTKGVAALRHPSCGQNSKPLIMRLMINDTVRLEVGGVERTMRVAKISGGGQVFMSAVHEANVDARNQSKELPYISKMAGSFQKAKARQVSISPIGELRDPGFMG

SEQ ID NO: 2448 - protein, 1043 aa, unidentified
  REGION 1..1043: note = Description of Unknown: Cas Enzyme sequence
MQKDKPLAYRLALDLGSTSLGWAVFRLDAEGALSAILKAGARIFSDGRNPKDGSSLAVTRRAARAMRRRRDRLLKRKARMLAALERHGFFPQDETARKALEKLNPFQLRAQGLEKALKPEEFGRALFHLNQRRGFQSNRKTDRKDSDSGALKQAIGTLRAQMHESGCRTVGEWFWKVRMEEKPEGVQNQGVRARYRETPFTTDEGRKRIDKRYDLYVDRAMVAQEFDALWAAQAACAPALFNDAARDELRDILLHQRKLRPVQPGRCTLVPDEPRALLALPSTQRFRIYQEVNNLRLLEGELREEPLTLAQRDQIVALLEKQAKVTFTAMRKALGFSGLFNLEDTKRDGLKGNATAAALGKKNLFGTLWMDFDAALQDEIVTQLMTEESEPRLIGWLQEHTGVDEARAQAIANTGLPEGYGSLGRTALARIVPELQRGVITYDKAVQAAGFAHHSDLGFSFEHGADEVERIGERTIASTGEIKPVFAFKQLPYYGRALQRHVAFAKDNPRNDEERYGKIANPTVHIGLNQVRVVVNALMRRYGRPAEVVIELARDLKQSREQKLEAQQRQADNQKRNARIRRSIAEVLGISEERVRTLDIQKWILWEELSYDAADRRCPYSGVQISAAMLLGERVEIEHILPFSMTLDDSLNNRTVALRDANRIKRNRTPWEARADFEAQGWSYDGVLQRAEHMPLRKRYRFAPGGYERWLGEDKDFLARALNDTRYLSRVAAEYLRLVCPGSSTRVIPGQMTALLRGKFGLNDVLGLDGEKNRNDHRHHAVDACVIGVTDQRMMQRFAQANAQAREDGLTRLVEDMPLPWPTYRAHVERAVRHIWVSHKPDHGFEGAMMEETSYGILRDGSIRQRRKADGSAGREISNLIRIAEPGQPQRHGVDAEGRPLPYKGYVGGSNYCIEITVNDKGKWEGQVISTFDAYRIVREGGLRQLRHPTQGQNGQALAMRLVIGDSVRLETGEGNLQTLRVAKMSAAGQVFMSEVNQANVDARNRSGDLPYVSKMAGSFQKARARQVTISPIGELRDPGFKG

SEQ ID NO: 2449 - protein, 1017 aa, unidentified
  REGION 1..1017: note = Description of Unknown: Cas Enzyme sequence
MMSKMSYRLALDLGSTSLGWAMIRLNANREPCAIIKAGVRIFSDGRNPKDGSSLAVTRREARAMRRRRDRLLKRKARMTRSLIEHGFFPSEEAERKALETLNPYALRAKGLDEALSPVEFGRALFHINQRRGFKSNRKTDKKDNDSGALKTAIKKLRETLIANESRTVGEWLYKRACAGQTVRARYRQTKIVKDDGKTKIDKSYDLYIDRTMIEAEFNVLWAKQAGFNPVLFNDKARDDLKDALLHQRKLKPVKPGRCTFLPEEERAPLALPSTQRFRIYQEVNNLRILRDGLKEEPLTLAQRDDLARALEGNGKRSFTQIKKLLGIGGAAQFNFEDPKRQELKGNVTSAILSKDEHFGEVWFGFDEAKQDEIVWQLVKEENEAKLVRWLQDTTGVDEERAEIIANTGLPEGYGALSVKALARILPELRRAVVTYDKAVLAAGFDHHSNISPAATGEILPHLPYYGEALQRHVGFGSGNPNDTDEKRYGKIANPTVHIGLNQVRTVVNALIKRYGHPSEVIVEVARDLKQSKDQRDEENKRQAENQKRNKRLRESIAGILQISEERVKTADIQKMILWEELSFDPADRHCPYSGVQISAQMLLSDEVEIEHILPFCQTLDDSLNNKTVALRVANRVKGNRTPWDAFGKQATAGFDYAGILQRAEAMPKGKRYRFGEDGYQRWLKEDKDFLARALNDTRYLSRIAREYVSLICPQDTRVIPGQMTAMLRGKFGLNDVLGVNGEKNRNDHRHHAVDACVIGVTDQGLLQRFAQASASTRDKQLNKLVETMPEPWPTYREHVKRAVNHIYVSHKPDHSHEGAMHNDTAYGLRGEGKVSVHKWVDGERQHIEDNLKVIEFTSAKANDRHGLLPNGLPRPYKGYKGDSNYCIEIVCNEKGKWEGEVISTFEAYQIVRTGGVRQLRHPGLSLRGKPLVMRLMIDDFVRLDVDNTLRTMRVATLSGNGQIFMADANEANVDARNRSKDDPFAYVSKMAGSLQRSKARRITISPIGEVSDPGFKE

SEQ ID NO: 2450 - protein, 1055 aa, unidentified
  REGION 1..1055: note = Description of Unknown: Cas Enzyme sequence
MAISGAYRLALDLGSTSLGWAMFRIRQDPILGTVPTALIRSGVRIFSDGRNPKDGSSLAVTRRAARAMRRRRDRLLKRKSRMLGQLVRHGFFPADEAARKALERLNPYQLRAKGLRESLTPGEFARVLFHINQRRGFQSNRKTDRKDNDSGALKQAIHQLRERMTASGCQTVGEWFWQVRMQQRPEGVKGQGVRARYRETPYTTDEGKKRIDKSYDLYVDRAMIAQEFDALWVAQAALQPALFTEAARADLRDTLLHQRPLRPVRPGRCTLLPDEERAPLALPSTQRFRILQEVNHLRLLDSTLREVPLTLAQRDAVVAALEAKNKLSFDQIRKLLKLSGSVQFNLQDAKRTELKGNATSAALARKDLLGAAWAGFAPELQDEIVWQIVNEEGEGTLIAWLQQHTGVDEARAEAIANVALPEGYGSLSRKALARIVPQLQRDVITYDKAVQAAGFAHHSDLGFDFDHESDEVEQVGERTIASTGEIKPVYVFKELPYYGRALQRHVAFAKDNPRNDEERYGKIANPTVHIGLNQVRVVVNALIRRYGRPAEIVVELARDLKQSREQKLEAQKKQAENQKRNADARVQISDAYRAQGLLRSPEQIKRSEVEKWLLWKELNPSDSLDRRCPYSGVQISAAMLLSEQVEIEHILPFSQTLDDSLNNRTVAAWRANRIKRNRTPWAARADFEAQGWSYEGILQRAERMPLRKRYRFAPDGYERWLGEDKDFLARALNDTRYLSRVAAEYLRLVCPGSATRVIPGQMTAMLRAKFGLNDVLGLNGEKNRNDHRHHAVDACVVGVTDQGLLQRFAQANAQAREGGLTRLVESMPLPWDTYRDHVERAVRHIWVSHKPDHGFEGAMMEETSYGIRKDGTIKQRRKADGSAGREITNLIRIAEPAQPARHGVDGEGRPLPYKGYVGGSNYCIEITRNAQGKWEGEVISTFKAYGIVRAAGWAQLRNPTQGQNGQPLVMRLVIGDIVRLEVEWREQTMRVVNINGNNGQMFMAPVHEANVDARNRDKQDAFAYTSKVAGSMQKAKARQVTISAMGELRDPGFQG

SEQ ID NO: 2451 - protein, 1016 aa, unidentified
  REGION 1..1016: note = Description of Unknown: Cas Enzyme sequence
MAKMRYRLALDLGSTSLGWAMVRLNDANEPHAIIKAGVRIFSDGRNPKDGSSLAVTRREARAMRRRRDRLLKRKSRMMANLVEYGFFPVDPVARKEFELLDPYELRARGLNEALQPSEFARALFHINQRRGFKSNRKTDKKENDASALKSALKNLRSAMVSDGSRTVGEWLYKRHTSGQTVRARYRQTSVKQENGKSKIDKSYDLYIDRAMIEAEFNALWSAQTKFNSNLFTEAARRTLKDCLLHQRPLKPVRPGRCTLLPDEERAPLALPSTQQFRMYQEVNNLRILGEGLSERPLTLDQRDLLVSSLEQNSKRSFTQIKRLLNLTGAAQFNFEDPKRQELNGNKTSAILSKTDYFGAIWFDLSLEQQDEIVSKLVNEENETRLINWLQQEFSFDENQAEKIANAPLPEGYGSLCATALNRILPELKKEIVTYDKAVVAAGFEHHSNISHAATGEILPLLPYYGEYLQRHVGFGTGVPEDHPEKRYGKIANPTVHIGLNQIRVVVNALIKRYGHPSEVIVELARDLKQSQEQRKEENKRQAENQNRNARLRQDIAAALNISAERVRRDDIQKMLLWEELSHDVADRRCPYSGVQISVQMLLSDQVEIEHILPFSQTLDDGLNNKTVATRQANRIKGNRTPWEARHDLAAQGWNYEDMLTRAEKMPKNKRYRFGDDGYQHWLSEDKTFLARALNDTRHLSRVAREYMSLICPQNTRVITGQMTAMLRRKFGLNDILGLHGEKNRNDHRHHAVDACVIAVTDQAMLQRFAKASASAREQQLTRLVENMPLPWNTYRDHVARAINAIYVSHKPDHGHEGAMHNDTAYGLLGSGVVRTHKIVDGIRQREDLNLKVIEMSSNKAADRHGTLPDGSPRPYKGYKGDSNYCMEIYRTEAGKWASEVISTFQAYQIVRREGVIRLRNPRLSLSGKPLVMRLLIGDTLRLEVNGRTETVRIQKLAGNGQIFLASHQEANVDARNRDASDTFAFVSKMVGSLRTAKGRRVTVSPIGEVNDKGFVD

SEQ ID NO: 2452 - protein, 1018 aa, unidentified
  REGION 1..1018: note = Description of Unknown: Cas Enzyme sequence
MKNKMQYRLALDLGTTSLGWAMLRVKPNEDGQLQPCAIIKAGVRIFSDGRNPKDGSSLAVTRREARAMRRRRDRLLKRKARMLQQLTHFGFFPTDLAERKALETLNPYELRAKGLDEALSPYEFGRALFHINQRRGFKSNRKTDKKERMLNGDPVRARYRQTKQVKEDGKTKIDKSYDLYIDRAMVEAEFEAIWARQATLNPTIYSEQAKAALKDVLLFQRNLRPVKPGRCTLIPTEERAPLALPSTQRFRIYQEVNNLRLLRAGPKDEALTLTQRDQLVVALEQNNKRTFTQIKKLPGLDGQTQFNFEDPKREELKGNTTSALLSHTKHFGETWFEFDEATQDEIVWQLLNEENESRLIAWLMQKTGVDAEKAETIANVALPEGYGSLSRQALARILPELRKTVITYDKAVQAAGFEHHSRLNNYGEVSGRTFDTGIERIDQKTGEIQRLHAFHELPYYGEFLQRHVGFADPKATPETPEKYFGKIANPTVHIGLNQVRKVVNALIKRYGHPSEVIVEVARDLKQSKKQRDEENKRQAENQKRNDRIRKDIANTLGISEERVRHADIQKWILWEELSFDPADRKCPYSGVQISAQMLLSEEIEIEHILPFSRTLDDSLNNKTVSTRQANRIKENKTPWEAFGKENALGVIYADILLRAQKMPKAKRYRFAEDGLAQWDKEGKGFLPRALNDTRYLSRVAREYVSLVCPQATRVIPGQMTAQLRAKFGLNDVLGLNGEKNRNDHRHHAVDACVIGVTDQGMLQRFAIANASTRQKGLTRLVETMPEPWPTYRQHVERAVQQIYVSHKPDHSHEGAMHNDTAYSLLAEGLVGVHKTIEGKREYVEEKLAVIPFTSQKAAERHGYLPNGELRPYKGYKGDSNFCIEIVRNAKGKWEGEVISTFQAYQVVRSAKTPAEGVAVLRNPYRSLSGKPLVMRLLIDDLIRLELENIVRTMRVSTLSGNGQIFMCDHNEANVDARNRNKEDSFSYTSKMAGSLQKAKARRVTVSSIGELHDPGFKG

SEQ ID NO: 2453 - protein, 1058 aa, unidentified
  REGION 1..1058: note = Description of Unknown: Cas Enzyme sequence
MQHKMRYRLGLDLGTTSIGWAMLRLNEHDEPCAVIKMGTRIFSDGRDPKDGSSLAVTRRLARHMRRRRDRLLKRKARLQAALVRLGFWPASVAERKVLEGLNPYVLRSQGLDRALTPAEFGRALFHLNQRRGFQSNRKTDKKDSESGLLKSAIRKLRETLAVEGARTVGEWLARRHGARQSVRARLRGKSAKDKAYDLYIDRSMVAEEFDRLWAVQAAFNPTQFNEENRGELRDILLHQRNLRPVRPGRCTLLPGEERAPLALPSVQRFRTYQELNHLRVVTANLTESPLTLPQRDQLAGLLEHGDLTFPKMRRALGLAGSTQFNLEDAKRDRLKGNIASKMLGAADAMGDSWHALTPAAQDEVVTRMLEEASESRLVEWLVSQFDIDEALGERLAGMALPEGYGSLSLAAINKVLPELQREVVNYAEAVIRAGFDSHSVLSHSEQTGEVMDALPYYGQALQRHVGFADPRAREDDPPEKRFGRIANPTVHIGLNELRKVVNGLIQRYGHPSEVIVEVARELKQSQARRKEENERQAERQKDNERFSADIRTLAGMAGREPTRDDLQRMRLWVELNPQDAANRRCPYTGEPISMAMLFSAEVEVDHILPFSKTLDDSLNNKVVALRRANRDKGNRPPAEAFGSSPAGYDYEAMLQRAALMPREKGRRFATDGYQRWLREDKDFLARALTDTAYLSRIAREYLSLVCPANRVRVIPGRLTAMLRGKFGLNAVLSANGVKNRDDHRHHAVDAAVVGVTDQGLLQRFARASAAAHERHLNRLVEDMPLPWPTFREHVARGAAGIIVSHKPDHGHEGALHNDTAYGLRPGGEVAHRVMLDNFKSGEDVARRTWVDPRIAQQLQEQTAGLSGKAFLEKLEQATAPSGMRRLRMLEKLTVIPMASPSAADRHGLDEDGKPRPYKGYKGDSNHCIEIWRNDKGRWESRVVTTFEAYDIARAQGPQRLRHPGLAQDGQPLVMRLHVDDCLRLEDAGASRLMRMVTASSAGRLSLVEVHEANVDKRNRTKQDGFAYTYKMASTLQTARARKVTVSPIGEVRDHGFKP

SEQ ID NO: 2454 - protein, 1041 aa, unidentified
  REGION 1..1041: note = Description of Unknown: Cas Enzyme sequence
MNITYRLGLDLGTNSIGWAMLGLSADGRPEKIIRMGSRIFSNGRDPKSGQSLAADRTSIRSQRTRRDRAIQRRDSLLRRLCAFGLLPQDVETAKNLLTLDPYELRAEALARPLHPYHLGRALMHLAKRRGFQSNRRTPEKDEEGNTKEAARRLQEMLGGKTLGQFLFERTKRGLGTRFRPRPESAAKPKKDFEFYPLRAMYAAEFAAIRDAQKAHQKLDSEDWLALERLIFFQRPLRTPLRGRCRFLPNEARADLALPSFQRFRILSDASHLGYRSDPFAPLQPLTPAQRETVVSLLSSQQTVAFGKLRTKLGLSETSRFNLKSDRREKLLGDPVAYLFSGKTLFGKDWDTLPLATRDAIVAAVLDTEDHEALRQKGVSFGLSGAALGAFVEINPDKLPKGTARFCAPALRKLVPHLENGLKYSEAVAACGWNHTQTAGDGSEAFLPYYGKAMPDSVVPAPKSKVEDEKSFGRFPNPTVHIALNQLRLVVNTLLARYGKPDEIHLEIARDLKMSAKQLAELERQQSANTKANTLRDTLLEQLSAEHGLNLVKNYDNRLRLRLWEELSKDPNLRCCPYTGQRISPAKLFSHEVEIDHILPFAQTLDDSPANKVLCMRSANQIKRKRSPFEAFCHNSPGYDYSEILNRAALLPGNKRWRFQDNAMEKFRDEQGFLARQLVDTQHLGRAAQRYLTCVVPPNQVRVSPGRVTALLRHHLGLETLLIADGTPDRIGKNRADHRHHAIDALVIALIDPRFLKFVRDANAVSELDRIEISSPWETFRSEAQSAVETIIVSHRPDHNPAGRLHEETAYGEVLQDRARRRPNQQWEIDEGYNLVVRKPVAVLKHSDLEKIRDLKLRQKLATHTANVSDSDKVAWAVALAGFSAETGTQSVRLLVKNKSARSIVHGEGRFTRSLIPGEIHSVIFWKTPNGDMATTHLSVWDANLKSDTELKPHPAAKKLFSVSKGDFLRTEHKGTEKTVRIVSLRPSEGNKKIFVAPISDASGDYEFPIQFSRILATKSRLVYISPIGEIRDPGPPILPSP

SEQ ID NO: 2455 - protein, 1042 aa, unidentified
  REGION 1..1042: note = Description of Unknown: Cas Enzyme sequence
MKSYTPYRLGLDLGTNSIGWTMLRISPDGRPEKILRMGTRIFSDGRDPKSGQSLAADRTTVRGQRTRRDRAVQRRDALLRRLCTLGLLPQDEITARNLITLDPYELRAEALRRPLHPYHLGRALMHLAKRRGFQSNRRTPDKDDEGNTKEAARHLQDVLQGKTLGQFLYERVQKGLGARFRPKPESALKPKKDFEFYPTRAMYAAEFAAIRDAQAAHQKLKPEDWSSIARLIFFQRPLRAPVRGRCRFLPEERAPLALPSFQQFRILSDANHLGYRLDPFAPVQSLSSEQRETVVQLLRVQQTVTFSKLRTKLGLPDTARFNLESDRRDKLLGDAVAHLFASKSLFGKKWHELPLETRDEIVTAVLDCEDNEVLRKKGSGFGLDGESLESFVSINPDKLPKGTARFGATALRMLVPHLEKGAKYSEAVAACGWQHTQAAEDGSHPNLPYYGKAMPDSVVPAMKSKVPDEKTFGRFPNPTVHIGLNQLRLVVNTLIERYGKPAEIHLELARDLKMSAKQRAELAKQQTQNTKANARRDEMIDEINQENGTLIAKDYDARLRLRLWQELSEDVNSRCCPYSGQRITPAKLFTDEVEIDHILPRALTLDDSPANKVLCMRTANRDKRRRSPHEAFGHNPAGYDYADILHRAALLPGNKRWRFQPDAMTKFRDEQGFLARQLVDTQHLGRAAHRYLSCIVPPQQVRVTPGRVTALLRHHLGLETLLAPEDAPDRVGKNRADHRHHAIDALVVALIDPRFLKFVRDANAASELDRLEVPPPWGNFRADAKTAIDSIVVSHRPDHNPSGRLHEETAYGEVLQDIERRRSNQRWEIEKGYNLTVRKPVASLKAVDLERIRDHVVRRKLADHLEGVSEGDKAKWTEALAKFTTATGTRSVRLLLKDKSARRVEHGRGRFHRWLIPGDVHSVTFWRMPDGEVKAVGLTVWEANSVRANTVKPHPLAKKLFAVCKGDILRTIHKGTEKTVRVAKLQPSDSNQNLVCVTHNSATDAEKFTIQFSRILTTQTRLLHVSPIGDVRDPGAPKLTDI

SEQ ID NO: 2456 - protein, 1107 aa, unidentified
  REGION 1..1107: note = Description of Unknown: Cas Enzyme sequence
MPGSLTLGIDLGAESIGWALVRHGPDKPEIIGASAVIFNNGRDEKGESLAVTRRIHRGMRRRRARYLWRRDRLLRALVRFGLMPQEDGARKALETLDPYRLRAQAAESKIAPHELGRALFHLNQRRGFASNRKTDKKDKDSGAYKKGIETLRETLGDQTLGQYLWQHHQDPQKKADISRKTGIRFRSTRKGYKTEYPFYPSRAMYKAEFDRIHETQKQNQSLTEEQWQNLRDILFNQRPLKPVEPGICSLYYGQEIVNPETGEVTHATKEKRAPHALPSVQMFRIAQDINNLKIRNEERRWRKLTPQERETLWALMNTKEKISFSTIRSKLGLPEDTAINLENDRRDHLKGNKPAWVLAKYFGKDFYKKPLELQDSIVERILDCEHEDELFREAVSNWGLGEDKARKMVYEDEVGEMNFPAGYGQFSANACHALVPLMKNEGLRYDEATARLGVHHSDRRTGGTSESLPYYADIIPLSVSKPKYGNPEEMQKGKIANPTVHIALRQLQKLVNALIARYGKPDRIVLETARELKMSMEDKIALNKEHKANKEANDRIKTDLESIGEWKGDKGRLLLKMKLWEELGKDPNDRRCPYTLQIISRAMLLDGRAEIEHILPCRRTLDDSRANLTVALVSANRMKKNKSPHEAFSLQKPFGWNEKEGEYSYDKILNQAKNFPKNKRWRFEADAMERFEDTEDSWRERFLNDTRYATKIAKQYLETICPRVDASAGKLTFKVREAWGLKKNRDDHRQHAIDALMLTQITLSLVQQTARANANEALDNFTIPTPEEIGWPTLREDALKAIHAAIIYHRPDHGLGGEMLKAGAYGRPIKGHPIEKNYDLVSRMDFHETELKHIGLGKDARSEKILVRDRNIRRALLEKAIVNLPEEESERDKTIAALLDLTEDRKQWKTVSEAEFKKIVHEYSVSRNIRRVRILQKASNFRNIKHMQKKQPNAKTDLRHKALVLGENHHVAWWLKPDGEIVPQFVSLLAANGKNVEKPHPAAKRLLKLHKNDLIKAVHGGEEKILRVIGLNPSQGQPIKCIEHFEAGELSKRMLPGGDLKPVLFKTEDLVPAQIRKIHVDPTGKVYDPGPFCLPEKATSIRKTKTA

SEQ ID NO: 2457 - protein, 1081 aa, unidentified
  REGION 1..1081: note = Description of Unknown: Cas Enzyme sequence
MAKKVLGLDMGTNSIGWALIEIDNKGIPLGICDAGVRIFNSGRDPQRGTSLAVARRERRGQRRRRDRMLQRKHDIMSLLVRFGLMPEDKVQRKLLEAQDPYELRARAAVERVEPYALGRALFHLNQRRGFQSNRKIDKADSKKETEKAKEKLKLALEGQTLGQFLWAQHEKRETVRFRPIPLANNKNSYDLYPTRDMYADEFDKIQAVQGKHQKLSAAQWEKLKDKVIRQRPLKESKVGRCQLYFEKDCVDLKTGEVSAYLRCPVALPSAQLFRIVQEINNLKIRAGSFGAFAPLDQDKEKLQEKREMLLTLFCGKGEVSFEDIRKTLQLSEDVEFNLAAKRSKLKGDAVYATLKKYFGKEWLSFSIEEQDKIVLSLLDIEDERTLYKKAVHEWGMKEDKARALVDNISPLSFPDGYARFSQQALHDLLPLMRDGLRYDEACLKLGGSHSVRDFDGTADSLSYYGLAIPESVVEPHNPDTASEEERRGKIGNPTVHIGLRQLQKIVNEVIKTHGKPDIIRIEMARDLKMSKEDKDKFSKNQSQNERDNERIKKELTERGVWVGDKKGEKHLKYRLWEELNLSDVNDRKCPYTGKTISMDLLFSEEVEVEHILPFSRTLDDSRANKTVSFYVANREKGERSPYEAFSHKQPGRSVDGDYSYECILQRAENLPKNKRWRFSTDAMQKFSDENKFLDRQLNDTRYLSKVAKRYLSLVSKNVTVSPGRLTAMMRRAWGLNEVLGHNRKNRDDHRQHAIDAIVVALTDIGAVQKVMTLSGQGENLNKIKAEDLPVGFWEQIRDRIIGSEEKPGMVVSHRAEHGMGGALHEDSYYGVLYHPDFPPEMDRRTKWEKENGFNIVTRKELSGLSQNEVGQIRDPLIREKLEEILEGLPAIVKKKSGGKEKRIVDTDALKKALYQFGKNNQIRRVRILKKDASIKVIRHKQGEVEHIKGVSPGDIHHVSFWRMPDGKMESLGVSLFDANQKDHNAFRPHPAAKLLMKVHKGDLLRLEHKGEEKTARVMSLRPANGQMVLVEHFEGGDVVKRQKEEQIQIFLSFSKVIEAKARKIFVSPTGKTYDPKSLKVA

SEQ ID NO: 2458 - protein, 1018 aa, unidentified
  REGION 1..1018: note = Description of Unknown: Cas Enzyme sequence
MSTNMTYRLALDIGSTSIGWALLRLNEENAPYAIIRAGVRIFPDGRNPKDGSSLAVTRRDARAMRRRRDRILKRKIRMMAALVRLGFFPADIEVRRALTDLNPYELRAKGLDHQLTGEEFARALFHINQRRGFLSNRKTDKADTDSGALKKAISELRQKLMKEECRTLGEWLAKRHHQGESVRARLRGKTQKDKQYDFYADRAMIEHEFDTLWGKQASYDSTLFSESARLELKDILLHQRPLKPVIPGRCTLIPDVPRAPLALPSTQRFRILQELNNLRIELPDLQQQSLTIEQRNLIADLMERKASITFSAILKALKLPGTTRFNLQDIKRDQLKGNLTSVNLSKPEHFGDDWHKLPLNVQDEIVVRLLEEASLSHLILWLQNRFNLDESRAERIADTNLPEGYGNLSLQALQRIVPALQGEVITYDKAVLVAGFDSHSALSHSQQTGEIMPELPYYGIPLQRHVAFEKPNPRNDEERYGKIANPTVHIGLNQLRVVVNDLIKQYGHPRQIIVEVARDLKMSREKKLEIQREQKQRQDLNDQHVRTACDILGLNADNLDKSKRRDLSQKMQLWVELNPKDAADRRCPYTGEKINIERLLNGDVEIEHILPFKRTLDDSMNNKTVALTRANRAKGNQTPFEAFGLNQQNGYDYDEILQRALLMPSNKKKRFAKDGMEQWLQGETDFLPRALNDTAYLSRIAKEYLSCICPHTQVWAIPGRLTGMLRGKFGLNQLLSGDETKNRDDHRHHALDACVIGITDRSTLNAFSRASQRAWEAGTRRLLDDIEAPWPTYRAHVERALTNIIVSQKPEHGYQGAMHEASAWGLRKDGQVQHRVASEDGMGRDMDIRKLNVIKLTTPSASYRHGFNIDGTDKAYKGYVGGSNYCMEIWIDERGRWKSEVVSTFDAYQIIKSHGEENGWKKLRNKQFTQSGKPLIMRLMNKDYLRVEVNGNFRTMVIATITTNGQVFMADHNEANVDARNRDKNNPFGYVSKMAGSLQKAKGRLCTVSPSGKIHVIS

SEQ ID NO: 2459 - protein, 1019 aa, unidentified
  REGION 1..1019: note = Description of Unknown: Cas Enzyme sequence
MSTNMPYRLALDIGSTSIGWALLRLNEANDPYAIIRAGVRIFPDGRNPKDGSSLAVTRRDARAMRRRRDRLLKRKVRMMDALVRLGFFPADTEERRALTDLNPYELRAKGIDHQLTGEEFARALFHINQRRGFLSNRKTDKADTDSGALKKAISELRQKLMKEECRTLGEWLAKRHHQGESVRARLHGKTQKDKQYDFYADRAMIEHEFDTLWGKQASFDSTLFSESARLELKDILLHQRPLKPVIPGRCTLIPDVPRAPLALPSTQRFRILQELNNLRIELPDLQQQNLTIEQRNLIADLMERKASITFSAILKALKLPGTTRFNLQDVKRDQLKGNLTSVNLSKPEHFGDDWHKLPLNVQDEIVVRLLEDASLSHLVLWLQNRFNLDESIAERVADTNLPEGYGNLSLQALQRIVPALQNEVITYDKAVLVAGFDSHSALSHSQQTGEIMPELPYYGIPLRRHVAFEKPNPRNDEERYGKIANPTVHIGLNQLRVVVNDLIKQYGHPRQIIVEVARDLKMSREKKLEIQREQKQRQDLNDQHVRTACDILGLNADHLDKSKRRDLSQKMQLWVELNPKDAADRRCPYTGEKINIERLLNGDVEIEHILPFKRTLDDSMNNKTVALTRANRAKGNQTPFEAFGLNQQNGYDYDEILQRALLMPSSKKKRFAKDGMEEWLQGEADFLPRALNDTAYLSRIAKEYLSCICPHTQVWAIPGRLTGMLRGKFGFNQLLSGNETKNRDDHRHHALDACVIGITDRSTLNAFSRASQRAWEFGTRRLLDDIESPWPNFRAHVERALTNIIISQKPEHGYQGAMHEASAWGLRKDGQVQHRIASEDGIGRAMDIRKLNVIKLTTPSASHRHGFNIDGTDKAYKGYVGGSNYCMEIWIDEKGRWNGEVVSTFDAYQIIKSYGEENGWKKLRNKQFTQSGKPLVMRLMNKDYLRLEYDGIVQTVVITTIKSSGQILMAPHHEANTDSRNRDRESSFGYISKSAGTLQKAKGCLCTVSPTGKLRALHK

SEQ ID NO: 2460 - protein, 1044 aa, unidentified
  REGION 1..1044: note = Description of Unknown: Cas Enzyme sequence
VKTMQPYRLALDLGSTSLGWAIFRLNRLYEPTAVVRAGVRIFSDGRSPKDGASLAVSRREARAMRRRRDRLLKRKARMQDQLVRHGFFPADVAGRKALEHLNPYQLRAKGLHDSLTPGEFARALFHINQRRGFQSNRKTDRKDNDSSALKKAINQLREHIIASGCQTLGQWFWQVRMQQQPEGMAGQGVRARYRETPHTTEEGKKRIDKSYDLYVDRAMIAQEFDALWAVQAALQPALFTEVARADLRDTLLHQRPLRPVRPGRCTLLPDEERAPLALPSTQRFRILQEVNHLRLLDSTLREVPLTLAQRDAVVAALEAKSKLSFDQIRKLLQLSGSVQFNLQDAKRTELKGNATSAALMRKDLFGGAWAGLAADLQDEIVWQIVNEEGEGTLIAWLQQQTGVDEARAEAIANVVLPEGYGSLSRKALVRLVPELQRSVITYDKAVQAAGFAHHSDLGFDFDHASDEVELVGERTIASTGEIKPVYAFKSLPYYGRALQRHVAFAKDNPRNDEERFGKIANPTVHIGLNQLRTVVNALIRRYGRPTEVVVELARDLKQSREQKLETQKKQAENQKRNARICERIAETLGISQERVRTSDIQKWILWEELSFDVADRRCPYSGEQISATMLLSERVEIEHILSFSQTLDDGLNNRTVAMRHANRIKRNRTPWAARADFEAQGWSYEGILQRAERMPLRKRYRFAPDGFERWLGEDKDFLARALNDTRYLSRIAASYLRLVCPQGVRVIPGQMTAMLRAKFGLNDVLGLNGEKNRNDHRHHAVDACVIGVTDQGLLQRFAQTNAQAREGGLTRLVESMPLPWDTYRDHVERAVRHIWVSHKPDHGFEGAMMEETSYGIRKDGSIKQRRKADGSGGREITNLIRITEPTQPTRHGVDAKGQPLPYKGYVGGSNYCIEITANDKGKWEGDVVSTFSAYRIVRAAGWGQLRNPLQGQNGRPLVMRLVIGDSVRLEVEGKEEAMRVVNISGSSGQIFMAPINEANVDARNRDKQDVFAYTSKYAGSMQKAKARQVTISPIGELSDPGFQG

SEQ ID NO: 2461 - protein, 1038 aa, unidentified
  REGION 1..1038: note = Description of Unknown: Cas Enzyme sequence
MRYRLALDLGAKSLGWAMIRLDADDRPCAVIRAGVRIFSDGRHAKKGTSLAAERRLARAMRRRRDRLVRRKARVRRLLVEHGFFPKDPLEQRLLERLNPYELRARGLDEALTGPEFARALFHLNQRRGFKSNRRSDRAAGDKQRGPLTAALADVRNTIDATGDGGRARTVGEWLWRRMREGRPVRARFREVRVPQPDGRTRKATHYDLYIDRAMVEAEFDQLWSAQARTQPALCSEAARTALKDAMLYQRRLHPVSPGRCTLLPEQPRAALALPSSQRFRLYQEANNLRVTDEGLRDRPLTRDERDRIVAALETHSARSFTALKRLLRLPGSSRFNLEDVKRDELKGNTTSVRLSAPDLFGAQWHQYAPDQQDRIVEQLLTEESEPALIDWLMTHTDLDAKRATAVAAVALPEGYGRLSVAALSRVLPCLRASVISFAAAAREAGFHHSVLSGNEAVEGQTVPIELTNLTTGEVRTWHVFRQLPYYGEVLGRHVGFGSGESQAPVETRYGRIANPTVHIGLNQLRIVVNALLARYGHPREVVVELARELKQSQEQRREDRQRQAASQQRNERLRADAGAVFGSPHRVTNADIQKLILWEELSSDVLDRRCPYSGQRLSMAMVLSDQVEVDHILPFSRTLDDSLNNKTLAIRDANRLKGNRTPWEAREDFEAQGWSCAEMVLRAGQMSAQKRYRFAEEGYQRWLREDQDFLARALNDTRYLSRVALEYVRLICPQDTRVIPGRVTAMLRARFGLNGVLGVAGDKNRHDHRHHAVDACVIGVTDRGLLKRFADASASAKEHRLDRLVETMPLPWPSYRAHVERAVTHLWVSHRPDHSHEGAMHNDTAYSLRAEGRVVWHDYVEGRRARHEDRLTVIPITNALQHARHGVLPDGTPRPYKGYKGDSNYCMEVVRGPKGRWLGRLVTTFDAYQAVRRAKGDATVLRHPTQSLTGEPLVMRLIKNDVVRLELDGEAHTMRVVKISASITLADLHEANVDARHRDDDDAFRYTSKTVDTLRRASARRVTVSPIGDLTDPGRRVD

SEQ ID NO: 2462 - protein, 1029 aa, unidentified
  REGION 1..1029: note = Description of Unknown: Cas Enzyme sequence
MMAKIKYRLGLDLGATSLGWCVYRLNDEEDPCGIVRAGVRIFSDGRDPKSLASRAADRRAKRQARRRRDRLLKRRQRMLDGLVQFGLLPSEAGERKALQALDPFELRAQGLDNALPPHHLGRALYHLCRKRGFRSSRKERAADEKETGKVNEAIRALAARISDAGCRTVGEYLAREHAERRPVRGRRRADGSYVLYLQRAMVESEFDALWTSQQRFHPELLTEEARLFLRDTLLFQRKLLPVNPGRCQFEYPEYRARLADPLQQKFRLLQELNNLRLVRGRESRTLTLDERDHLYGFLKVREGATFAKLREALGLKRNDPCRFNLETENRKGLKGDLLTAQFGSDACLGEAWNRLSMTEQRELAKLVATEADEDALVAKLCAAPWNLTPETASSVSAAKLPEDFGALSVKALEKIVPELERDVVTYDIAVQRAGYQHHSQLHSGEIFKSLPYYGQILRGYTAPADGAKNDDERRFGKISNPTVHIGLNQLRLLINALVKRYGAPSEIIVELAREFGYGPDRRRELLRTQQDNTERNARYDEHLRLQGLKTSRENRQKLQLWEELGKDDALDRYCVYSGTRLSRAMLFSDEVEIDHILPFSRTLHDGIGNKVLCTRAANRAKGNRTPFEAFGHSPAGYEWSHIEERIARLSGRKPLLFAANALEDFLNGRDFLDRHLTDTAYLSRVARIYLSYICHKDRVWVSNGRLTSLIRGKFGLNSLLSTDGSKNRNDHRHHALDAAVVGLCGRRLIQRVATAAGAAEKQGENRLLADLELPWPTFRDDLRGTLERIVASHKPDHGREAALHNETNYGWRGPSDARGAALVGYRVPIENIGSRDLAAIPDTALRNRLARVLAGKSNAKDAKAALEAFSRESGIRKVMVEERLSVIPIHDRRTDTPYRYVKGDGNYCYDLYVDDKGRWSGRVVSYFEANQEPDSAWQGSTPDRRHAMRLHKGDYIVLDGDGGARALMRVHRFSEGMIALVRPNEANVDARTRDKSDDLKFVFKAPGALGKAKAVSASVDILGYVNVQR

SEQ ID NO: 2463 - protein, 1037 aa, unidentified
  REGION 1..1037: note = Description of Unknown: Cas Enzyme sequence
MSKQNYLMRYRLAIDLGTTSLGWSILHLNQQDAPTAIIKAGVRIFSDGRNPKDGSSLAVTRRAARAMRRRRDRLLKRKARMLNMLIKHGFFPQDAAARKALESLNPYQLRAKGLDKALTPGEFARALFHINQRRGFKSNRKTDKKDNEGGALKTAINQLRQQLQDENARTVGEWLWRRLQAGQGTRARYHETRFTTEEGKNKIDKSYDLYVDRQMVADEFDALWAAQAAFNPSLFHEQARAELRDTLLHQRPLRPVKPGRCTLLPEEERAPLALPSTQRFRILQEVNHLRILHPDLREEPLTLAQRDAIVNMLESKTKVTFAAMRKKLKLGDSVQFNLEDAKRAELKGNATTAVLSKKEFFGTAWQDFDETLQDEIVLRLVTEESEATLVQWLTKNTGVDEDRVMAIANTGLPEGYGSLSRKALARIVPALRTEVITYDKAVQVAGFAHHSDLGFDFEHDDDEVEQIGERIIASTGEIKPVLAFKQLPYYGKALQRHVAFGSGNPKDPEEKRYGKIANPTVHIGLNQVRKVVNALISRYGRPTEIVVELARDLKQSREQKQETQRKQAENQKRNARIRQEIAALRECSEECVKHADIQKWILWEELSFDVADRRCPYSGVQVSAAMLLSDQVEIEHILPFSQTLDDSLNNKTVSMRQANRIKGNRAPWQAREDFETQGWAYDSILLRADRMPKAKRYRFAPDGYERWLKEDKDFLARALNDTRYLSRIAKAYMQLVCPQGTRVIPGQMTAQLRDKFGLNNVLSLDGEKNRNDHRHHAVDACVIGVTDQGMLQRFAQASAAARQQGLKKLVDDMPLPWPTYRTHVERAVQNIWVSHKPDHGHEGGMMEDTAHGISKEGAIRPSRLSKKDEVKNLILISDPTQPKRHGVDADGQPLPYKGYIGGSNYCIEITRNDKGKWEGEVISTFRAYQIVRKHGVARLRHPGLAQNEKTLVMRLMIDDCVRLELDGQEETMRVVNIGSNGQVFMAPVHEANVDARNRDKANPFSYTSKYAGSLQKAKARRVTISPIGELRDHGFKN

SEQ ID NO: 2464 - protein, 1049 aa, unidentified
  REGION 1..1049: note = Description of Unknown: Cas Enzyme sequence
MPENKRPVKTSAPDTPSKLRYRLALDIGTSSLGWAMVRLTKSDDPCAIIRAGARIFSDGRNPKDGSSLAVTRRLARGARRRRDRFLRRKTRMMTLLIEYRFFPADVDERKALERLCPYTLRARGLDHALTGPEFGRALFHLNQRRGFRSNRLTPTDDTDKGPMKQAMAATRAQLETTGASGQPRTVGEWLYQRLQEGQPVRARMREIPITRPNGKPGVQKSYDLYIDRAMIAAEFDALWAVQAAHTPDLFTDAARDALRDCLLFQRPLRPVDPGRCTLLPDEPRAPKALPLSQRFRIYQEVNHLRLVGDHFEQIPLTLDQRDQIVDALERYPKRSFEALRKLLALPPTARFSIESPARKELDGNATSTQLAKKSRVGPRWRTDETPQTQETIVRRLLSEDDDDETVVSWLCDTLGVDVDAAHEIITAKLPAGYGHLSVHAMERILPHLQSDVISFAEATERAGFHHSQLRENAEVPGHTVARDRVDTTTGELTTWHVFTALPYYGEILDRYVGQASGRVDDRPEQRFGKIANPTVHVGLNQVRLIVNTLIQRYGHPEQVIIEVARDLKQSQKARAAQVKQQAVFQTRNQRLRSEAAALLGGSPEDVSRADLQKLILWEELNETDERDRRCPYSGTVIDRRMALSAAVEVDHILPFSRTLDDSLTNKTVSTKKANQVKGNRTPWDARDDFAAQGWTTDDMIARARRLPEQKRFRFAADAEQQWLGDGSDFLGRALNDTRYLSRVAAQYVRIICPHDTRVIPGRMTAMLRGKFGLNGVLGHDGLKNRDDHRHHAVDACVIGVTDQGLLQRFARASQSARERALEKLVETMPRPWETYRDHVARAVTQLRVSHKPDHSHEGAMHNATAYPLTDDGRIRMKDTTIVGIPIADASQVHRHGKDADGRPAAYKGFRPDSNYCMDIVRRNDGTWAADVVTTYDAYQAVRQAGGDVTVLRSSRRSLRGAPLVMRLIKGDVIRFTHLDRLRTMRVVKFTVDGSVTLSDIHEANVDARNRNKETDYSYTTKRVGGLQRSQARRVTVSPIGDLRDNGYKG

SEQ ID NO: 2465 - protein, 1178 aa, unidentified
  REGION 1..1178: note = Description of Unknown: Cas Enzyme sequence
MIQKNYRLGLDLGTNSVGWATLALDKNNEPLKIIASGVRIFSDGREPKTGEPLAVARRIARGMRRRRDRFLSRKKTLMNYLIQINLMPKDEISRKKLELLNPYELRTKALYEELKPEELARAIFHLAQRRGFKSNRKEIKTESEIAVEDGEKKLKKENTKITDNDKREGLAKKIHESNSKTLGEFLYKQRLLENLSTRSKPDENALYATRKMYEDEFEIIKNNQQEFQKISQENWQRIYEIIFYQRPLKSQDKGFCRFLNKFKFEAKKLPDWAENLFINRDQKKYPYGLPRAYLALPSYCKFRILSEVNNLKIKNLRTREIIELTPQQKQQIIERLNSQKYQVKFSALKKLLSTKNISYVGDDFEFNLESERREGLEGNPTESLLKNEKYFGENWNNFSLQKQDEIVEFLLEEDDETNIQNKALNEWKVNEIQAKNLAKLTINSFVKTSVGAMCKEILQKLCEEISNKNCLYHQALKNLGINHSDEDYNDGSKDALTYYAEAIPASVVAVKPKLTKLKTTSTEEEQFGKIANPTVHVALNQLRKVVNSIIKDYGKPTEIHVELARNLKQNKDEKKQTEKQQKQNEKDNDEAKKTLIENNISDTYENRLRYKLWKELNSDCNDRKCIYSGETISIKKLFSSEIEIEHILPFSKTLDDSIGNKTLAHKSANNFKGNRSPFEAFGGNNGEYDYEKILLRSKNLPRHKRWRFEANAMEKFNDQNSFLASQLNDTRYLSKIARQYLSQVCKKENINVANGKLTSIIRHSWGLNSILKDENQFENKASENLLLEENSKEKPKKPHKKNRDDHRHHAIDAICIAMTDRKLLQQISRDNSRGFDLERLEIKIPNHWNSFREDTKEAIEKIIVSHKIDHSGAGKLHDETYYGVLNSPAKIGNDEYNVVSRKSFESLTIGEIEKIRDNKIRSELLEQLKGFENDKEKIKNILSNYQINGGKIKRIRVLKKEARINIIEHEQLCLREKKLGITKSLIHKKGVVGGNSHIAIWELPKRNLEFFNILKYNEKNKKYKDLVNQLSPEKRIEFLDFIENKNGIKMFERFKNFQNQNDFWVAEDFSFAITCPTNLDNARLDLIKPHPSAKQIEKLYNGDMMTLIHKGGNVIANVAKLVPSNSGIALFLHLEATKDSKKQIWLSFSGFKNSKLTKIFITPSGKIHDSGPIFKENS

SEQ ID NO: 2466 - protein, 1172 aa, unidentified
  REGION 1..1172: note = Description of Unknown: Cas Enzyme sequence
MQKNYRLGLDLGTNSVGWATLALDQNNEPLKIIASGVRIFSDGREPQTGEPLAVARRIARGMRRRRDRFLSRKKTLMNYLIQINLMPKDEISRKKLELLNPYELRTKALYEELKPEELARAIFHLAQRRGFKSNRKEIKTESEIAVEDGEKKLKKENTKITDNDKREKLTKTIEESNSKTLGEFLYKQRLLENLSTRSKPDENALYATRKMYEDEFEIIKSYQQKFQKISEENWQRIHEIIFYQRPLKEQDKGFCRFLNKYKLEAKKLPIWAEDLLKNRDQKKYQFGLPRAYLALPSYCKFRILSEVNNLKIKNLRTREIIELTPQQKQQIIERLNSQKSQVKFSALKKLLSTKNISYVGDDFEFNLESNRREGLDANPTESLLKNEKYFGENWNNFSLQKQDEIVEYLLEEDDEIKIGNIALNEWKVNEIQAKNLTKLTINSFAKTSVGAMCKEILQKLCEEITNKNCLYHQALKNLGIDHSDEDYNDGLKTALTYYGEAIPASVVAVKPKLTKLKTTSSEEEQFGKIANPTVHVALNQLRKVVNSIIKDYGRPTEIHVELARNLKQTKDEKKQTVSQQKKNENENKEAKEFLNEFNQANNYENRLRYKLWKELNKDNCNDRKCIYSGEIISISKLFSPEFEIEHILPFSKTLDDSIGNKTLAHKSANNFKGNRSPFEAFGENKSNYNYDDILLRSKNLPRHKRWRFESIAMEKFNDENSFLASQLNDTRYLSKIARQYLSQICKKENINVANGKLTSIIRHSWGLNSILNNESESQNNAKENSKEKPKNPHKKNRDDHRHHAIDAICIAMTDRKLLQKISRDNSRGFDLTNLEIKLPNHWNSFREDAKEAIEKIVVSHKIDHGEGGKLHDETYYGVLNSPAKIGNDEYNVVSRKSFESLTIGEIEKIRDNKIRSELLEQLKGFENDKEKIKNILSNYQINGGKIKRIRVLKKEARINIIEHEQLCLREKKLGITKSLIHKKGVVGGNSHIAIWELPKRNLEFFNILKYIEKNKKYKDLVNQLSPEKRIEFLDFIENKNGIKMFERFKNFQNQNDFWVAEDFSFAITCPTNLDNARLNLIKPHPSAKQIEKLYNGDMMTLIHKGENVIANVAKLVPSNSGIALFLHLEATKDSKKQIWLSFSGFKNSKLTKIFITPSGKIHDSGPIFKENS

SEQ ID NO: 2467 - protein, 1031 aa, unidentified
  REGION 1..1031: note = Description of Unknown: Cas Enzyme sequence
MKHPIKYRLGIDLGTNSLGWCIVALNNKDLPERIARLGVRIFPDGREPIGGASLAAARRLARGMRRRRDRFLRRRARLMRLMIERDLMPKDPEARRSLRDLDPYELRRRGLNERLTPFEFGRALFHLNQRRGFRSNRRVNKEVNDQGKIATAVSGVRAQMAESGARTVGEWLAERHSRRDPVRARLHGQGARSSYELYVQRSMIEDEFDLIWSKQAPYDPALFNESTRALLRDALLFQRALRPVAPGRCPFESKEFRAPLALPTVQRFRMLQELNHLRYRSVGATESSLTLAERNRALNYLADAKSRSFEQLRQLLELPEASEFNLETAKRKGLKGCTTSVALRKVLGAGWDNLSATERDEITNFVVDVEDEATLVHLLSGQYGFSEQSAKAAASVRLDDQFGSLSLKAINKILPHLESDVRTYDQAARLAGYDHARRDEGGALSKLPYYAEYLAHYVGTGTYDPKDRPDKRYGRISNPTVHVGLNQLRQVVNAIIGKFGRPSQIVIELARDLKLSRRRKEELEKEQAENQRKADERRERLKELALPPTPGNMLRLRLWEDLASSPSDRRCPYSGDMISISRLFSDEIEIDHILPFAATLDDSANNKTISTRKSNRDKSKRTPVDAFGHSPGEYAWQAILDRAALLPPAKRKRFAPDALVQFSESGDFLARHLNDTAFLSRAAREYLAAICPTNKVWVVPGRLTAMLRSRWGLNTLLSSRNMKNRTDHRHHAIDATVVAVTDRALLQRMSSLSAAGAEGATARFLEGFDSPWDQFRNQLSFGLGKLVVSFKADHGVNSKLHNDTAYGIAGQHDSFEKPIEVVHRRPLSALKNERDLLKIRDEALRARLMPIAKDNQGKELIAALAKFSADTGIRRIRIVERLTVIPIADKDGHIYKGYKGDSNHSVLILQSRETGRWRDHVLSSFDAAGSSSPAAVGEVVMQLHVDDALRIQPESGGKELVRVVKISAGKITVASLTEGGALKERDADREDPFKYRTWSAATLQRLKAVAVVVDPLGQVWPLRRPGARTCS

SEQ ID NO: 2468 - protein, 1013 aa, unidentified
  REGION 1..1013: note = Description of Unknown: Cas Enzyme sequence
MRYRLGLDLGSTSLGWAMVRLDSSNRPCAIIKAGARIFSDGRNPKDGSSLAVTRREARSMRRRRDRLLKRKSRMLRSLVEHGFLPVDEVQRKSLVTMNPYALRAKGLDEALKPEEFGRALFHINQRRGFKSNRKTDKRDNDSGVLKNAISKLREALHAENCRSVGEWLHKRDCAKQTVRARYRQDKVVKEDGKIRIDKHYDLYIDRAMIEAEFDTLWRKQSEFNPKLFSDAARADLRDVLLHQRPLRPVKPGRCTLLPDEERAALALPSTQRFRIYQEVNNLRILRPSLKEEQLTLTQRDHLVAALEESSKRSFTQIKKAVGLGGAVQFNFEDPKRQELKGNMTTAILARSEHFGDSWHVFSESKQDEIVNQLVTEENEAKLIRWLQHETGVDERRAEAVANVGLPEGYGSLSAKALARILPELRRSVLTYDKAVLAAGFEHHSNISASASGEILPELPYYGIPLRRHVGFGTGNPEDNDERRFGRIANPTVHIGLNQTRLVVNALIKRYGHPSEVIVEVARELKQSKDQRDDENKRQAENQRRNLRLRSDIAGVLNLSPERIKTVDIQKMILWEELSSNIADRRCPYSGIQISAYMLLGEQVEIEHILPFSETLDDSLNNKTVALRTANRIKGNRAPWDAFGAQQISGFDYASILARAELMPKSKRYRFGEDAMQQWLKDDAGFLPRALNDTRHMSKVAREYLSLVCPQGTRVIPGRMTAMLRGKFGLNEVLGLHGEKNRNDHRHHAVDACVVAVTDQGLLQRFAAASASARERQLNRLVEDMPLPWANYLAHARRAIADIWVSHKPDHGYEGSMHNDTAYGLLGDGQVQFHKVIDGQRKRIKERLTVIEFSDARATERHGVLPNGMPRPYKGYKGDSNYCFEIVRSDAGQWQGEVVSTYDAYQLVRHHGLARVNSGTRSVSGKPLVFRLMIDDTVRLEVEGTVRTMRVATVSGNGQVFMAEVQEANVDARNRDKSDPFSYVSKMAGSFHRAKARRVTVSPIGELHDGGYRG

SEQ ID NO: 2469 - protein, 1044 aa, unidentified
  REGION 1..1044: note = Description of Unknown: Cas Enzyme sequence
MLHKMRYRLALDLGSTSLGWAMVRLNANQQPCAVIKAGVRIFSNGRNPKDGSSLAVTRREARSMRRRRDRLLKRKTRMMRTLIEYGFFPAEETQRKALENLNPYALRAKGLDEALTPSEFARALFHINQRRGFKSNRKTDKKDSDSGALKTAIKQLHSVLDPQGNDGKPRTVGELLYKRFTDISKPPKDRTVRARYRQAKTVKDDGKTKIDKYYDLYIDRAMIEQEFDALWNKQSELNPILFTENARADLKGVLLYQRSLKPVKPGRCTFMPDKERAPLALPSTQRFRMYQEVNNLRILCEGLKERPLTLQQRDDLIAALEKNNRRTFTQIKRLLGVGGAVQFNFEDPKREELKGNTTSAILGKSEHFGEAWFAFNEAKQDAIVLQLIKEENEARLVRWLQDETGIDEKCAEVIANAGLPEGYGSLCIEALARILPELRRDVVTYDKAVQAAGFAHHSKLRQNEEIPGITFKIESIDQGSGEIKEFHIHKELPYYGEYLQRHVGFGSGKPEDSIEKRYGKIANPTVHIGLNQVRVVVNALIKRYGHPSEIIVEVARDLKQSKDRRDEENKRQAENQKRNERLRKDIADILGISEERVRRDDIEKMILWEELSFDPADRRCPYSGVQISTVMLLSDEVEVEHILPFSQTLDDSLNNKTVAHRQANRIKGNRTPWEAFGTSNIPGFDYSGIQARAELMPKAKRYRFAEDGYQRWLKDDAGFLARALNDTRHLSKIAREYMSLICPNTRVIPGQMTAMLRRNFGLNDVLGLNGEKNRNDHRHHAVDACVIAVTDQGLLQRFATASASARERQLNRLVENMPSPWESYREHVQCAVENIWVSHRPDHSHEGAMHNDTAYGLRGNGKVGFHKVVDGRREYIEDNLKVIEIADAKAAKRHGWLPDGKPRPYKGYKGDSNYCIEIIRNEEGRWEGEVISTFEAYQLVRKHGTAQLQHPNLSISGKPLVMRLIRNDFVRLEHEGITRTLRVCKMRENGQVALADATEANVDARTRIKEISYVLKTGSSLQKAKARHVTISPIGRLCDPGFKG

SEQ ID NO: 2470 - protein, 1035 aa, unidentified
  REGION 1..1035: note = Description of Unknown: Cas Enzyme sequence
MLRKMHYRLALDLGSTSLGWAMIRLNAGNEPCAVIKAGVRIFSNGRNPKDGSSLAVTRREARAMRRRRDRLLKRKARMIQTLIEYGFFPAKEDQRKALEIMNPFALRAKGLNEALTPAEFARALFHINQRRGFKSNRKTDKKDNDSGALKTAINKLRETLKTENCRTVGEWLNKRDVAGLTVRARYHQDKTIKEDGKSKINKYYDLYIDRAMIEHEFDELWKKQAELNPTLFTEAARADLKDVLLHQRALKPVKPGRCTFMPDEERAPLALPSTQRFRMYQEVNNLRILRDGLKEESLTLNQRDDLIAALEENNKRTFTQIKKLLGLGGVVKFNFEDPKREELKGNTTSAILGKDEHFGSVWFKFDEAKQDAIVMQLFKEENEAKLLRWLQNETGIDEKRAETIANVGLPEGYGSLCALALARILPELRRDVVPYSDAAKAAGFHHSDTSNNQEVPGLTFPIELVVTETGEIKTKHIFHELPYYGEYLQRHVGFGSGKPEDSAEKRYGKIANPTVHIGLNQVRLVVNTLIKRYGHPSEVIVEVARDLKQSKDLRDEEGKRQAENQKRNKRIRTAIAGVLQTSEERVRRDDIEKMILWEELSFDPADRRCPYSGVQISAAMLLSDEVEIEHILPFSQTLDDSLNNKTVALRQANRVKGNRTPWEAFGAQSTAGFDYATILARAEHMPKGKRYRFAEDGYQRWLKDDAGFLPRALNDTRHMSKVAREYMSLICPNTRVIPGRMTAMLRGKFGLNDVLGLNGEKNRNDHRHHAVDACVIAVTDQGLLQRFAKASASAREQQLNRLVENMPLPWESYREHVERAIDAIWVSHKPDHSHEGAMHNDTAYGLLGDGKVSIHKMVEGKRERIEESLKVIAFTNAKANDRHGLLDNGEPRPYKGYKGDSNYCIEIIRNEKGKWEGEVISTFDAYQLVREHGVARLRHPTLSVSGKPLVMRLMKDETIRMVTNEKPITARVCWVRSDTRIAFASTSEANVDARDRDKNDSFSYIVKTASVLQKLQARRISISPTGELRDPGFKE

SEQ ID NO: 2471 - protein, 1016 aa, unidentified
  REGION 1..1016: note = Description of Unknown: Cas Enzyme sequence
MLHKMRYRLALDLGSSSLGWAMVRLNPSNQPCAVIKAGVRIFPDGRNPKDGSSLAVTRREARAMRRRRDRLLKRKARMIRMLIEHGFFPNAEAERKALATMNPYALRARGLDQALSPAEFGRALFHINQRRGFKSNRKTDKRDNESGALKTAIGKVRATLEAEGCRTVGEWLHKRDQAGQPVRARFRQNRLLREDGKTKIDKSYDLYVDRAMIEQEFDVLWTKQFQFNPALFNEAARAELKDTLLYQRPLKPVKPGRCTFMPDQERAPLALPSTQRFRMYQEVNNLRILRNGLKEDPLTLKMRDDLINALEKSSKRTFPQIKTLLGLGGAIKFNLEDAKRAELKGNATSAVLGKKEHFGPAWFDFDETKQDAIVWQLMKEENETRLVRWLQNETGVDEKQAEAIVNASLPEGYGSLCVQALGRILPELRRDVVTYDQAVQKAGFDHHSNLSPSATGEILPELPYYGELLQRHVGFGSGNPQDSDEKRYGRIANPTVHIGLNQVRVVVNALIKRYGHPTEVIIEMARDLKQSKKQRDAEHEQQAKNQKRNASMRTDIAHVLQISEHQVSRADIEKMILWEELNPDPADRRCPYSGKQIGLSRLFSDEVEIEHILPFSQTLDDSLNNKTVALRPANRAKGNRTPWDAFGAENQPGFEYGEILARAQKMPAAKRYRFGEDGYQRWLKDDAGFLSRALNDTRHMSRVAHEYLRLICPVTRAIPGRMTAMLRANFGLNYALGLNGEKNRNDHRHHAVDACVIAVTDQGLLQRFAKASASTREKQLNRLVENMPLPWNGYREHVQRAIDVILVSHKPDHSHEGAMHNDTAYGLHGQGTVRTHKVVDGQRTLIEENLKVIEIANAKTEYRHGMLPDGTPKPYKGYKGDSNYCMEIVRDEKGKWKGEVISTFEAYQLVRKYGVSRLRHPTVSVSEKPLVMRLMINDAVRLEINGQVRTMRVAKLSGNGQIYMAGINEANVDARNRAKEDEFAYLSKMAGSMQSAKARRINVSPIGELRDPGFVG

SEQ ID NO: 2472 - protein, 1016 aa, unidentified
  REGION 1..1016: note = Description of Unknown: Cas Enzyme sequence
MPALRYRLALDLGSTSLGWAMIRLNAENKPCAVIKAGVRIFSDGRNPKDGSSLAVTRRDARSMRRRRDRLLKRKARMIRSLVEHGFFSSDEAERKALVTLNPYALRAKGLDAALTPAEFGRALFHINQRRGFKSNRKTDKKDNDSGALKTAISKLRESLKTENCRTVGEWLHKRDVADLTVRARYRQNKVIKDDGKTRIDKSYDLYIDRAMISDEFDALWRKQAELNPTLFTEAARADLKDVLLHQRPLKPVKPGRCTFMPDEERAPLALPSTQRFRMYQEVNNLRILRAGLKEEPLSLQQRDDLIKALEANSKRTFTQIKTLLKTGGAAQFNFEDPKRQELKGNVTSAILGDKKHFGAAWFTFSEAKQDDIVLQLIKEENEAKLVRWLQDQTGIDEDRAETIANAGLPEGYGSLCTKALARILPELQRDVVTYDKAVLAAGFDHHSNISAAATGEILMALPYYGIPLQRHVGFGTGKLEDSDEKRYGKIANPTVHIGLNQIRLVVNALIKRYGHPSEVIVELARDLKQSKDQRDDENKRQAENQRRNIRLRADIAGTLGISPERVRMADIQKMILWEELSSNIADRRCPYSGVQISAAMLLSDQVEIEHILPFSETLDDSLNNKTVALRQANRVKGNRTPWAAFGAQPTAGFVYADMLARAEQMPKAKRYRFGEDAMKQWLKEDAGFLPRALNDTRHMSKVAREYMSLVCPQNTRVIPGRMTAMLRAKFGLNDVLGVDGLKNRNDHRHHAVDACVIAVTDQGLLQRFAQASASAREQHLNRLVENMPLPWDNYREHVQRAISNIWVSHKPDHSHEGAMHNDTAYGLLGGGRVSVHKTIDGQRERIVDNLKVIEFTNAKAGARHGLLPNGDPRPYKGYKGDSNYCIEIIRNEKGKWEGEVISTFEAYQLVREHGVARLRHSTLSVSGKPLVMRLMIDDSVRLEIDGALRTMRVASVNTAGRLSLAAHQEANVDARNRDKDGDWRYTYKQSGSLQSAKGRRVSISPAGEIRDPGFQS

SEQ ID NO: 2473 - protein, 1019 aa, unidentified
  REGION 1..1019: note = Description of Unknown: Cas Enzyme sequence
MPQMRYRLALDLGSTSLGWAMVRLNTENPPAPVAVIKAGVRIFSDGRNPKDGSSLAVTRREARAMRRRRDRLLKRKARMMHTLIAHGFFPKDVAARKILETLNPYELRSKGLSEALRPEEFARALFHLNQRRGFKSNRKTDKKDNDSGALKTAINRLRETLKTENCRSVGEWLHKRQANGQTVRARYHQRRIEKEDGKNRIDKSYDLYIDRAMIEAEFDTLWAKQTELDPHVFNETARAELKDCLLYQRPLKPVRPGRCTLLPEHERAPLALPSQQRFRIYQEVNNLRILRDGLKEEPLSKMQRDQIVTALEQNTKCSFIKIRKLLGLDSTVQFNFEDPKRQELKGNGTNIILSKPEHFGSQWFQWSEHQQDQIVMQLITEENLTRLIDWLQKETGIDEAKAEKIAEASLPEGYGSLSIQALTKILPVLRQELVSYDKAVLAAGFAHHSLINHAHTGEILSSLPYYGQYLQRHVGFASPDAKPSDSPEKRYGKIANPTVHIGLNQIRTVVNAIIQRYGHPTEVIIEVARELKQNREQRKEEIQHQANNQKRNERLRADAAQILECAPERVRHADIQKLILWEELNLKDSANRCCPYSGIQISAHMVLSDQVEIEHILPFSQTLDDSLHNKTVALRQANRIKGNRTPWEARDDFAAQGWDYEAILERAKQMDRRKAYRFGEEGYQKWLKDDKSFLARALNDTRYLSRVAREYLSLICPQATRVIPGQMTAMLRRQFGLDNILGSNSEKNRNDHRHHAIDACVIAITDQGMLQRFAKASASTKEKQLNRLVEAMPLPWTTYREHVARAIQHIWVSHKPDHGHEGAMHNDTAYSLLGEGRVSVHKIIDGKRQREVSVLKVIEFTDAQASQRHGVLADGSPRPYKGYKGDSNYCIEIVRNEKGKWEGEVISTFQAYQLVRQHGLQRLTHSSLSASGKPLVMRLIRNDCIRIKQNGLYRTLRLCKMRAEGQMGFADLNEANVDARTRSKELSYVLKSAGSLQISQARRVAISPIGELRCVGFKV

SEQ ID NO: 2474 - protein, 974 aa, unidentified
  REGION 1..974: note = Description of Unknown: Cas Enzyme sequence
MQALIRLGFFPEQEQARAQLTSLDPYELRQRGLDEKLRPEEFARALFHLNQRRGFKSNRKADKKDSDSGLLKQAISKMRERLATDSARTVGEWLAHRHAKRESVRARLRGTTVKDKAYDFYVDRGMIEAEFDALWARQAELQADIFTEPKRAELKDILLHQRLLKPVRPGRCTLIPEEERAPLALPSVQRFRLYQEVNNLRILTGSLQETVLTRDQRDTVISLLESKGEATFASIRKMLKLPGATTFNLEDAKREKLKGNTTSALLAKPDYFGVAWRGFDHVRQETIVSKLLDEASESALIAWLQQETGIDEAHAENIANARLADGYGNLGRTAISRILPLLQAEVLTYDKAAVAAGFSSHSALSHAEGTGEIMTELPYYGEALQRHVGFGTGVPEDPAEKRYGRIANPTVHIGLNQVRIVVNALIKRYGHPAEVVVEVARELKQGREKRLELQKEQKARQDQNERWRAEIKAATGIDAKPLDLQRMRLWVELNPHDVANRCCPYTGEPISIARLFSEEVEVEHILPFARTLDDSLNNRTVALRRANRDKCNQTPFEAFGHSPPGYDYAAVLERARSMPREKAKRFAPDAYEKWLRDDKDFLARALNDTAYLSRVAKEYLSLVCPPNRVRAIPGRLTAMLRGKFELNSALSGNATKNREDHRHHAIDAAVIAVTDQGLLQRFARANRDAQERGLHRLVEDMPLPWPRYRMQVINAIERVLVSHKPDHGYQGGLHNETALGLRGGGMVAHRVPIDRFTGTEAIEKAVFADANAQRWLLENTRGLAGKELAIRLQELSRRSRHVRVLEKLKVLAFTSKKANGRHGVDDDGQPAAYKGYQGNSNYCIEIVLNEKGKWEGDVISTFDAYQIVAKHGESALRAPARSRSGLPLVMRLMINDTVVMEVDGHPAAYRIAVIPGSGQMSFAQVNEANVDSRNRDKADTFKYITKYPGSLMVARGRRATISPIGALNDPGFTD

SEQ ID NO: 2475 - protein, 1012 aa, unidentified
  REGION 1..1012: note = Description of Unknown: Cas Enzyme sequence
MQKMRYRLALDLGSTSLGWAMVRLDSQTEPCAVIKAGVRIFSDGRNPKDGSSLAVSRREARAMRRRRDRLLKRKNRMMATLLRHGFFPQDETARKALEKTDPFALRAKGLDQILLPEEFARALFHINQRRGFKSNRKTDKKENDSSALKKAIGQLREAMQDTGCRTVGEWLYARHQQGLSVRARYRENRITKDDGKTKIEKSYDLYIDRAMIEAEFDALWAKQSELNPTRFHDTARAELKDCLLHQRPLKPVKPGRCTLLPDEERAPLALPSQQRFRIYQEVNNLRLLREGLSEESLTLAQRDQLAQALETNTKRSFTQIQKLLGFSGQFNLQDEKRTELKGNSTSAMLSKKEFFGSQWVSFDEAQQDAIVMQLVSEENEARLIAWLQTETGVDEITAERIANLPLAEGYGSLSAKALETILPALRGEVITYDKAVLAAGFDHHSHISHAATGEILPELPYYGQYLQRHVGFGTGKPEDPAEKRYGKIANPTVHIGLNQVRTVVNALIKRYGHPSEVIVELARDLKQSQEQRKEEQKRQADNQRRNERMRSVIADLLNTSPDRVRTSDLQKMILWEELSFNVADRRCPYSGVQISAQMLFSDQVEIEHILPFSQTLDDSLNNKTVAMRQANRIKGNRTPAEAAADFETQGWPAAEMLQRASLMPKGKRYRFAQDGLEQWLREDKGFLARALNDTRHLSRVAREYLSLICPQGTRVIPGRMTAMLRAKFGLNDILGLDGEKNRNDHRHHAVDACVIAVTDQGLLQRFAKASASAREKQLNKLVETMPLPWPSYRDHVQRAIQNIWVSHKPDHGHEGAMHNDTAYGLLGGGRVQVRKWVEGARTREISALKVIEFSDASASARHGLLPNGEPRPYKGYKGDSNYCMEIVRNEKGKWEGEVVSTFEAYQLVRQYGLTRLRHPALSVSARPLVMRLMIGDSVGIEMEGLRKIYRLSYMASAGTMAFSECHESNVDKRTRTKELSYLFKTAGSLQKSKGRRVAISPAGELKDTGFSG

SEQ ID NO: 2476 - protein, 1009 aa, unidentified
  REGION 1..1009: note = Description of Unknown: Cas Enzyme sequence
MRYRLALDLGSTSLGWAMVRLDSKNETCAVIKAGVRIFSDGRNPKDGSSLAVSRREVRAMRRRRDRLIKRKNRMVQTLLRHGFFPQDELARKALETKDPFALRAKGLDVALLPDEFARALFHINQRRGFKSNRKTDKKENDSGALKTAISQLRLAMQTTGCRTVGEWLNARHQQGLTVRARYRENRITKDDGKTKIEKSYDLYIDRAMIESEFDALWAKQSELNPALFNDTARDEIKDCLLHQRPLKPVKPGRCSLLPDEERAPLALPSQQRFRIYQEVNNLRLLREGLSEEPLTLTQRNQLVQALESNSKRSFTQIQKLIGFSGQFNLQDEKRTELKGNSTSALLAKKDFFGSQWGSFDEALQDAIVMQLVTEENEARLIAWLQNETGIDEITADRIANAPFAEGYGSLSAKALGKILPALRAEVITYDKAVLVAGFDHHSHISHAATGEILPVLPYYGEYLQRHVGFGTGKPEDSAEKRYGKIANPTVHIGLNQVRTVVNALIKRYGHPSEVIVELARDLKQSQEQRKDEQKRQADNQRRNQRMRADIADLLHTSPERVRTAELQKMVLWEELSFNVADRRCPYSGVQISAQMLFSDQVEIEHILPFSQTLDDSLNNKTVAMRQANRIKGNRTPAQAVADFEAQGWQADDMLARASLMPKGKRYRFAQDGLEQWLREDKGFLARALNDTRHLSRVAREYLSLICPQDTRVIPGRMTAMLRAKFGLNDILGLNGEKNRNDHRHHAVDACVIAVTDQSMLQRFAKASASAREKQLNKLVETMPLPWERYRDHVQRAIDNIWVSHKPDHGHEGAMHNDTAYGLLGGGRVQLRKTVEGVRTREITALKVIEFSDASASTRHGLLPNGEPRPYKGYKGDSNYCMEIVRNDKGKWEGEVVSTFEAYQLVRQHGLARLRHPALSLSGKALVMRLLRNDTLRLDHNGVQRTVRICKMTAEGVIALADTSESNIDARTRAKEISYIFKTAGSLQKSSGRLIAVTPIGELRDPGFSD

SEQ ID NO: 2477 - protein, 1027 aa, unidentified
  REGION 1..1027: note = Description of Unknown: Cas Enzyme sequence
MVFIHKFEMTGKTMNQMRYRLALDLGTTSLGWAMARLNPQDEPCAVIKAGVRIFSDGRNPKDGSSLAVSRREARAMRRRRDRLLKRKNRMMATLLWHGFFPQDEAARKALEKTDPFALRAKGLDQALLPEEFARALFHINQRRGFKSNRKTDKKENDSGALKTAIGQLRQAMQTTGCRTVGEWLFARHQQGLSVRARYRENRIAQDNGKTKIEKSYDLYIDRAMIEAEFDALWAKQSELNPALFHDTARDELKDCLLHQRPLKPVKPGRCTLLPDEERAPLALPSQQRFRIYQEVNNLRLLREGLSEEPLTLTQRDQLVHALETNSKRSFTQIQRLFGFSGQFNLQDEKRTELKGNSTSAMLAKKEFFGIRWASFDEVQQDAIVMQLVTEENEARLITWLQSETGVDEVTAERIANVPLAEGYGSLSAKALEKILPALRAEVITYDKAVLAAGFDHHSHISHAATGEILADLPYYGQYLQRHVGFGTGKPEDPAEKRYGKIANPTVHIGLNQVRTVVNALIKRYGHPSEVIVELARDLKQSQDQRKEEQKRQADNQRCNERMREDIAKLLHTSPERIRAIDLQKMILWEELSFNVADRRCPYSGVQISAQMLFSEQVEIEHILPFSKTLDDSLNNKTVAMRQANRIKGNRTPAQAAADFATQGWPIEDMLQRASFMPKGKRYRFAPDGLEQWLREDKGFLARALNDTRHLSRVAREYLSLICPQDTRVIPGRMTAMLRAKFGLNDILGLDGEKNRNDHRHHAVDACVIAVTDQGMLNRFAQASASAREKQLNRLVETMPLPWDSYRDHVQRAIDNIWVSHKPDHGHEGAMHNDTAYGLLGGGKVQVRKTLDGVRTREIAALKVIDFADAHATARHGLLPNGEPRPYKGYKGDSNYCMEIVRNEKGKWEGEVVSTFEAYQLVRQHGLSRLRHPALSVSGKPLVMRLMKDDCVKLTVDGVTDLYRVCWIRTDTRLAFAKINEANVDARDRDKSTNFSYLVKSASVLKSMAAQGVVISPIGFVTDRSVKI

SEQ ID NO: 2478 - protein, 1028 aa, unidentified
  REGION 1..1028: note = Description of Unknown: Cas Enzyme sequence
MPKMRYRLALDLGSTSLGWAMVRLNPQDEPCAVIKAGVRIFSDGRNPKDGSSLAVTRREARAMRRRRDRLLKRKNRMMTTLLRHGFFPQDEDARKALEKTDPFALRAKGLDQALQPEEFARALFHINQRRGFKSNRKTDKKENDSGALKTAISQLRQAMQAIGCRTVGEWLFARHQQGLSVRARYRENRIAQDNGKTKIEKSYDLYIDRAMIEAEFDALWAKQSKLNPALFHDTARDELKDCLLHQRPLKPVKPGRCTLLPDEERAPLALPSQQRFRIYQEVNNLRLLREGLSEEPLTLSQRNQLVHALETNSKRSFTQIQKLLGFSGQFNLQDEKRTELKGNSTSAMLSKKEFFGSQWVSFDEARQDAIVMQLVTEENEARLIAWLQAETGVDDITAERIANAPLAEGYGSLSAKALETILPALRAQVITYDKAVLAAGFDHHSHISHAATGEILPELPYYGQYLQRHVGFGTGKPEDPAEKRYGKIANPTVHIGLNQVRTVVNALIHRYGHPSEVIVELARDLKQSQEQRKEEQKRQADNQRRNERMRNDIANVLHISPERVRAIDLQKMILWEELSFNVVDRRCPYSGVQISAQMLFSDQVEIEHILPFSKTLDDSLNNKTVAMRQANRIKGNRTPAEAAVDFAAQGWPIEDMLQRASLMPKGKRYRFAPDGLEQWLREDKGFLARALNDTRHLSRVAREYLSLICPQGTRVIPGRMTAMLRAKFGLNDILGLDGEKNRNDHRHHAVDACVIAVTDQGLLNRFAQASASAREKQLNRLVETMPLPWANYREHVARAIHNIWVSYKPDHGHEGAMFDETIYSATGDSKSAAKTRNVIPFFPRQQSSIAVLKRHQALGDAKPYKGLLSNSNYCIEISKTETGEWLGEVLRTYDAYQVVRKFKTVEEGVRHLRNTKMTMSQRPLLMRLMINDYIRAKVDGDWVILQVLKINSSGSVTFIKPNETNIGARYMAKLAAQKSQKNGETYDPWALDDNFFQRAFSATSLQSSQARQIAISPIGDLRDPGFIG

SEQ ID NO: 2479 - protein, 1014 aa, unidentified
  REGION 1..1014: note = Description of Unknown: Cas Enzyme sequence
MHKMKYRLALDLGSTSLGWAMIRLDGDSAPSAVIKAGVRIFSDGRNPKDGSSLAVTRRDARSMRRRRDRMLKRKSRMIRTLVEHRFFSADVTARKTLLTLNPYTLRAKGLDAALTPEEFGRALFHINQRRGFKSNRKTDKSASDTGALKTAISKLRESIKAENCRTVGEWLHKRDAADLTVRARYRQTTGVNDAGRTKIDKSYDLYIDRAMIEDEFDVLWRKQAELNPMLFTVAARDDLKDVLLHQRPLKPVKPGRCTFMPDEERAPLALPSTQRFRMFQEVNNLRILRPGFKDEPLTIAQRNELISALEANPKRTFTQIKKLLQTGADVQFNFEDPKRQELKGNITSAIMSKATHFGPSWFEFDEEKQDEIVLMLVQEESEAKLVRWLQENTGLDEGRAEVIANAALPEGYGSLCAKALARILPELRRGVITYDKAVLAAGFDHHSNISAAATGEILMELPYYGQALQRHVGFGTNNPSDSDEKRYGKIANPTVHIGLNQVRLVVNALIKRYGHPSEVIVEVARDLKQSKAQREEENKRQAENQRRNLRMRSDISEVLRISPERVRIADLQKMILWEELSNDVADRRCPYSGVQISAQMLFSDQVEIEHILPFSETLDDSLNNKTVAIREANRIKGNRTPWAAFGEKSNTGFDYAGILERAQLMPRSKRYRFGEEAMSQWLKDDAGFLPRALNDTRHMSKVAREYLSLVCPQNTRVIPGRMTAMLRAKFGLNDVLGLNGEKNRNDHRHHAVDACVIAVTDQGLLQRFAKASASAREQQLDRLVESMPLPWDTYRAHVKRAISNIWVSHKPDHSHEGALHNDTAYGLLGNGQVRVHKIVDGKRQRVDASLKVIEFTNAKASDRHGLLPSGELRPYKGYKGDSNYCIEIIRNDKGKWEGEVVSTFEAYQLVRMHGLNRLRHPTMSASGKPLVMRLIKDDFVRLKHDGEIRTLRVCKMSGDGTLAMSDITQANVDARTRLKELSYVFKTAGSLQKSEARRITISPIGILLDPSFRD

SEQ ID NO: 2480 - protein, 1000 aa, unidentified
  REGION 1..1000: note = Description of Unknown: Cas Enzyme sequence
MVRLDTHDDPVAVIRMGVRIFSDGRNPKDGSSLAVTRRQARQMRRRRDRLLKRKAQLVSALTRLGLFPADEKARKALANLDPYVLRKKGLYEPLTGPEFARALFHINQRRGFLSNRKTDKKDNDSGVLKKAIKDLHEKLQMENCQTLGEWLANRHANLMSVRARLRGKTQKDKAYDFYASRSMIEHEFDTLWAKQSTYNPTLFNGPARDELKDILLFQRPLKPVKPGRCTLIPDEERAPLALPSAQRFRIYQELNNLRILTSDLREQSLTLEQRDAVAALLERSDVTFTKMLKALKLPSITKFNLEDIKRDRLKGNATAYNLSKEHHFGARWFEFPAEMQDTIVDKLLNEGSESALVNWLAAETGVDEAAAERIANTNLPEGFGNLGRTAISRVLPQLMKEVVVYSVAVQRAGFDSHSALSHAEQTGEVMDALPYYGDPLQRHVGFGTGEPSDPPEKRYGRIANPTVHIGLNELRKVINALIGHYGHPSEIVGEVARELKLSRQRKLELQREQKERQDLNEKQVTEACAALGLTPDNLDKSKRRELSQKMQLWGELNPKDAANRRCPYTGEQISINQLLSDEVEIEHILPFSMTLDDGMNNKTVAFRRGNRMKGNRTPYEAFGKEPISGYDYDAILERAKLMPREKAKRFAPDGYERWLKEDKDFLARALNDTAYLSRIAKEYLSLVCPPNKVRVIPGRMTALLRGKFGLNSLLSGSGLKNRDDHRHHAIDAAVVAVTDQGLLQRFAEASASARDRQLDRLVDQMPLPWPTYRDHVERAVNNITVSFKPDHGYQGAMHEETAWGLAADGQATRRVRPEDGGPRQREIQKKNLILINSTRDRERHGLDDDGNPLPYKGYVGGNNYCIEIWRDEKGRWNSDVISTYKAYQVVKELGEKHGVRKLRDPATTLSGKPLVMRLMIDDLVRFEANGDAGTMRVVKIGGNGQVFFAEHHEANVDARNRSKDDPFTYVSKTAGSLQKAKGHRVVVSELGNVRDPGFKE

SEQ ID NO: 2481 - protein, 1019 aa, unidentified
  REGION 1..1019: note = Description of Unknown: Cas Enzyme sequence
MLPKLRYRLALDIGTSSIGWCLLKINTDYQPQAIIKMGVRIFSDGRNPKDGSSLAVTRREARQMRRRRDRLLKRKSRLLDALIKYNFFSKDPAVRQSSVNLDPYQLRKKGLYEKLAPHEFGRAVFHINQRRGFLSNRKTDKKDNDSGALKQAIIKLREKLDQEQCQTLGEWLAKRHDQGLSVRARLRGTTQKDKAYDFYADRAMIEHEFDTLWEKQKGFDSVLFNEAARVGLKDVILFQRNLKPVRPGRCTLIPEEERAPLALPSTQLFRIYQEVNNLRILSENLSETRLSKIQRDQVVSLLNLKNKVTFKAISKALKLSSSTSFNLEDVKREFLKGNNTAAILSKDDLFGEVWHSFDLSQQDIIVDRLLNEPSEKIAISWLMNKFNLDETTAEKITNVSLPEGYGSLSKAALDKILPELINTVVTYDKAVIAAGFESHSALSYSQSTGEIMESLPYYGDPLRRHVAFAKDNPRNDEERFGKIANPTVHIGLNELRKVVNALLKRYGHPSEVIVEVTRDLKLSREKKLELQREQKVKQDYNEKLLKEACDVLKLNLDTLDRSKRRDLSQKMQLWVELNPNDPTNRCCPYTGEHLNIAKLLSNEVEIEHILPYSKTLDDSLNNKTVCMSRANRIKGNDTPYEAFGAKTELGYDYSTILHRASLMSKNKGKRFAEDGYQRWLKEDKDFLARALNDTAYLSRIAKEYLSLICPPNRVRAIPGRMTALLRGTFGLNQLLSGDTSKNRNDHRHHALDAAVIGVTDQGLLQRFSQANAKAKSLQLTRLVENMPLPWETYREHVEKGLSTIIISHKPDHGYQGAMHEETAWGIRGDGVVTRRIHEVDSDQRTREFANKKLVEISSTKNITRHGLDSSGQLISYKGYVGGSNYCLEIWHDEKGKWHSDVISTYEAYQVVRKLGEVDGSKRLNHPILSQSEQPLVMRLMINDYVKLKIDGSDKIMRVVKIAGNGQVFLASHREANVDARNRDALDPFNYISKMAGSLKTANAYKVTVSPIGKVNILGH

SEQ ID NO: 2482 - protein, 1085 aa, unidentified
  REGION 1..1085: note = Description of Unknown: Cas Enzyme sequence
VRKFHVVKEIVLESPTRSGEITMLHKMRYRLALDLGSTSLGWAMIRLNADNEPCAVIKAGVRIFSNGRNPKDGSSLAVTRREARAMRRRRDRLLKRKARMMRTLIEYSFFPSEESERKALETMNPFALRAKGLDAALTPAEFGRALFHINQRRGFKSNRKTDKKDNDSGALKTAINKVRATIEAEGCRTVGEWLNKRDVAGQTVRARYRQNKIIKDDGKTKIDKSYDLYIDRAMIEHEFDELWKKQAELNPALFTEAARADLKDVLLHQRPLKPVKPGRCTFMPDEERAPLALPSTQRFRMYQEVNNLRILRDGLKEEPLTLRQRDDLIAALEAHNKRTFTQIKKLLGVGGAAQFNFEDPKREELKGNTTSAILSKDEHFGSAWFTFDEAKQDTIVLQLVKEENEAKLIRWLQDETGIDEKHAQAIANVGLPEGYGSLCALALARILPELRRDVVTYDKAVQAAGFDHHSRLNPYAEIPNITFKIESIDQDSGEIKQFHIHKELPYYGEYLQRHVGFGSGKPEDVPEKRYGKIANPTVHIGLNQVRLVVNALIKRYGHPSEVIVELARDLKQSKDQRDEENKRQTANQNRNKRLRTSIAEVLRISEERVRRDDIEKMILWEELSFDPADRRCPYSGAQISTAMLLSDEVEIEHILPFSQTLDDSLNNKTVALRKANRVKGNHTPWEARLEFANQDWDYAAILARAEQMPKAKRYRFAEDGLQRWLKDDAGFLPRALNDTRHMSKVAREYMSLICPNTRVIPGRMTAMLRGKFGLNDVLGLNGEKNRNDHRHHAVDACVIAVTDQSLLKKFADASASTRERQLNRLVENMPTPWGTDGDKKYLKSVKHAIENIWISHRPDHAYQGGIFDATIYGLRGKGKATYRQEVDGKRQRPILNREVVAFADDKAKSQNGYRHGLLEDGSPKPYMGLWSRSNYCIEIIKTENGEWSAEVIERYRAYQIVAEFGEARLRHPTLSISGEPLVMRLLIDDYVRAKIDGKTQLLCVLKINSTGAITFVLHNESNISARYTAKLAAQKAQREEKPFNTSALEDNFFQKSISSDSLRSFKARRVSISPIGELHDPGFKD

SEQ ID NO: 2483 - protein, 1016 aa, unidentified
  REGION 1..1016: note = Description of Unknown: Cas Enzyme sequence
MLHKMHYRLALDLGSTSLGWAMIRLNTNNEPCAVIKAGVRIFSNGRNPKDGSSLAVTRREARAMRRRRDRLLKRKARMLRTLIEYGFLPSDEMQRKALVTMNPFALRAKGLNEALTPAEFGRALFHINQRRGFKSNRKTDKNDNDSGALKTAINQLRETLKTENCRTVGEWLNKRDVAGLTVRARYHQDKVIKYDGKAKINKYYDLYIDRAMIEHEFDELWKKQSELNPVLFTETARDDLKDVLLHQRPLKPVKPGRCTFMPDEERAPLALPSTQRFRMYQEVNNLRILREGLKEEPLTLKQRDDLIAALEKNNKCTFTKIKKLLGVGGSAQFNFEDPKRMELKGNTTSAILCKDGHFGPAWFKFNEAKQDAIVLQLVKEENEARLVRWLQDETGVDEKRAEAIANVGLPEGYGSLCALALARILPELRCNVVTYDKAVQAAGFDHHSHISPSATGEILLELPYYGEPLQRHVGFGSNDPKDNNEKRFGKIANPTVHIGLNQIRLVVNALIKRYGHPCEVIVEVARDLKQSKVQRDEDSKRQALNQKRNQRLRTDIAGVLQISEERVRRDDIEKMILWEELSFDPADRHCPYSGAQISAAMLLSEAVEIEHILPFSQTLDDSLNNKTVALRQANRIKGNRNPWEARNDFASQGWDYADILARAEHMPKGKRYRFGEDGYQRWLKDDAGFLDRALNDTRHMSKVAREYMSLICPDTRVIPGRMTAMLRAKFGLNDVLGLNGEKNRNDHRHHAVDACVIAVTDQGMLQQFAKASANAREQQLNRLVDNMPLPWERYREHVQRAINAIWVSHKPDHSHEGAMHNDTAYSLLGEGKVSVHKMVDGRRERIEESLKVIAFTNAKANDRHGVLENGEPRPYKGYKGDSNYCIEIVRSEKGKWEGEVISTYDAYQLVRKQGAAQLRHPTLSVSQKPLVMRLMIDDVVRLNVDGHIRTMRIAKLSGNGQVFVVDTNEANVDARNRNKEESFAYISKYAGSLQKANARHATISPIGEIRTPSFKG

SEQ ID NO: 2484 - protein, 1008 aa, unidentified
  REGION 1..1008: note = Description of Unknown: Cas Enzyme sequence
MSKMRYRLGIDLGTTSLGWVLIRLDSENKPCAVIKTGVRIFSSGRHPKTGASLAADRRLARSMRRRRDRLLKRKARMMRFLIDHGFFPKDAASRKKLEVLNPLQLRAEGLIRQLTPAEFARAIFHLNQRRGFKSNRKTDAADSDDSVMKSAIQKVRQELAQDGFKTVGQWLFDRQQKGQLVRARRREISVAGENGRNKIHKSYDLYIDRAMIEDEFDALWEKQSSLNPEVFNEKARHDLKDTLLFQRKLKPVIPGRCTLIPENYRAALALPSVQKFRIYQELNNLQIINSDLTTTLLTKEQRDIVAQTLDRKKELSFGAIRKLLHISEKFNLEDVKRDRLKGNLTNAILSNKDYFGAEWFNIAPELAAKIVEKLINEESLDELRKWLSSNTPVSQDNLDNICQVSLVSGYGNLSSEAIDKILPFLESEVITYDKAVVQAGFDSHSQLAHSSTGEVLPLLPYYGEYLSRYCGMGSGDPSDSLEKRFGKIANPTVHIGLNQVRVVVNKLIEKYGHPDEVVIELARDLKNSQKQKEEEHKRQAENAKRNRQFREKIASLLQIQESEVKRSDLEKMILWHELDPTNETNRRCPYSGVQISLTKLYSSEIEIEHILPFSRTLDDSLNNKTVSTREGNRIKGNMTPWEAKAAFAARGWSYDDILVRVGAMPLNKRGRFASDGYEKWLKTSEGFIARALVDTQYMSKVAKEYLSLICPHNTRAIPGRMTALLRAKFGLNKILSENGLKNREDHRHHAVDACVIAVTDQRLLQRFAQASASAREHQLERLVESMPEPWEDYAEHVSRSVASLKVSFRPDHGHQGAMHNATAYGLAEEGNVYYRKVVDGVRVRHVEKLDVIKIVNKQQSSRYGSLPDGSPKPYKGYLGDSNYCIDIVKEANGKWVGEVISTFEAYQYFRDMQNSTSELSKLSFSGKPLIMRLIRNDTVKLVHDNQSQYLRLCKVSQSGTMSFISLNESNVDARCRQKELAYIFKTAGSLQKSKCRKVMVNPIGETCK

SEQ ID NO: 2485 - protein, 1031 aa, unidentified
  REGION 1..1031: note = Description of Unknown: Cas Enzyme sequence
MPVTYRLALDLGSTSLGWAVLRLDPAALEPIAIIKAGVRIFSDGRNPKDGASLAVTRRAARAMRRRRDRLLKRKARMQDKLVKHGFFPSAMDERKALERLDPYALRAKGLREALTPGEFARALFHINQRRGFKSNRKTDKKDNDSGALKKAISHLRQQMEAGGHRTVGEHLWSRLQQGLGVRARYRETPFTNDEGKKRIDKSYDLYIDRAMIEQEFDALWAAQAAFSPALFHEAARADLKDTLLHQRRLRPVKPGRCTLLPEEERAPLALPSTQRFRIYQEVNHLRLLDENLREVALTLAQRDAVANALESKARLTFEQIRKLLKLSGSVRFNLEDAKRTELKGNTTSAALARKELFGAAWGGFGEALQDEIVWQLVTEEGEGALIAWLQAHTGVDEARAQAIADASLPEGYGSLSRKALARIVPALRAGVITYDKAVQAAGFDHHSQLGFEYDASEVEDWVHPDTGEIRPVFKQLPYYGKPLQRHVAFGSGKPEDPDEKRYGKIANPTVHIGLNQVRTVVNALIRRYGRPTEVVIELARDLKQSREQKVEAQRKQAENQRRNARIRKSIAEVLGIGEEQVRGADIQKWICWEELSFDVADRRCPYSGVQISARMLLSDEVEIEHILPFSKTLDDSLNNRTVAMRQANRIKRNRTPWDARADFGAQGWSYEGILQRAERMPLRKRYRFAPDGYERWLGDDKDFLARALNDTRYLSRVAAEYLRLVCPGSGTRVIPGQMTALLRGRFGLNGVLGLDGEKNRNDHRHHAVDACVIGVTDQGLMQRFANASAQARKDGLTRLVDDMPRPWLTYRAHVERAVRHIWVSHRPDHGFEGAMMEETSYGIGKDGSIKQRRKADGSPGREITNLIRIHEAMQLQRHGAGPDGQPLPYKGYVGGSNYCIEITMNDKGKWEGEVISTFRAYGIVRTSGLGQLRHPRMGQNGRELVMRLVIGDSVRLEIDGIECTMRVVKISGSNGQIFMAPIHEANVDARNSDKQDTFAYTSKYAGSLQKTKARFVTISPIGEVRDLGFKG

SEQ ID NO: 2486 - protein, 1109 aa, unidentified
  REGION 1..1109: note = Description of Unknown: Cas Enzyme sequence
MTTSPLRYSFDLGTNSIGWAVYRLDRNPDEAVASVCELLGAGVRVISQGVAEAGRDVKGASLAEARRIPRSARKRRDRFVMRRVTLIKQLIGLGLLPDDHEARRALADLDPYQLRAEGLDRRLEPHEVGRALLHINQRRGFRSNRRADRKVKPDDKGKIATGIDRLATELAASSARTFGEYLWRRHGGKDGQATPRTRHAVRIRIEGEGTKALYAVYPSRQMLIDEFDALVAAQAVHHPSQLTPEVIADIHETIFHQRHLKPVEVGRCTFVPEERRLPRALPSVEARVIYETLNQLRFGTGLKLETKLTPEQRDVLALTLLRGENVTFRQLRKLVGIGDEVPISLEEAGKKDLDDYRSRSASLAWRKLNRKERQELFGERWFAMSLSERDDIVKCLIETEDEQAVIDWLVSDYKLPPGSARGAAAWMPPDGHARLGRTANNAVLAELKALDLPTYAEAVKRAGWHHSDERDGVIELPLPYYGQVLERHVLFGSGDPEHEPVQRYGRFPNPTAHIALNQLRRVVNLLARNYGPPSQIVLELARDLKMNKEQKEEAKAKNRENRTIRDRHRQNLAEYQQHETADNFLRLRLYEEQKRAGGGVVKCPFSLKPIEINQLFSSEIEIEHILPWSRTFDDSAANKVVCFRDENRLKRKQTPHEAFGNDARWEEIAANALGLPRNKRWRFAPDAIKRFESEERNFLARQLNETRHLSRMARIYLQRACHPDRVYATTGQLTAMLRRRWGLNSLFRDHNQQPEEPRQDAGSKTAKARDDHRHHAVDACVIGAIDRSLLQEMARRAGQAESEGRERVVMEAADETGPFRGFRDAVRATIDKVIVSVKPEHGRGGALHEDTAYGLITNEGEAKVIGNLVYRKPLKDLTAAEINRIRDVRLRAEVLVATASVKNDEKALAAALAAFANEKAPGREQGVRRVRIGKSKTGEVHIRDRRTGAVYKALLPGENHHIDIVQMRDGTWKGFGATVFEVNQKSWRPRWEVEKLGGKLVMRLHKGDTIEVDDKTDPGVRRYMTIHRLKVENQQLFLAEHKEAGPLQDRHDKKRAGFENDPFRWDMASISSLKSRQAIKVKVDEVGRVTRVRSNVLPGGCGHPGTRLL

SEQ ID NO: 2487 - protein, 1044 aa, unidentified
  REGION 1..1044: note = Description of Unknown: Cas Enzyme sequence
LHDCGVRIFDDSRNPKDEKPLGEQRRSPRSVRRRRDRFLQRRQRVMQMLMGFGLLPADLKARLALANLDPYRLRGAALDRVLSPHELGRAILHLNQRRGFKSNRKTDSDDADDKGMIASANERLAEAMRAVGANTFGQFLWQRHRGPDGRASPRNRQPVRIRLDGEGRDALYAFYPTRAMLEAEFNAIVAAQRTHHPQLLSDDQVELLRREIFFQRPLKVPKRGKCTFVPSEERLPRTLPSVEARVIYEAVNNLRYGVGIRVDTKLNAPQRDSIIEKLLQGDNVTAAQLRKITGAPADARFQIASGEINGLKDYHARTARKLCAEEAFGPAWHALPLKSKDEIVSKLIGEEDDETLRDWLIKEHGLSTQRARKVASLSFEPGTASLGATANAAVLSQLMAVDVPTYSEAVKRAGEAREEKWHHSDIDNPELREFLPYYAQVLDRQVLPGSHAPNDDELEAEHGRIANPTVHRCLRQLQKLVNALIRKHGKPAQIVIEVARDLKLGEKQKAEHRRTNKLNRDANESRRAELDTKGIQTSADALLRLRLYEEQSRAGDGVALCPYSLEPIEREDLLSDKVEVDHILPYSRTFDDSPANKVVCFRHANRDKHRLSPHGAFGDRPNWAEIETRARVLPANKRWRFAEDAMERFENEERDFTERQLNETRYISKLARAYLTVVAGKGNVYVTTGQMTAMLRRRWRLNTILRGDNQPDEEPVRKVRDDHRHHAVDAIVIGAIDRPLLNEMSRRAGEFEGEGRDWRITDAAPEEPFPGYAEKAKQLVREIIVSRKPDHGKGGALHEETAYGIVKDKDEADEIGNLVTRKPVTALSVGEVDCVRDPVLRREIQVVVKPFRDDKGKVSDEKGFKVALKNFAGQRDVPGRVQGVRRVRIGKAQNDFVSIKGRQSGEVYKALIAGENHHMDIVQMRDGSWQAFGTTRFEVNQRGWRPLWEREKRGGKLVMRLHKGDAVEVQRNGERQILVVNSLRPSKPDLVMSQHMEGGDFSKRAKIGDNPEIIVGLKRLREWNARAVHIDILGRPLAKPTNVS

SEQ ID NO: 2488 - protein, 1023 aa, unidentified
  REGION 1..1023: note = Description of Unknown: Cas Enzyme sequence
MAQMRYRLALDLGSTSLGWALIRLNHDTPPAPVAVIKAGVRIFSDGRNPKDGSSLAVTRREARAMRRRRDRLLKRKERMTQTLINHGFFPADEAQRKALVTLNPYALRAKGLDQALTPSEFARALFHINQRRGFKSNRKTDKKDNDSGALKQAISKLRIAMAEEYCRSVGEWLHKRDVAGQTVRARYRQTKVTKDDGKTRIDKSYDLYIDRAMIEAEFDALWAKQASLNSVLFNDRARDELRYCLLFQRPLKPVKPGRCTLMPEEERAPLALPSVQRFRIYQEVNNLRILRDGLKEEALTLKQRDDLVAALEVNNKRTFTQIKTLLGLGGAVQFNFEDPKRQELKGNTTSAILSKDALFGKAWLKFDEAKQDAIVLQLVKEENETKLVRWLQEETGVDEAHAEAIANTGLPEGYGSLCSQALARILPELRRDVVTYDKAVLAAGFYHHSNISAAATGEILPELPYYGIPLLRHVGFGSGKPEDSDEKRYGKIANPTVHIGLNQVRLAVNALIKRYGHPSEVIVELARDLKQSKEQRDEDNKRQADNQRRNARLRADIAAALNISPERVRTADIQKMILWEELSSNVADRRCPYSGVQISAAMLLSEQVEIEHILPFSETLDDSLNNKTVAMRQANRIKGNRTPWQAREDFEAQGWDYVGMLARAELMPKTKRYRFGEEGYQRWLKDDAGFLARALNDTRYLSKVAREYLSLVCPQSTRVIPGRMTAMLRAKFGLNDVLSLRGEKNRNDHRHHAVDACVIAVTDQGMLQRFANASARTREQQLNRMVEDMPMPWGTNEGKEYLHSVQRAIHNIWVSHKPDHGHEGAMHNDTAYGLLGNGRVSVHKMVDGKRERLEDNLKVIEFSSAKATTRHGLLPTGEPRPYKGYKGDSNYCIEIVSNDKGKWEGEVISTFEAYQLVRQHGLERLRHPKLSVSGKPLVMRLSLDDTIRLDVDGTSRTMRVTTLSSNGQVFMTDIQEANVDARNRDKADPFAYVSKYAGSLQKAKARRVTISPIGELHDPGFKE

SEQ ID NO: 2489 - protein, 1063 aa, unidentified
  REGION 1..1063: note = Description of Unknown: Cas Enzyme sequence
MANFHLGLHLGSNSIGWAVCTTDNPFKNRFRRITGIARTGVRVFPDGRTETGTTLAEERRLARSARRNRDRALQRQRGLQQLLIKAGLLPANKTEAEALLSVCPLELRHKALEEPLTPHLFGRALWHLAKRRGPSWGRGEEGDDPDAGLLKAAQGRLRTALALEGARTLGEFLHSRKLEGTRFRRNNDPKIGWDIYPSRDLIRAEWELLWDTQTKLGLSVPALARDKITKIAFNQRPLRRQQPGRCTLIPEDLRLPKSLPTSETRIIYETLGQLRVMDDGLTYRPLTREERDNLASVLLEGRDLTWAGVRRTAKLSKTAAFNLDHGATGTRNGIGGAQTAKIMSSEKAFGELWHGFNLPHKDTIVSWFHDLQEAEDIAGRLTAKFNWSAEKAEALAQWKPRPGYGRLGKTISDKLIAEYIADPACVYSEACERAGFDHSQLGTGEVFDRLPYYGIVLDTAITETPANIKQAEGEIGSRGARRARGNTGLGAAEIATGKIRNPSVHAALNQLQKLVNELIEEFGPIDSINVSIGRDLKMTPEDQRTEAIKNYKNQKQNKERELRIEEAGYPITHETKLRARLFDEQCNKAGDCFCPLTLKSIGFKDALGSHAIVATHITPFNLSLNDSPSNLMLAYAHAARLRGGKTNFDTFAHDEIWPAIIEHSNSIGKFRQRLTAPPPKKGDEDPLAHHLVDTQYFARLAAQYLRCLGADVTPISTRVAPLLRRAWSIHKAMPTNTPKEHDYRSKAVDAVIVACTSRANIEALSRANADSPEELQKELRKIMPPIDDLANKIQDQLQSLIVSHKPEHGRRMKFFTDTAYGIRDNATEGDYNLVTRKSITAFTIGDVKKVNDERLKQELEVLGEKHPGPQDFAKALQNWAASHASAGAGRQPIRRLRIGAKSKSYEAISNKRGRPTALIKDALWALDIFQRKDLSWDGEGIAPKQANDPKFRPAWEQEKVSNLLVMRLHKGDIFEAVDRYTGQIQLFKVQRLIPSNGKIKATHLHEAGKLTVREKEGTFKFVDFSYRQLRDQRAKKVKVSVSGRVQYAKLDKQIPKSLNWPMS

SEQ ID NO: 2490 - protein, 1080 aa, unidentified
  REGION 1..1080: note = Description of Unknown: Cas Enzyme sequence
MTYRFAFDIGTNSLGWAVFELGDRKSPEGVIERQVPIGLKDLGVRLYGDGREPQSQESLASLRRIPRGARRRRDRFLQRRRHLFALLTGCGLLPPEGKRGELFSRNPYPLRERGVVEELTLHELGRALVHLNQRRGFKSNRKAPAGEDEDSGKIATGGAALKRRLAEKGFETLGQYYASRQSAHSPRDREPVRVHLRGSGANAAYDFYPLREMLEHEFDVLWKTQASFHKELNSIQRDRIRHAMFFQRPLKPVEPGRCTFFPDQPRLSDAMPSAQAFRIYQMVNNIRLVDGRSERKLGKDERDSVVSVLLDGRKLTWTQFRTLLDLPKGQQINLELGGEKHLLPDRVAFLMVGATNRNPGPLRDLWNEITERERVDIVNKLRNAEEDEDVIAWAITKLALDEVKATQLSRIRLPDTFRRLSAKAIDMILDQLESDVITYSEAVNRCGFSHSDMRGDRQYKRLPYYNRLPALQRSLGKSSGNFDDPPDVRFGRIANPTVHIGLNQLRRVCNALIDRYDSPAQIVVEIARDLKQSTDQKKIIAERNRKNRDANDRRREKLTELGIVSEGERRIGETLMRMRLWEELGEDPKCCPYTGKTISLSKLFDSEIEIEHILPFSRTLDNSPSNKTVAYREANRLKRNLSPSEAANRFPESFNQKEMLDRVRLCGMPKNKQWRFEADAMDRFENEEEFMARQLAETQYLSRIATGYLECLFPPEEEDGSRRQYVWVVPGRLTSLLRHRFGIGFNSNKRKNRDDHRHHALDAAVIGVMDRSLIQRLTRTAAKAEGEGLDRVLSDLAEPFEGYRSSIMERAEAIYVDSRARHFDDDPDPRRTTGKLHEETYYGVVKDLPENATALELGNVVRRKSVASLSAKEVSLVRDEVLRKQLQNAVEIDQKTGKSTLAKKEHEAALVKWSERTGVKRVRVLKKEGTLLQIENRNSGVPYKAVVPAENAYLDIYENELGRWVCHTVDSMTANSPATAAHRDYQGRFVMRLHKGDFVQLFDSEGQVNEVKRVHQLRPSANLVFLAGHLEGGELQKRHEMSEDSFRWDMASVERLRKRRARRVRFTPTGRMKTVPHGKV

SEQ ID NO: 2491 - protein, 1060 aa, unidentified
  REGION 1..1060: note = Description of Unknown: Cas Enzyme sequence
MLEICTVICSGILGEQCMAKNQNLSYRLSLDLGTTSIGWAMVRLDQNQNQNQNPSAIIKAGVRIYSDGRKPKDKTSLAVNRREARSARRRRDRLLQRKAKMMRLLVELGFFPKEKEKRKALEKLNPFEIRARGLDEKLQPEEFARALFHLNQRRGFKSNRKTDKTQDDTGLLKGAISALRKTLEKSKLRTVGEFLFQRMRDGQTVRARKRKRKKEVNGKNKVEEFYDLYIDRQMVEEEFDLLWEKQKSFNASLYSEENQKLLKDTLLFQRALKPVTPGRCTFYSEEFRAPKALPSFQHARMLQEINNLRIQTARFEERELSVDERNLVLNALEKVKTKTFSSIQKLLKLEKRQRFNLEGEKRKALDGNKTTAILSKDDCFGDSWHEFSLEKKDEFVLKLLNEDSEEVLLNWLKEHTKVSDAQAEHLVNVSLVEGYGHLSQKALNKIIPYLENEVITFDKAVEKIGIDHSDFGLKTNEKDVEYVDHIVKTTGEVQRLARYKQLPYYGIPLERHVAFGSGDSKDPVEKQFGKIANPTVHIGLNQIRLVVNEIIRTYGHPREVIVEVARDLKQSRDQRQQAETHQKENQKRNDRIREEVAGFLKVIQENVKRADIQKVILWEELNKDPLKRRCPYSGELIGMQELLSAEVEIEHILPFSQTLDNSLNNKTVSLKKANRVKGNRIPWDAKSDFDHEGWSYDDIFDRAQGMPRAKRYRFAKDGYKNWLKKDKDFIARALNDTRYLSRIARLYLELICPKKVRVIPGQMTALLRGHFGLNKILGLNGEKNRNNHRHHAIDACVIGVTDQGLLQQFSKASSRAEQLGLERLVEVVPYPWKTFREHVLRAVSTLKVSHRPDHSHEGQMHDDTAYGRSNKNPDIGESNAIDKDGKKGTKERKIKKMIGFSKTSDLNRHGKEKDGSPRAYKYYLPNSNYCIEIFLDENKKWREQIITTFEAYQIIKKDGFDKLRNKEKAQNGKPLVMRLMNDDTLKITHENENRIVRVCKITNGMVWCVDIDEANVPNRTADKNDILKYITKGASSLQKAGARVVTISPAGKMSTKKFYG

SEQ ID NO: 2492 - protein, 1212 aa, unidentified
  REGION 1..1212: note = Description of Unknown: Cas Enzyme sequence
MKQEQPFTYRLGLDLGTSSIGVAVYRSDEQGNTLAVEHLDSYIFGEPIAPKEMQTLNTARRSARLIRRQVERKAARLKKIGYIAQSLGVVRQDLLADKNDVIALRAKAVNEEITLPQLVKVCCHIVKNRGYKGTLSQADRGTIGKKIKQTQDLLQGGKTLGQLLWENKQAAEKGLAWRKIEDDGTFIYREQVEEEFERIWNTQSRFHPELNGKYTVWGENMFPDFPTQKEISLKDAFYSAMFYQRPIKWDLEVVGNCKIFPEEKRASCAQTAYQHYRLAKEIANLRYVLPASHESIALTSEQQRDLFTFVDGNTQEYDKANKDMPFSKIYKFLNFPDKTYFTIHRGSKKGLKGNTTLLAFEQAGLLNAWENLTDKVQELVLEFLSNITDMSTIADNSPEYICKKLTDNGEKGESLVKNIRAEGGEYAQAADFVLLMREKDRKDKFFEMFELEGARSSYSVKGLKLLTEKVWSGELNESNEEELIDKLVAENKVYTGKLRTLDAILKQESINDPVISRALAEFHRVMTYILHKYGNPQEIVVELSREMKNSLAHRQELENQNDQRSKERLAAIHFLQGNHILVSPRNIEKYLLWEEQAYVCPYSGKPISIGQAFDEKQTQVDHIIPQQGIVAGPNVFENKVLVFANENKEKSNRLPYQWKFKDDIDAYIAYQNAMKAKRKKGEKTEWNFGSHSPLINFVQRLEDLCVKERKFSQREHKFIVSQKGRLMLRKIKNLLMTPAELKDDFSNRQNQQTAWIGKIVLDWCKDVCPNGVIASQGELTAYLRRELQFDKILPRIRLAENKPLYDKDNKELNGALWHLLHDEDLRLSDTFETEDLADAWEKLKADFEQYKGKLPPEDCPHTASDEEKAFREFCREQRTLCSFYKRCDHRHHAVDAAVIGLCSRSMVQRANTHHGKYGTLDVIKAYDEKGTRIKEKDIAGFEIPDIPHYAEILHAVQKRLTGYVVWHKPDHFPAGAFFDQTAYNVQKDKDGVERFVKRAPLGSFLKSNEKKTLENLEKLLFTDTIKQVIISQFQARLAQGLTQEEALCGRKDDPKDGIYYRGNKVKKVKYMYLIGRGIRKFDENADKKIKDNTGRVYKAYQNGGYACMDFDAKTGKQKNLIPIWKYEQNKVVPEGIIRIFIGDMLFDKSNKQFYKVQKFSARDGMYLRPVTETQENNLQISTSSIKDYIAVSTREDIAKIKTEYGNTTPDQH

SEQ ID NO: 2493 - protein, 1232 aa, unidentified
  REGION 1..1232: note = Description of Unknown: Cas Enzyme sequence
MAYRLGIDLGTSSIGAAAYRIDENRRPVELIFADSYIFGEPVNPKDYTTLNSKRRAARLIRRQIARKAARMRKLAYISDFIGVSKEILDKVPADDINRLRAIAIEQEISLPEFIAVLFHLVKNRGYFGDVFEDDGGKIKAKINETSNEIKQEGFKTLGQLLYCKKQQACGNGIHSNAPWRKLNEGGTFITRSIIEQEFELIWQEQARHHKELSGNYKVSGEFAKNMFPDYPGKTEITLKQAFHSALFYQRPIKWPLASVGDCPLVPGEKRAAISQPVYQQYRLVKQLVDLRVKNRMPAMELFASESENSHPQMQERGLTYGEIQTVLRYALENCEEYSKEGKITYSKIYELLNFKEGQKFTIDRPALKGKGGIKGEMTLCVFNNFGLSHDWHILSEKEQEIVLEFLNNITKYSDIHNSTDEYIQQQIEKLAKNVQNQTEIHRKNAFSFIKIIKEKGLFAKSEFKLEQGRAEYGITALDVLTYGMLEGKQEYDIIEENYPKQLIEAENLRSAEEIIDNESINDAVIKKALREFKREIDFIIKKMGEKPAEITIELSREIKNSLARRKYLETENRNMEKERIEAATKLQEQSVIKTSSNIERYMLWEEQEHKCPYCGGPINFELAFSPSTEVDHIIPQAKGGPNVYSNKVLAHKECNLQKGNNAPYDALINGKKLKDDLDIYLEYLAKKKASKKRKKQTDEDDDIARHYHIGSVIDFIQRLWLLFNKEQKGYYNKAKHRYEPTLKGRRIREKIDNLLTKNEDIDSNFAARQNQETAWIGKIVMEWCQDICPRANIVASTGSLTAYMRSLTGFEKVLPLVRIAEGKNLYHDEKCSITINPEKWQLLFNGRIINMEQGEPLEIYDKRFPELKDSEILKQEFEEWLKEKEKHGTESAHTKKDIEQSFRNFCKDISGVNAFYKRCDHRHHAIDAAVIGVCTRSMVQRANTHAAKHGTLHTIHNTDGTEIQCFMPLTEGREYELLRNFRKKLLYYMKDYVVWHKPDHFPSGEMLQQTAYGLYEDENGKKMLVCRVDIAKFDKKSEEKTIKELENYIVGEEIKREIIRQFKERIARDMKISEALCGKADDPKDGIYFKGNKVRKVKAYFHYSGKVSLNKADKEIITTDRSGRKHRKAYINGGYACAEFNKTTGKFKRLIPLWEYEKIKDKPVPSDTERIYAGDILCRLMDKTFYVVYKMGVAGLFLRNVSETQGNDISTKGTYGFKLVPDRKTLAELKKK

SEQ ID NO: 2494 - protein, 1031 aa, unidentified
  REGION 1..1031: note = Description of Unknown: Cas Enzyme sequence
LLKQRKSQPYRLGLDLGSSSIGWCIYDLDVNKHQPAPSHIRCLGVRIFNNSRDPVKKQSLAVSRRLARQRRRRRDRFIRRKALLFKRLVRFGLYPSSPAEQLTLANLDPYICRARAVEGPVSSYELGRALYHLSQRRGFKSSRKRQDDADGRSLSAELDALELALKESGAKSLGQFFARRREQGLSTRARPDVGLYPRRKLYKAEFDLIRETQAKFHPTLNEENWDLLEHTIFFQRPLEAQKPGKCLLIENESRAARALPSFQRLRLLQQISDMKFQGEDYRYRNFDTAQKVKLAAYLEVHKELKFTAIHKLLGLPADTHFNLSSERRTKLNGNSTACFLRKKSTLGKTYDTLTLSEQDKLVEILSSEDDTEQLQKLLSENYSFSAEEVTRLIGNEVSIDDFESGYCSFSIKALNMILPHIGEPLFLGYSEAVKSAGFHHSNFRPDNLKDRLPYYGEVLRQSTIPVKSLTANKEEKRFGRIPNPTVHVGLNQVRKVVNTIIELHGLPKQIVVEIARDIPLGAEGITKLERQQVANQKDNQRIIAEIKTLIPGIVKVSSDDIQKYKLWEELGGTNLHRCLYSGRLISAAQLFNGDVEVEHILPFAETHDDSIGNKTIAFKQDNNKKGERSPYQAFRDEKGDYAYEKIFARVEQADKLPANKRWRFMADAMDRYLETEDFAARELNDTRYIARAAARYLQEVCSDVWTVKGWTTALLRRTWGLKKLKKRNDHRHHALDAAILGLVERSLIQKISKVFKDGSYSLKTPLPWPSFVEELKGRLNTLTVSIKPNHEKNRLIFKDYAYGTINQENGDSRESAHNLVARKSLLALSPKEAKEQIRSAALSSLVSNKLGQDEAKDISEILAEVSELTGAKRARILKKNQYAVQITHPSNSPRHKKALIPDENVWLDVWKLPSGDLQVIPIDTFRAAQYNANNYRPHPAAKRVWKIFKGDPVRFIDNGIEKIGRVETLAPSEGNEKIVVVDNYTATSSATASESKIMKKYFIKFSQFKKKQFRKLRVDVLGRVADPGPLP

SEQ ID NO: 2495 - protein, 1015 aa, unidentified
  REGION 1..1015: note = Description of Unknown: Cas Enzyme sequence
MPKKSTVFAWDLGKASLGEAVRQGDHIVAVESFKIPEDHASLADERTRRRAYRTRKAHKAREDYLQQVFQEAGLETLTGRRGKELGDPRLEREFPAQGEDTCYTSSLLRIKLIEGEALAQWQVYKALHSAIQRRGYDSDVPWATNADRDPDKTGDDKDEAENAANAARFRASCLEMSDDADYHLPCFVDAWHMGLWTEQDGITSLRIDHHAQRARGYVATREAVETEVRLLFTAAQTQYPELGISVDAFLYGPTELAYASMNPDLCKKHGIREGAATDWRGVLSQKVPRFDNRMPNRCCCIPRYHVCRATDILHAQVHFLLGLINLRYMGGNETFSLTPAEVNECFQTARKNASKKDKDKKADQYKITKTAWNKWLAKNDRVAVVNNNEIPKPKTGGRSRYSRPALRIMRDLILSGDSPHAFRSALLAETDNQDPLKGLVPSDLDFLAKMPDDWERIHIPSATLPKSNEEQEAAIAKLIGSQGDPIVCHRLGVLHQRLKKLTATYGEPDLVALEFVREDFMGEKAKKRLMDFQKKRTKARIAAREEAKTISDRGSAPLKLQLLKEQGGRCIYTGDHLCLEQIDAYEIEHIVPRGSKYNGSDAMYNKVLTTHEANQAKAQQTPFEWLAGTPEWSAYLGRVDSMRARSSKKKINLLVSEDAPDMDRRYTGLAETAWIAKLSQQLVSLFYGWPTGEKGSERRVAIVSGGLVGKVRRQHGINKILYPEIEDLEKLDKKNREDDRHHGLDAMVISYIPTWARDPKKERYFSFPDGIDAPYFKAKIDTCIPTNLVYSKIGLEETVYAKRLLPAGESAVLRRDLATMGGDVKTWTVKKAKKTAATVVEPMIREAILTFLETSPSQAEWVAFASELRSNSHDHNGPLIKKVATRTGTLSEYADLSKDETGQYRRTDKNTGVVFYKDKEEEFQRHQILGHESLFEAQAEVALISSEIIGFFEAACLVELGSDISRKGSEDISAGRYRWKSYKHNRSVILERPGEKEISVSWKSVCEAGIKRLDA

SEQ ID NO: 2496 - protein, 1118 aa, unidentified
  REGION 1..1118: note = Description of Unknown: Cas Enzyme sequence
MGTRFAFDIGTNSIGWAVWRTGPDLHGVYGPDAPLELLDAGVRLFKDGRNPKDGKSLAEMRRGPRQARKRRDRFVLRRDELSAALIHAGLMPADAVQRGALSGLDPYLLRAKALDEALTPHELGRAIFHLNQRRGFRSNRRADRKDGEKGKIRQAAEALREGLRATGSRTLGEFLWLRHRNPELRRKSAAVEQAGRSGKPDLRSSRLRLPTRIRLDGQGAKALYAFYPTRDMVADEFDELWRRQAVHHPSLLTPQARDCIRAILFRQRPLEPPPVGRCTFVPDEERAPKAFPSVQAREIYERLAHLRLSTGPMADRPLRPEERDVLASVLLNEDRLTFVKMRKALKLGGDVKINIEETGESELTGLRTNRILAKDDHYGPAWRGLPLADKDAFVAKLIDVVDEEALIARLMAENGLTRATAEACAAVPLPEGYSRLGRTANAAVLDALRTQRDESGFVVPYAEAVRRAGARLGRDWHHSDLDIRSGMPAPARIPPLAYYAELLQRHVLPGSMDPKDTGDDAKYWGRINNPTVHIGLNQLRRVVNRLVAVHGHPDQIVVELARELKQTEEQRRREQQRNRENRTENDRRARELESLGIPSTGETRARLKLFEEQQRTGRGVAQCPFSGRPIGLEKLFGAEIEVEHILPRSRTLDDSAANKVLCYRDMNRIKRGKTPFEAFGMTPDWQDIAARAEGLPPSKRWRFKPDAMARFEGRAAGSSDDAELREMGLDSGFLARQLNETRYLSRLARAYLHHACVRRCREGGLEYGDVYVTPGTLVGLLRGKWGLNTLLSDDNRKERTDHRHHALDAIVIGAMTRGWLNHLAREAGRAEATEYDAVLGQVPWPFERFRDAVRDQLVRFVVSNKPEHDPAGALHEDTAYGLVRDPAEAAVIGNLVRRKPVADLTPGEVDAVRDAALRRSLRERVAPFRDVAGKMSDEKGFKAALTAFAAENGLRRVRIGKEDASAVAMTERQTGLTYKAVVPGENAHIDIVAMRDGSWKGFAATLIEVNRPGWRPQWERDRLGGKLVMRLRKGDMVELESERGGRVVKTVQQLWMKQNLVVLAEHREGGDLQKRHRTDNEIDPFRWDFANIGKLRQRGCVAVRVDEIGRVSRRRTNV

SEQ ID NO: 2497 - protein, 1043 aa, unidentified
  REGION 1..1043: note = Description of Unknown: Cas Enzyme sequence
MLVFGFDIGTTSIGSAVIRLSNAADQGEILNLGSRIFPEARDPDGAPLNQERRNRRMMRRQLRRRKSRRQQLNSLLQDNGLLPQFSKNPQSDWAKCVSIDPWPLRQRSTSCPLTAHELGRTLYHLAKRRHFRGRDLEPTEATEGEAKPEVDAEEAKAQSLREQHRAALKASGKALGAYLADISGPQQRKRGHHFARADVEAEYRAILSAQAPHHPVLNNPDFLTALESAIFYQRPVFWRRATLGRCRFVPDAELAASASWIAQEKRMLEKINNLRIEEGNGRPLNDDERAAVLKLLRTQDTATWSAIHRYLKLYWRTHDQNEKPEFNLQRGGEKGLTGNRLENKLSAILSDRWADPDFANRMRREVHARLYAADYGIVGQRIVIRREADRRAARQTARAALQSDFSLTDEQADALAALNFPTGWEPFSTCALEAFLPRLQDGTSFGTLLASPEEEAWRAASFPNREQPTGSWADRLPSPTKKHPEELARIRDIRNPTVTRVQNELRKVVNNLIDVYGKPDLIRVEVARDVSKSKRERDETWKRNRERETERKRAIADLEAKGIANPSGRDIEKWLLWKECREFCPYTGEPIPFHALFHSGDFQVEHVWPRSRSFNDSFGNKTLCHISFNIKKANRTPFEAFEGAGDAWEQALGRVRNFAGPPGKVAAKAKRFAAAALTEDFAARQLNDTGWASRQAVGFLKQLWPDEGPEGPVKVQILTGRVTAHLRRLWGLNNILSDDGEKSRADHRHHAIDALVAALAHGGYTQKLSQWFAAKDGPKAIDPPPLESPFADVRHKAEAAVARIVVSHRVRRKVSGPLHADTVYGNAGAATGTGKVAYRAFVTRKPVESLSKSRLADDEVFADTHVRDVLRAWVAENGGDPKKAFLKAYPTVSPGGPEIRKVRVRVKQQVALMAKVGNGYADLGNNHHTAVYRTASGTIESEIVSLFEAANRLRRHEPVIRKSRPGSTFVMSLGAGDTLFIPAGEKTGYWVVQGVWAAGPIVLHRANDASGESVFRPTASSLVKLGANKVSVDPIGRVRKAND

SEQ ID NO: 2498 - protein, 1125 aa, unidentified
  REGION 1..1125: note = Description of Unknown: Cas Enzyme sequence
MIDLCHMLPTLVKGAMVLKKYRFAFDLGTTSVGWAVFELDERTGKPSALARFNKKGVETKHSPLGVRIFQDGRDPQSRESNAAGRQLPRSQRRGQDRKLKRRSRLLADLVAADLLSPAGAERDKLFKCNHKKQTCVDADPKNCTNPYRLRARAAQEQVALHELGRAFWHISKHRGFKSNRKTDNPEDDTGLIKSASLALREKLRAEGHPTYGAYLWARLQDGQGVRVRARGENADKHYDFYPTRDMLEDEFDVIWAEQAKHHSLSEELRVRLRDSTIFFQRPLKPVLPGRCTFFPEKERVARWHPAAQAFLILQELANLRVIRDSVEHPIDLDKRTVLFNVLNGGEKLTWTKLRKLLGLTSQDVINLQEGGLKHLHFNKVAANLVVGTKKNPAPLTAHWADYDAPLREDILNQLTQSESPEGLIEWLSQTLGLDAATAEAVEKVRLPDGHLRFCKEVVEELVTEMRSDAIDYSEAVLRAPILSDADISHSDFRPDDGVANLPRYNELSVLQRMLGNGSNNPDDPHDRRFGKITNPTVHIALGQFRRVMNMLIREYGKPAEVVLEAARDLSKSPREKDEIDKLTKSNARRNDRFREELEEAGHLKPGQRVGDRFLKMRLWEELGHNVADRCSPFSGRQICLADLHSDAVEIEHILPFGETFDDSPANKTLAFRDENRRKDKLSPGQAAAQGLFDQDAMIARTKHLPRNKAWRFLSDAMEVFEEQKSFDDRQLHATGYLARVVRAYAEALFDKADRDGKQRNHVWMLPGRMTAMLRHRWGLNLGDHNRKNRDDHRHHAIDAAVIGVIDRAMIRRLQDAAKTVGAETLSRVLPSPPEPFTGYRDAVMFAVKDINISHRAKHGQANPEDPSQTSGRLHEATAFGLIRDEPENQADLTIGNVVVRKPTTALKEKDIRQIRDVKLREAAMVATEPSREAALTKGDADKLRAKLLAEWANETGHYRLRIVLHEKSVRPIHDKAGRAYKYYIPGEVSCIDIVEEDGKWQGHALSVWDANSGQQQNWQDLWPDGRFIMRLHKGDTIQLFDWDDDEKAIVEGSNAIKKVVRLNPSGNRVYLCGKLEAGVLQKRNDDKEDDFNWDLAGFEKLRLRRARRVRIDELGRVHTIPHGKV

SEQ ID NO: 2499 - protein, 1064 aa, unidentified
  REGION 1..1064: note = Description of Unknown: Cas Enzyme sequence
MRTRFAFDLGTNSIGAAVWRIGPDPNGVFGADAPLELLWSGVRIFKDGRNPKDQKSLAEMRRIPRQARKRRDRFVLRRRDLMDELIRAGLMPSDASERIALRTIDPYLVRAKALDERLQIHEVGRAIFHLNQRRGFRSNRKTDKADKDKGKIASASQRLTELLAANNCRTLGEFLWKRHGGDIQTPKPVRARQSTRIRLEGKGANALYEFYPTRDMVRHEFDAIWAAQATYQPDTLTDDAKARISNILFRQRDLKPPKVGRCTFVPEELRLPKALFSVRAREVYERLGHVRITEAGVVDRPLFRDERDKLANVMLYDGKLTFPKLRKLLGLDSTTRINFEEAGEKDLPGIVESKILSAATCLGTRWKDFSFEEKDALLTLLMDEPDESKLIAQLISRYALTEVQARECAGVPTAEGYSRLGPTANRAILDSLIHEAGEGGTAITYSEAVKRAGWHHSDERDGEIMAALPYYGQVLERHVMPGSRDPADKDDDAAYWGRIMNPTVHIGLNQLRRVANRLVKMFGKPDQICMELARDLKLGREQKEKERKANAENRKANEARARRLTELGVPDNGENRARLRLYEEQVTAGGGVALCPFSGRTIPVSALFSPDIEIEHILPRSRTLDDSSANKVLCYREMNRIKRGKSPFEAFGSTPEWEAVAARGATLLPSKRWRFRPDAMKEFEGDRNFLARQLQETRYLSRIARVYASKICNDPNAVYVMPGRMTALLRGKWGLNSILSDDNRKERNDHRHHAIDAITIGATTRSLIQFVATQSAKAERENLDDLIGKIPWPFENFRTQVREKVDAIIVSVKPEHGKSDALHEDTAYGFVRNEDEADAIGNLVRRKPISDLTPGEVETIRDPHLRQQVQAAISHCLDASGKVPDAKALSAALSAFGTANGIRRVRIGKADESAIEIRDRRTGAPYKAIVPGSIHHIDIVQLRNGSWKGFAASTFEVNQKGWRPSWERDKVGGKLVMRLHKGDLVELEDSGVRRVKQVVRIRAVAGQIMLAAHNEGGDYQKRHNDTEDGFRWDNAAISGLKARGCVAVRVDEIGRSERRRTNVF

SEQ ID NO: 2500 - protein, 1078 aa, unidentified
  REGION 1..1078: note = Description of Unknown: Cas Enzyme sequence
MGTRFAFDLGTNSLGFAVWRTGPDPSGAFGADAPRELLWSGVRLFKDGRNPKDQQSLATMRRVPKQARKRRDRFVLRRADLVAALVAAGLMPSDVSERKALEALDPYALRAAALDRALNPYEIGRAIFHLNQRRGFKSNRKTDKADKDKGKIALASARLRDALREHNCRTFGEFLWMRHRGQAHDPRRVRDPGRQPTRIRLEGAGAKALYEFYPTRDMIREEFDAIWRAQSAHAPALLTPERRDAIAKVLFRQRDLKPPKIGKCTLVPGEERLPKALPSVEARQTYERLAHIEISEGVRPERGLTPPERDALASVLLSEGKMTYVKMRKALELGGGARINFEQAGETEMKGSLTGRLMSKIDHFGLRWRNFSWAQKDAFVAELLAEPDEATLIARLVGAYGLSEDVAKECADASVPLADGYSRLGPTANAAILEVLIHERDKDGGLLTYDKAVLRAGQDRTPPWHHSDERDGEIFARLPYYGQVLQRHVLPGSMEDKDRGDDAAFWGRIMNPTVHIGLNQLRRVVNALIARFGAPDQIVVELARELKQNAEQKEKTRKQNAENRAANKDRAIKLTELREPDDGEHRARLKLFEEQLRAGDGVALCPYSGKPIGLAQLFTADIEVDHILPRSRTLDINASNEILCFRAMNRIKRGKSPFEAFGDTKEWEDIVGRAEKLPSNKRWRFKPDAMKRFEEEGGFLARQLNETKYLSRLAKAYLGKVCDPDQIYVTPGTLTGLLRGKWGLNSLLGDANRKNRTDHRHHAIDAIVIGAMTRGLLQSLARDAGRAEQSEFDAVLGRIDWPFETFREAVRASIEKLVVSNKPEHGKGGALHEDTAYGLIADPVEAKAIGNLVRRKPVVDLTPGEVDAVRDPVLRGHLQGVAAPFRDAKGKVKDETGLRAALAVFAATPLPDGKTIRRVRVGKADDSAVPLNDRRTGQPYKAVTPGENHHIDIVQMRDGSWKGFAATVFEVNREGWRPQWEREKLGGKLMMRLHKGDAVEVGDDDGVRRVKVVVRIRAVAQQLMLVPHNEGGDYPKRHVDPDDSFRWDYAAISGLMNRGCVAVRVDESGVARRRASNI

SEQ ID NO: 2501 - protein, 1109 aa, unidentified
  REGION 1..1109: note = Description of Unknown: Cas Enzyme sequence
MQDGRHWRLGFDLGSNSLGWAALSLAEAGQSTGLIDMGVRIFPDGRDPQDQQSNAAKRRMPRGARRNRDRYLQRRAKFLRILTDWGLMPAESVQRSELEALDPWILRARGLEEPLALHELGRALFHLQQRRGFQSNRLSDKGDDDKGKVSKGAEQARLAMGHSGAETLGQLKGQPRLENLRSPVGQRKAMPLARVRSHGDGAKLAYDYYPLREMIADEFDLLWGAQARHHPELTDTARKALREALLFQRPLKPQPVGRCTLESDEERAPNALPSVQRLRIYQELNNLRVANRPGVPRLPLSPSERDILTAKLETTAKLSLKQIRTLLGLSDAASFSIEEGGRDYLDGNKTHDIMCGTAKNKAGWKGWSDLPDEEQDALIEILLGRPSPVKDSTQAVINTHRQIIDRVSEALTVNEGIARSLVEAKDQNELTDFLCERYNLDEDAADRIATIRLPDGHGRLGRTAVGKVLPNLIAPDEDGELRTFDKAVVAAGYLSHSLRGTGEVHDTADGLPYYGVVLEQSVAFGSGNPSDSEEKRIGKVANPTVHVALNQLRHVYNALAARLGPPAQIVIELARDLPLSAKGKAELEKTQKDNRAANEKRSKELEAFGVPNTYENRMRLRLWEDLDATGKRCPYSGNQISSAVLFSSEIEIDHILPFSRTLDDGFGNKILAFRERNRAKGHRSPWEAVEAGAFDRAVIEASMRDLPKNKAWRFGPDAMERFENQERGFLDRQLNDTRYISRLAKQFLDATGAQTWVVNGRLTADLRHVWGLNAVLSTHNSAPPSSEADAVKKNRNDHRHHAIDAFVVACTDRSMVKAASDAAKVVEDEFAAGRRESMRLLENVPDPFDGYLQAIREAAARIVVSHKPDHGIQGELHEGTNYGVVKTQDGSQRLATRKPITGLTANEIKNIGDDRIRRELLPLVDLSDAERKAALLKYTQDTGHLRVRVHKVQAAFETIRHGPDSKGESHYRAVIPGENYCMDIIETPDGVWQGIGISRFEAHQPGWKKKWRQTSPDGKLVMRLRKGDLIKLTHDGVEKVMRAIRLRPSGGGLIYLIPHNEAGELQKRHDDANDHFRWDFAYISGLKARRARIVRITPDGQLLDLGPQA

SEQ ID NO: 2502 - protein, 1151 aa, unidentified
  REGION 1..1151: note = Description of Unknown: Cas Enzyme sequence
MSKKKINIGLDLGIGSVGGAVVNAEEFEIIDAGVRLFPEAGKESENSAASRREKRSSRRMHRRSRLRLDTLLKYFVKYGFLNEVNDFYKIKQHRFASIAELKQYALTNPISLNEMMILLYHSVKKRGVFNFKQDVLENKMKDKKTGEIELSSDDLEKELEEKSKKLPSELQIKNFEESGKITGSDNRFPHEMFKKELEQIINFQKENGGVKLPEEFVNDFFVLFSRKREYGQGPSRGNSQSKSLFSGQTGKGDQKDQDEFYDRLIGKDSYDRTQLRAPKKGMYAAIFNLLNDLNNLTLYGINRKSEKITKEEKIKIIKSLFPKTKVENLTLKKLIKILDCEEINGYRVEGTKKTPIFTKFEGLNDIFNIFKKVGLDTTGLTYENCYLIDDIILILTKSQDTDIAEEKLNIFFKENNFDFSNKMAKELSILSSKYTGSHSLSNKTILSVYDIMVDEPLNSQLVFKKNNIKKQYKFPFLENAKYIPVLEDDINDLFISPVVKRTLIQALKVLRAIQIEFKEYEIDSINIELAREKNSEDERKYITLIQELNKNINDKIGKLLGIDNAVDIPGKLRTKIALFLEQDSKCVYCGKPIDLEELKMNSEKYEIDHIIPQSISFSTRHDNLVLVHSSENNAKGNLTAYQYINSDKSKLSFNDFELLIKRIYNQQIQIDKTRARQFYKKMNNLTNSTDFENDEDSRLKFIERNLVDTRYVTREVYMYLNELRKELKDNPLNSVKLNTSNGSHTDFIKRNIFHLPPKNRNDFRHHGIDAITIAYSEIITNDIRKISKENKNDNAIKLVSEKYLEARTKILDHNYHFSRKTNTNFNRQLSNDTLYSFKKYKGKKYKDENEFRQIMKVKLTDFDSGTMNVLKNIFSNDISEKDRIESLLELYDIKTFNYLKKIYNAYPIGYTYMNSESGKNDSIKNPFLYFKEKERKKICLQKNIKNPEKNPEIKTIRYYGNKMKKLLDISDKYDVDINKTKIGFTSLKPIRLDIYQSKLTNKYKIFPVNARVIKNLNEKEIIIDNIEYNKIISSKDEGFNINLNEFEKVLELFPRGTTIRITSQDSKYDSEFFEVVGSPKNGTIEVDFINKRKEKNESRIIFSLGTLLKIEKVNVNILGTKRKYITKENFSNKKNKKNIEVINEKEYNLIV

SEQ ID NO: 2503 - protein, 1157 aa, unidentified
  REGION 1..1157: note = Description of Unknown: Cas Enzyme sequence
MNKKKVNIGLDLGIGSVGGAVVNAEEFEIIDAGVRLFPEAGKESENSAQSRREKRSSRRMHRRSRLRLDTLLKYFVKYGFLNETGDFYKLKLEKFGSIAELKMFSLSNPINLDEMMLILYNSIKKRGVFNFKQAAIDDKMKDTKNSDVELSREEIEKELKEKSKELPSELQLKNFDVNGKINGSDNRFPHEMFEKELKQILSFQKENNGINLPEEFVNDFFDLFNRKREYGQGPSKGNSQSRSLFSWQTGKGAQKDQEEFYDRLIGKDSYDRSQPRAPKKGMYASLFNLLNDLNNLTLSGVNRESSKITREEKLKVIESLFPKNKVENLTLKKLAKLLECDEKEIEGYRIKGSKKEPNFTNFDALNDIFKTLKKVGLDTNGLSYENRNLIDGVIVILTKSQDLDAAEERLNDFFKENNFEFASKLAKELAVLSSKNNGSHALSNKTILKVYDIMLDEPLNSQLVFKENSITKDYKFNFSNEVKYIPVLEDEINNLFISPVVKRTLIQALKVLRAIQIEFRDYEIDSISIELARERNSDDERKYITFVQELNKKANDKIAELLGVENVDEIPGKLLAKFSLYIEQDFKCVYCGRRIDEEELKRSPEKYEIDHIIPESISFNTKRDNLVLVHSTENNEKGNLTAYQYINSDKSSKTKLNYSDFLTLITIIYNQQIQRDKTKAKQLRQKIANLTNSTDFENDENSRLAFANRNLVDTRYVTSEVYAYLNELRNNLKDNPMNKVKLKVLNGSHTDFIKKSIFHLPVKNRNDFRHHAIDAITIAYSDIITQDILKTGRKNKEENAVELVSEKYVEARTQILEHNYHFSKKINKNFNRQLSNDTLYSFKKYDGEFRQMLKVNLTDVDPSTLNILKKMFSNDVDSKDHIVSLIELHDLETFKYLKKIYNAYPIGYSYKVQYTNKKNEVLEKEEKIRNPFLYFKIHENKKIYLQKNTKNPEKNPEIKTIRYYGNKMGKLLDVSDKYNVDTTKTKIGFTSLKPIRLDLYQSKITNKYKIFPVNARVVKAVKEKEIVIDDFKYYEMITSKQEGFNIDLNEFEKVLELFPRGTTVRITSQDQKYDNEIFEVVGSGHIGKIEVDFINRRKDETDKKQIEISVGTLAKIEKVNVNILGTKRNYIAKENFSNKKIEKVIAVVDEKDYNNFV

SEQ ID NO: 2504 - protein, 1147 aa, unidentified
  REGION 1..1147: note = Description of Unknown: Cas Enzyme sequence
MYGKERDNMEQNKSEKIKVNIGLDMGVGSVGGAVVRTDEYKVIAAGSRLFSQANTAEERRMSRGARRGYRRRDSRLNSLLNLFVEFGYLDNKDEFYELSIDKKFSNLAELKFEALNKEISSKQMLLILFNYVKKRGSFNLKDETVKNKTSKKENDYSKTELDNLTSNLKEAEKTRPVDKQLDNYKNGHKIRIAKSKDNIDEMDNQFSHEAYRLEIIELFKKQNENNKIYSDDFIKKYFNIFDKKLEYYLGPGEGSKYGGDQDETKFRERLLGTDSYDRSQLRAPRFGITAIKFDLLNDLNRLTIKSPNISNEKLTSEQKRLILSKMFPVGSGDNRVIENVTVDRIKKWLNLSKKETFIFNYRSDKAGKPIFTEFKSLMAIFNALKKSKLNDSGFNENNEELIDKIIDILVVSQSSEMAEKEIIKELNESLDLPEIELQNIARVLSILAVSTASAFSGTHELSEKSLKKLIPLLEEENIPFEEALKKAGMEKKYRFDTDKERYKYIPILKKEINDLGISPAVKRSFIQTLKVIKEIQKEFSDYEINAIVLELASDDNDKKRKESINRFQKMREDDKKQIQKELIKYNKLPEEITDTMIDKFFLYKEQDGHCVYCTTDLDLSIVLSNPHAYQIDHIIPESISHDTRKQNLVLVHQSCNHDKSNMTAYAYIVKNANSTKPNRITSYGAYEARLKDVVYKFDNVESRYFAEKISRLTDNTDFTKFSERQKFINRNLNDTRHAVKEVKSYLESVKNASYNIETTIGRETSYIRKNLLELEKNRDDYRHHAMDAIIIAYANELSNKFNQSYHFCNLEESENKKIIGPIKEELKLLKHEMENLSYNFSHLNEQKFNKKLFDDTLYSYKKNNGEFKEIVKVNLFETSPTTLSKIFNPAEDKEPEYIPLMKDNDPETFRYLCDIGNKYHDYHYLNEEGNEKIVKNPFVYYRDGADDEPNEQKFLLKKKNSNPNSYIPKVESIRCFSRANPNVFFDLTHKFKDANPDKVRIGHKSLKPFMIDIYQNKFNPAILKSVSLNVRVLKGNFDGEGSIDKDKYQKEIQNETYKINPENYKLLLRAYPNGTFVRITTNNNNFNNDIVSIIGIGAPGRNTIEVAPIDRKISDRKITRFSLSQIVEMDLVEMNILGTKKYYKKII

SEQ ID NO: 2505 - protein, 1094 aa, unidentified
  REGION 1..1094: note = Description of Unknown: Cas Enzyme sequence
MRYNIGLDIGIGSVGFAVMELDEHDEPIKILHAGSRIFDVAEVPKTGEPLAKGRREARGMRRRLRRRALRKQRIRGLITSSGLVTSSQLETLYDGEAMDVYALRTAALDRILTNEELAKVLIHLSQRRGFRSNRKSGASKEDGVLLKAVSANASLMLEKGYRSVGEMLHKDETYSEEKRNKGESYKNTVSRDMVEAEAKAIFSSQREKSNALCSEEFEEKFLKILLSQRSFDEGPSGVSKYKVDFDKMVGYCTHFPEEKRAPKAAYSFEYSDLLQKINHLRIEVGGKATPLEDYQKKMLIELAHTSEGLNFAKIRKELGMEGGKFNLVRYENGKGDDAVEKSTKLGCLKSYHEMRKALDKVEKNRISTWTNERRNSVARVFSLYKNEDRLRSEVQAIGIDECDIQALLDAGINFSRFSNLSIKALDMLVPHLEDGMTYDKACDAAGINFKGDDKGHEQFTLSLQKLARAADNTITSPVAKRAISQTGKVVNAIIRQMGTSPIFINIELARDMSQTRDNRNKAEKDMKENQARNERIRNELIDTDGQTAPRGLDIVKLRLWQEQDGRCMYSAAAIPREDLFKTGVADIDHIVPYSISFNDTYNNKVLVTAVENRNKGARLPLQYLTGQKREDFKVRVGATTAIRKAKKNFLLKEEITDDDINTFKQRNLQDTRTTSAFVYRYLSKHLAFSDFNTNKKRHVTAVNGAVTAMLRSRWGLSKVREDGDLHHAIDACVVACTTQGDINELTMINKLSSYYRRRETKYTPSEDKELVIGTATGEVSERFPEPFEGFRDRLFGKINEVGKTAIDVNGEVTHGTIVSRMPRRKVTGEAHKETIKGISSDGKLLKKVALTDLKLNKDGEIDGFYGGNDPGLEQALKERLIEFDGDAKKAFDQPFFKVAKDGLTKTRVKKVKIEEKSTLNVDVHDGKGKADNSSIVRTDVFYVDGKGGGYYLVPIYVADTLKNTLPNKAIVAAKSYEDWAEMKDGDFLFSLYSNDLIYIKGKKPMEFSRAHDKGSLPNKSPLTDEMYDGGHFVYYKGCDIALGQISFINHDNSYKNKIGVKTLVTLEKWEVDVLGNKSLIGFEPRQTFGKKAGE

SEQ ID NO: 2506 - protein, 1410 aa, unidentified
  REGION 1..1410: note = Description of Unknown: Cas Enzyme sequence
MDKYFLGLDIGTNSCGWAVTDTNYKLCRKKGKDLWGVRLFETAETAQNRRMKRTSRRRLFRKRLQLSWLRDVFSNELNKVDNKFLTRLKYSSLLYEEGDKAIYGLNEKESLFSGTLNGKKFTDKDYYKTYPTIYHLRKELTQKPADDVRLLYLALHNIIKHRGHFLYEKDFGNSANILEAINDVIKNITDLYSTELENSNFNLLPITQETCEKIKEYLKNKRGIKDTKNKFIELFNAKTKCEKSFCNVLVDGKVNLNDLFTLSNEAVKIDFNSETIDEELLSLSNSLTEEQLTILNQIREVYSSLQLSAILGDSNYVCEAMVNNYEVHNKQLKELKLFIKQYYPKKYFDLFRNHKNKNVGYSQYVNGDLVAGKKQVANLVCGNRDKDLFYKYVKSILNEEPTNVTNQQDYESKKQNILSLIENNQFLLKQRVKTNGLFPNSIYVKELKQILKVNQEKYTFLNEKDSTGLTNSDKILQILTFKVPYFVGPIGKSEEGQNFGWVTKECDLKYYPWTLKKLVDFDKAEDNFIQKMTNKCTYLPTCDVLPKRSIIYSKYCVLNELNKLKLNGNEISVDLKQRIFNNLFTNKNKVTINDLKRFLVAENEFTADEVKTLSISGIDKEFKNNFASYSNLINNSNGLFTKEFVDNNLETFEKIIKYHTIISDKNRLVKRIEKEFGNLFTSQQINKLKSYNYEGWGNLSKDFLLDLQFINKQTGEVTCVLKELWDTNQNLQQVLNNSDYTLSENLYKNNTKQLDSLTYDDVQALYCSPAVKRGVWQCLKVVKEVISVMGNTMPEKIFVEVTRDDEVKGDKGRKLSRLTNLKSYYSSKEFKNNVYVTNSELNKLMEELNKRQDNDLRSEKLYLYFLQMGKCMYSGKPININDINNLSVCDVDHIIPQALIKDDSINNKVLVLSEYNRVKLDSYPIYSKFPEWVEKQKDFWGFLLSKNLITKEKYDRLIRKDELNNDEYGQFIARQLVETNQSAKAVIDFLKQCVDNPRKIVYSKAGFVSDFRKEFDIFKSRTVNDLHHAKDAYLNIVVGNVLNSRFTDDPRHFYSQENINNKMTKNVKKLFENIVYSPLTKLPVWNKEKDLAEVKKTCSKNSCLISKMSYAKTNDNFYKETIHKSKRNNPKTEASIPLKGNGTNPLSNYEKYGGYNNYTYAYFMVVESLDKKGRKIKTIEAIPTIIVKNNSNKPDYNEILLDYLTNNCKLNKPKILVPKINIQSTLKIGNGEYWLGGKTGDGYVLHNANQWFANDEIVKYVKIIEKYNLIKLNKTEESLTQTDSEIIVSKASKLGNTELVLTKQKNIWLYEEIINLLSKNVYSTTSLSTVVKEKLITCKDLFSTLSVQDQCDVLSSVLKRISTGCTLCDLSKLKEGSSVGLLKLGKNITDKKIILVEKSATGIFEKEIIL

SEQ ID NO: 2507 - protein, 1061 aa, unidentified
  REGION 1..1061: note = Description of Unknown: Cas Enzyme sequence
MPKNELIYSFDLGSGSIGICARSGKKVLYLDSLLIDSEFASVKEAAARRRQIRTRIAHKEREKWWNEQAVKSGIEVLSTAQPTKENPTLKTDKRILTEFLPKDSKDKTIYSSHLLRIALLQGVRLEGWQVYKAIHSAIQRRGYDANLPWGSGTDNSDEKDNSESSNIYNEKLKEFFGDKEKYHYPCYYEAYVQGIWSTENPKDLSGRLSENPSPARNKDNKPAQEKCFPSRQLVEKELKALLASAAQFFPKLKGKEDFILYGPAEKAYASYNKDDKYTQYRGTNWDWKGLLGQKVPRFDNRIIAKCRLIPRLNVCKAGKQVNKEVSFLLNLKNMRYSKDNTTSMALTPVQINDIFKVYTQYIESEKEKEQNKKSGVKIQNKRAGKSNPFTKTFWKNYVRDTLGSEINVGQQEITKPKDGGRSSFCKPALHILHGLILSGKKPHDYYKELVAANKNTDINKGLVKDDYKFLLNMPNDWNSISIQDTREDDKKLSQKDAKDKIKDIISGVSNRIVRHRLIMLVKQLEKLSDKLKREYGDPDKVIFEIAREDFIGEKKKNEYISSQNANKKENEAAVKKLKDMGIAVNSQNILKIRLGNQQRWKDIYDTSEKRDLIPQYIQKYEIDHIIPQKLGGSDSFVNFILTKNALNQAKGRRTPYQWLQTSSNWQTYLSNVEAFSKFASPKKIELLTSDKAIELEKRKTDLQATSYLEKLAQQITGLYFGFGINTKDDKKRILFYTGGETANVRSKLDLNEILYSSKEEYEKAKQSNLKEKNRKNKKHHALDALVLSLLPEIKTKAKVVEEKPEYFNKEYCKKEISKVIPETIKQITPKPRQTIYALRCRIEEDGEKHYYFVSRFNSNLSLFTKIADAKEESKKIFDLKIQKDFQEKLKENGLTQESWEKWLNKYSGYGKRIKQIAMIDSKSFDEKDVFNSDGTKKEIIDKYGDKGVMRGQWIRGEESHQGQIVYKEQNKWNVEPIYVFESVYNKLKEYKNKYDKVKFFKSGQLVVLKEDCNDIKSGVYKLRTVKSSGRCKIESVDTQKEIEKNIAIFIEQYGMEVYKKQ

SEQ ID NO: 2508 - protein, 1092 aa, unidentified
  REGION 1..1092: note = Description of Unknown: Cas Enzyme sequence
MSHAMTLGIDLGSESIGWALVRDASQNQPPEIVATGVSIFNSGRNEKGESLAQDRRMKRGQRRRRARYLWRRDRMMRALIRMNLMPQEKENRKKLERSLDPYECRAKAAKQEVTAHELGRALFHMNQRRGFLSNRKSEKKADRSAYKNGLEALKNVLGNQTLGQYLWENHNVKKDIHKKPGIRFRSVQNGSKTEYPLYPTRAMYQAEFDKIRKTQGNAQDLHPEHWEELSHIVFDQRPLREQPVGICSLYYGQDLTNPETGEVTKAPKEERSPQALPSAQMFRVVQDINHMEVRDENRRWRKLTPDEREKLWILFNTQKKIEFKAVRKKLEWPEDTDINLENDRRTYLKGNETVCTLAKYFGKDFYKKPVYEQDDVVQFILDCENADDLFNEAVTSWKLPEDKARKLVFDDEISIEDFPAGYGRFSARAYRDMIPLMRDKQLRYDEATKQLGIHHSDRGADGNANSLPYYADAIPLSVTTPKYGAPEERQKGKIANPTVHIALRQLQKVVNTLIKRHGKPHRIVIETARDLKLSKDEKDELNREHQKNLKKNEEIKKELEALGEWNGDKGEKILKWKLWEELSADINDRKCPYTLRTISKAMLCSHQVEIEHILPRSRTLDDSRANLTVSLKSANGMKKNQSPHEVFAHSEPHGWETKQGAYSYDIILSYAQGLPKNKRWRFEADAMERFKDENEWQSRFLNDTRYTTKIAKKYLQVICPNVDASTGKLTAKIRKCWGLNEILGHNKKNRDDHRQHAIDAIVLTQITRALIQKAAKANENLALEEMEIPLPEQWPTLWEDAKKAAQGITIYHRPDHGVDGPINKENPYGVLHHKELEIDKRTDKEKKNDEEAGKIRNLVIRKDIASLTFDQMNDIRDENLRRRILEAVTVDGLIPDDTKILRQKLTAFSKNTGIRRVRILNISNPIKIITHPNGEKSKHLKALIPSENHHISFWRMPDGKIEIRSASMFEARANATNPETFKPHPAAKLLMKLHKRDVVKILHNGEEKIAKIKTLSPGSKKIEHGDIHLVEHFEGGELDKRHKEDKNSGGNGIIIFIKMGRALDIHQMRKLYIDPTGKVYDPGPYIDRTKAA

SEQ ID NO: 2509 - protein, 1047 aa, unidentified
  REGION 1..1047: note = Description of Unknown: Cas Enzyme sequence
MSTTPRIPDGTIWSFDLGKGSIGEAVRDPRTNRFLHVESLLIPPDFASTRDAATRRRMWRTRLAHKAREAWLDEVWRAAGQEPLRRRETWRDPASGKWTLKHSADERLAREFPKKGDETCYTSCLLRIKLLCGEKLEPWQIYKALRSAIQRRGYDPDIPWKSRESGRRKRSGDDEEGKTRARMERFVEELTEMSPNREEFRLPCYFDAWKMGLWDPENPDVLRTRVDCQAESTRNRVVPRWLVEKEIRLLVEAAGEQIEGLRGKAAFLLWGPAEKPYASYDVELRKQFGLREGGEKDWNGVVGQKIPRFDNRIIEKCALIPRLNVCKIKSDGKGHPREESRIVFEATFLMKLKNMRVQRTPTEQTGLTADEIRAIFEDPKVTGYKVTEAQWRRFCEKFGVRPLPSYETVEAPRSGGRSRFCRPALDILKRLILSGQSPLEFYRAELARLNGNTDPLRGLVPEDLSFLTRMGATWDAIHIPNQKLEAIMQMAETPEEAVQRIIGSQNDPIVRHRLSLFAERLAALKAAHGVPAEVVLEFVREDFMGEKALQEYRAFLKKRERERKLAREDAAKAGATERSAALKLELLREQGGVCLYTGASLMETNLDAYEIDHIVPRSKGGPDAVINYTLTTHEANHEKDERTPFEWLSATNGWSAYEQRVRSRHSALRSKKVKLLLSADAAQLVSRYTALAETAWIAKLSQAIVDVFFGWKNGVDGEGRKRVRVVNGGLTARIRRKYRLNSLLNPDVADEEEAEKKNRSDGRHHALDAMVISFIPQWTRDATKERFFRLPEGVTKESFAEIVRTIIPRNVCLEKPVLAETIYGARGRNSDMVIVQRVELLSLAYRPVTSVYDLAYAVKQCKAIRDEHIRGLILAFLNEEPSEEGWKEFCASFCLRKKDGTLGSRVTHVTMNVGDPAEYADLSKDGTGAWRKAKKGHKGQIVYRDENQKIRVRPVYAFQSVPVVVQQLRAEGVQIIEFFQSKCLVQLADAVSHPKTPLSAGVFSLNTIRKDGFVVVTDQSGRVSQPISISKLLEAGLKRVDGTINLS

SEQ ID NO: 2510 - protein, 1026 aa, unidentified
  REGION 1..1026: note = Description of Unknown: Cas Enzyme sequence
VKIKYRLGLDLGANSLGWCVYRLGADNDPIQIVRAGVRIFSDGRDPKSLASRAADRRLARQARRRRDRMLKRRARIMEGLIRFGLMPADVQTRKVMQVDDPFTLRAAGLDKPLTPHQLGRALFHLCRKRGFKSSRKDRGDEKETGKVKTAIAVLRARIATTNSRTVGEYLAKERAEGRPVRARRRPDGAYVLYLQRDMVAAEFDLLWETQRQFHPEVLTEEARSYLRDALLFQRKLVPVEPGRCLFELEEPRARLSSPYQQEFRILQELNNLRIVDGIEARGLTLEERDLLLGHLRTQIKATFPTLRGLIGVRRNSGVRFNLETENRKDLKGDLVGAQFSKPDCLGDAWWSLDRERQEKLSNLVATADSSDDLELTLSGPEWGFSKETAASLARCNLPDDFGSLSLKALKKIVPELRRDVVTYDVAVQRAGYQHHSQLHTGEFLKALPYYGEILVGYTSPAIKATDPNEKRFGKISNPTVHIGLNQLRLLVNALIKRYGNPTEVVVELAREFGLGADRRRDLLKSQSENQDRNRRADERLAELGVKPSRVNRQKLQLWDELGVMDRRCVYSGANLSMATLYSDEVEVDHVLPFSRSLHDGIGNKVLCTRQANRDKGNRTPFEAFGHSPGAYNWADILDRASSLPPSKSRHFAEDALIDFLDGKDFLDRHLTDTAYLSKVSRQYLSYVCHKDRVWVSTGKLTSMLRGKFALNELLSADRSKNRDDHRHHALDAAVIGLCSRRLIQGISTAAARAESHGTNRLLEHLDLPWPTYREELESTLDKIIVSYKPDHGKQTGLHNDTNYGFRGDADAKGATLVGHRVPLESIQPKDIDSISGEGLQVSLREALHGISSPKDVKSALVAFSERTGVRRVIKIERLSVIPINDRRTGVPYRYVKGDGNYCYEIYLVGPDKWAGEVINNFSANQRDWIESSTIASCGKPLVMRLRKDDILRIEEKGDSRIVRVAKFSDGKIALIDHHESNVDARTRDASSGLKYLFKSPSALRELKARIVGVDILGYVNDSGARV

SEQ ID NO: 2511 - protein, 1030 aa, unidentified
  REGION 1..1030: note = Description of Unknown: Cas Enzyme sequence
MHLKKRYRLGIDLGTASIGTALIELSGPLEHPEPAGILHMGVRIFDDGRDPKTKEPLAVSRRLARQARRRRDRYLRRRQRIINAFVECGLFPKNEVERKALEILPPYKLRSEALDTQIPLYHLGRALFHLSQRRGFKSSRKSGQSDENGKINSGISRLKEQLGAEHCRTLGEYFFKSRIQNGLSVRARTTGVGANSMYPFYPERSMVSDEFDQLWESQLCFYPSVLKEDARIKIRDILLYQRPLKPVKPGKCTLEPSQERCPIADPLYQRFRILQEVNHLRILLPGQSAQPLHLEQRNLVSNELLRSKEIKLDKVRRLLKLPNEAHFSLESDNRDRIKGDEVATILSGKKYFGPKWQSFSFEEQTEITEQLLTCDEAEPLVRFLQSKGLTDTAAGDLAEQSLPVGYGRLSRMAMEKIIPFLECEVITYDKAAEKAGYKHSEFGTGQVLERLPYYGEVLERHIPRGTGNINDPIEKRIGKIANPTVHIALNQLRHVVNCTIKRFGPPEQVVIELARDLKMGEKQKKEYSSQQKENEKRNERIDHELEKLGQTKGGENRMRYKLWEELGENPLDRICPYSGKPIPISKLFNDELEIEHILPFAMTYDDSLANKTIAYRLANRAKGNRTPHEAFGNSPTIGDMHFEWDEIITRAWNLPRNKSWRFEPEAMERFIEDGDFTARQLVDTAYASKLAREYLTTICDKNKVWSIPGRLTALLRAKWGLNEILGTEKDDGSFQKNRNHHGHHSIDALVVASTDRRLLNKLSSHSTEMLTQGQRALAKIPTPWETLFSDARDRLTRLVVSHRKDHGLGGALHNDTAYGIIDENTVQHRVPLSSLKPSSIDDIKSESLRELLQEVYAQNGDAGWKVALEKFQVRTGIRRARILEKLSTVPIRNNEGNIYKAYKPDGNFCYDIWEEPNGKWNGRVLTRFEANQSQGKMPPRKGPNDQKLLMRLMVDDTVKLNHPTCKYWRVAMISDGVIAMAPIHEGGNLRDRERMSEDHFKYLRKTPNTLKDISCQVVHVDECGFVITPR

SEQ ID NO: 2512 - protein, 1340 aa, unidentified
  REGION 1..1340: note = Description of Unknown: Cas Enzyme sequence
MNNNLTVSFDIGIGSVGWAVVDPDHAKLIEFGSHVFNEATSAQQARGFRSARRTQRRRKWREKQLLMAFVDFGLVTEDELKQEGYLSYTTNNDLIKRPKEETVYHLRNKALDNPVSTRELILCLYNICKTRGHFLLENVNFERDTVTFDLFKEKFYALTNDYFTFSSIEGKEEFEKEVLKEIYNKKLKSNEIKSKLKKMDCVETEEMDAALLEICKLIAGYKGELTKISESVVLPESATNVKVQELLKKDSLNDFLEGIIELYDLINIAAILKKYNYICQLNVAELDNVKEVYKLENTDNEEYDKKKKEIQAKMKSTGVNGNRLRVVKNMENKFPNGLYLKEAKRILETQQRYNPKITNAFIEVCLGIIKTRIPYYIGPLDESAKNAWLTKNHAFKYSYDYSTKELHAVDEEASIKKWKYQMISRCTYLPDEFALPKGSLLAEVFSIVNEMNILTAKDTDGNTYYLTMKDKIHIFDELFLKKKEIIKYDEVKDLLNLQSFGPKNGGFGKNFKNTLTLYHPIVSLLPELRLKSILDVFAEENKIKQLEDIILSINLFDEESSKKQYFIKQGYQEDVSSKLSKLSSKKFYAFSKAFICDTPMDQENHSLLELLFEDNTAEFVNEQMTRIHSATDVYGNKIDFDANKYKAKLKENKELSIDLLMDDGKPFMPISRPVIRSLNECMKVYKEIISIYGVPKRVVIETARDLKDSSRKGEVPAKHFDQMKSAYDYLKKQIKEQKSNHLFKGNEMVDWEEIETYLSRNKRKIELYIRQNGLDMISGERIDINRLDNYEMDHILPRGFGDNSMDNMMLISKSLNAAKSNRVPLEFIESGEALNSDEQFITSSSFVRRVNSLFELKMISEKKKDRLLLKSSKDVEGFINRNLVDTRYIIKEFMAILNAYHDVNHYDTHVVALKSAFTDTYRKNGFHMQKNRDVGVQHHAHDAAILAIVDKMLLTYYPNYDSRGNMKAYHNFLLNLNKNEKNQAEKDFGGFTWIMYQKAFHERLNDQDSLLSQVKSRVPLFSVKAEKNYKGQFFDATIYPQKDKKTTKETKKGILGEFGINNDKHIFSAINCVAVDFYKYTNKRGKKKHLGVHIPKVIIDDQGRIDQDKYKFLVKEYYEVPELFDENGNIIQGYFRFRAFKNDLIYDSVNNELQMFNIGSIANKKLLMKHINIFSYDDISAQVRESFYPIVDEFNIRIGRNKSSNAIPFSEVNKDELITYCMDNLMAINDVDRYGKAIRDNLKKCLSFNNFLETMAFFNLIINRECTPPTIVGQFKPVADRFKSDEDGQYFKVKASILGVRFHKNEDGKLVISGPNRAANKFSKIRKEDFSWRICRDMIE

SEQ ID NO: 2513 - protein, 1324 aa, unidentified
  REGION 1..1324: note = Description of Unknown: Cas Enzyme sequence
MKEFTLGLDIGIGSVGWALIDQEEGKLIDMGVRLFEEAKPAADPRKNRSARRTLRRKKWRKQQLKDAFDDFGILSKTEIDKEGFLSFTTDTEEIPRPQDETVHHLRQRAIREKVTKRELFLALYNICGTRGHFLLENIDFSRETITYDLFKEKFYQLVEPYVSFDENIKDFEKQILNVIFEKGMGSRDLKNALKDDYTVDPESKDALTNICTLLAGYKANLEKISESVLIPEAPVSMKVDDLVKREDLNDFCNDVVELYDLINVHKILKEYEYICDSNVAKLENVVSIQKMEIEDPTKYKEEVKKIQSKMNGKLGNRLRVIRNLENKFPNGLYVKEAVAILKNQQKYYPEITNEFIEVCSTIISARIPYYIGPLSPDAKNAWLTKTGKFKYSYEYSKKNSVDEYESIQKWKKAMISHCTYLPDEYALPKGSFIGETCNILNELNILTAKTQAKDIYNLKTTDKVKIFDELFLKGNKVTYKDIADLLDLYSFGTKSGETKKKFNNQYSLYLAITNVLPELKLDTIEELFTNPDKINKLEDIILNINLFDEEVSKKEYFMTREGFDEKTASKLAKLKSKNFYSFSKKFIMNTGMNEQQDSLLTMLFSDNTDSYTNEQMTLIQNAVDKDGEPLNFESNKYLKKLNKDSKLSVDLLIENGKPLIPISRPVIRALNECFKLYEEVIKLYGVPKRVVVETARELKDTSQKKEAPAKHFAKMDACYKDIQKQVTEQKNKNILLKESLAEWEEVEVHLAKNKRKIELYIRQNGQDMISGDPIDINHLENYEMDHILPRGFGDDSMDNLMLIHKDYNAKKKDRIPLEYIESEAVLSKSGNQVTTKQFKARVHALFDIKAISEKKQNQLLLASTEEAMGFINRNLVDTRYIIREFMSVLRAYNQVKDYDTHIVALQAAFTSVYRNAFNIKKNRDIGDQHHALDAATVAVTDKVLNAYYPNYDRHGNMKQYQAFLKQLKESNVMEGNEKQKLNTFIRQAYHKAYGNYPNDNDSLIAEIKNTRPLYSVKVEKNYKGKFFDETLYSPKKGKKTGPLDVLLVNNDKRVFDTVYCCAVDFYKYTDKKGRRKHAAIHIPKVIVDNNGNINEKQYIKLIKDYYKIPELLDENGGIKAYYYRFRAFKNDLIYDTENNTIQKFNIGSIAVPRLEMKHLYIFSYNEIHKLVHFYHKALAVHFDFKLGKINPNGQKKFSDYNIEDIINFCIDNLMEINNHYYDKSIKDILKKENMLQKFLQKVAYLNLIVNRNCTPRSIIGQYVPSVNKVDNQAEYIKLKYSPLGIRYQYNDQGKLMISGPKKKPGMYSKIKKEPFSWKMSKEVL

SEQ ID NO: 2514 - protein, 1081 aa, unidentified
  REGION 1..1081: note = Description of Unknown: Cas Enzyme sequence
MKYVLGIDIGTSSLGLNINKLDNNENIINIIDTEDYIFGEPVINNKGKYITKNQNKRVNQLEQVQNERKNRRKNAIYHLAKEIDIKKEDIKYIQENENLLKIRAKAYKEKISLPELFAVMVHISTNRGYSGRLKKEDKGLGELFSQTKEKMDELDAKTIGELKYLLVQKQNSKILSKTKNNEGTFFKREEIEKEFDLIIEEQIKHYTILERELKYPYINDIEKNLIVCKKLKAIIFFQRPIKWDKNSIGNCNIYRDKKVVSKSSILFEKYRTLQMLSNLEFTDYTKIDIKYFSKALNILDGKKDMSVTKFLKGLGYENKTFKNNGNIKDEKIKGLYTNKKLSENFKEWDTLTLEQQESVIDFLSILSSSDEIELGDLEKIYDDYISFSNRDTNIKEFLELNKHKLEPLSEFNLPKSRSSYSKEALEKFIEFFENGMIDGINEPEKILRKIENIEEPKKIFENLNITNPIVLRAIKESLYEIEKVVKVYGEPYKINIEFTRDIKKSLKQRGEIEAKNNIRHKDKNLIKNELQKYGLKLTNNNIKKYILWQQQNYRCPYTGKMINMCAYTGSKIEKTSDILNYELEHIVPESKGGTRAMYNLVLADKEANKDKNNKTPYEYFNDKENWRYIQGYIEHLEKITKETKNLEIFIEGKEKIILDKEELKKKLKLLKSQKSAMELGKSEFGQRSYSDTSYIAKELTQLLKDKYLNTKDIVITKGGIVAYLRNIWGLNDILPYIRDKENKPIYDKDRNKIPYEEYQKVKKENLFEFDKRCDHRHHAIDAIVISFCSRSLVNKLSTFHGKFGHLPRKKAKDYFKDGEIELYNEVKSLFDKNSFYTKVQNIIADITVWHKPDRHPRGDFFDETIYGKDSDGYFIKRVKAVDFFDKITKIEKVKENIEKWVVSKETKIALIENFEKFKEEQSIKEIASNLYNYKRQTSIKKIQIKAGRTKKQKFNDTLDKKLKNGYGVNSGYSCINIDKSTFKFDLIPNHKFKYNKDKNILQLFPNDIIFDKQTKRFFIVSSFAEKEIIKAKNITESDSFDKVRDSSIKEVSYKYFGKRSLKNIILVNSKVDIEIIKKSYL

SEQ ID NO: 2515 - protein, 1365 aa, unidentified
  REGION 1..1365: note = Description of Unknown: Cas Enzyme sequence
MTKLNQPYGIGLDIGSNSIGFAVVDANSHLLRLKGETAIGARLFREGQSAADRRGSRTTRRRLSRTRWRLSFLRDFFAPHITKIDPDFFLRQKYSEISPKDKDRFKYEKRLFNDRTDAEFYEDYPSMYHLRLHLMTHTHKADPREIFLAIHHILKSRGHFLTPGAAKDFNTDKVDLEDIFPALTEAYAQVYPDLELTFDLAKADDFKAKLLDEQATPSDTQKALVKLLLSSDGEKEIVKKRKQVLTEFAKAITGLKTKFNLALGTEVDEADASNWQFSMGQLDDKWSNIETSMTDQGTEIFEQIQELYRARLLNGIVPAGMSLSQAKVADYGQHKEDLELFKTYLKKLNDHELAKTIRGLYDRYINGDDAKPFLREDFVKALTKEVTAHPNEVSEQLLNRMGQANFMLKQRTKANGAIPVQLQQRELDQIIANQSKYYDWLAKPNPVEKHRASKPYQLDELLTFRIPYYVGPLITPKQQAESGENVFAWMVRKNPSGNITPYNFDEKVDREASANTFIQRMKTTDTYLIDEDVLPKQSLLYQKYEVLNELNNVRINNEALSTDQKQRLIHEVFERHSSVTIKQVVDNLVAHGDFAQRPEIRGLADEKRFLSSLSTYHQLKEILHGAIDDSTKLHDIENIITWSTVFEDAAIFKTKLAEIDWLDPATIKKLSNIRYRGWGQFSRKLLDGLKLGNGHTVIQELMLSNHNLMQILADETLKETMTELNQDKLKTDDIEDVINDAYTSPSNKKALRQVLRVVEDIKHAANGQDPSWLYIETADGTGTAGKRTQSRQKQIQTVYANAAQELIDSAVRGELEDKIADKASFTDRLVLYFMQGGRDIYTGAPLNIDQLSHYDIDHILPQSLIKDDSLDNRVLVNATINREKNNVFASTLFASKMAATWRKWHEAGLISGRKLRNLMLRPDETDKFAHGFVARQLVETRQIIKLTEQIAAAQYPNTKIIAVKAGLSHQLREELDFPKNRDVNHYHHAFDAFLAARIGTYLLKRYPKLAPFFTYGEFAKVDVKKFREFNFIGALTHAKKNIIAKDTGEIVWDKERDIQELDRIYNFKRMLITHEVHFETADLFDQTIYAAKDSKERGGRMSLIPKKLGYLTGIYGGYQTERGSYVSIIRTFKKGETIYKVVNILTADVSLLSEKEKVSKTLADIYLKELIAKKLSKGKSGKNIASEPFEIVLPRVGKDSLFKNKKYGLFLIESATELHNYQELWLPRNDQLLIKRIQARQIEESKADYELTRMYRNIAWQVDHYFRLYKIRKFAEKLQASVEDFAGLPVYKNETSDGKVEVLASVLKRLNGAADKGRTNPTTVKLQSDFGRTLLTNGIVLEDDSSIVYQSPTGLFKRSVKLVDL

SEQ ID NO: 2516 - protein, 1361 aa, unidentified
  REGION 1..1361: note = Description of Unknown: Cas Enzyme sequence
MTKLNQPYGIGLDIGSNSIGFAVVDANSHLLRLKGETAIGARLFREGQSAAERRESRTTRRRLSRTRWRLSFLRDFFAPHITKIDPDFFLRQKYSEISPKDKDRFKYEKRLFNDRTDAEFYEDYPSMYHLRLHLMTHTHKADPREIFLAIHHILKSRGHFLTPGAAKDFNTDKVDLEDIFPALTEAYAQVYPDLELTFDLAKADDFKAKLLDEQATPSDTQKALVNLLLSSDGEKEIVKKRKQVLTEFAKAITGLKTKFNLALGTEVDEADASNWQFSMGQLDDKWSNIETSMTDQGTEIFEQIQEHYRARLLNGIVPAGMSLSQAKVADYGQHKEDLELFKTYLKKLNDHELAKTIRGLYDRYINGDDAKPFLREDFVKALTKEVTAHPNEVSEQLLNRMGQANFMLKQRTKANGAIPVQLQQRELDQIIANQSKYYDWLAKPNPVEKHRASKPYQLDELLTFRIPYYVGPLITPKEQAESRENVFAWMIRKDPSGNITPYNFDEKVDCPASANMFIQRMKNTDTYLIGEDVLPKRSLLYQKYEVLNELNNVSIDGRRLGADQKQRLIREVFERHSSVTIKQVAENLVAHGDFAKRPEIRGLADEKRFLSSLSTYHQLKKILHEAIDDPTKEHDIENIITWSTVFEDAAIFKTELAKISWLDSDTIKALSNIRYRGWGQFSRKLLDGLKLGNGHTVIQELMLSNHNLMQILTDETLKTTMAELNQDKLKADDIEDVINDAYTSPSNKKALRQVLRVVEDIKHAANGQDPSWLYIETADGPGTAGKRTQSRQKQIQTVYANAAQELIDSAVRGELEDKIADKASFTDRLVLYFMQGGRDIYTGAPLNIDQLSHYDIDHILPQSLIKDDSLDNRVLVNATINREKNNVFASTLFASKMAATWRKWHEAGLISGRKLRNLMLRPDEIDKFAHGFVARQLVETRQIIKLTEQIAAAQYPNTKIIAVKAGLSHQLREELDFPKNRDVNHYHHAFDAFLAARIGTYLLKRYPKLAPFFTYGEFAKVDVKKFREFNFIGALTHAKKNIVAKDTGEIVWDKERDIQELDRIYNFKRMLITHEVYFETADLFKQTIYAAKDSKERGGSKQLIPKKQGYPTQVYGGYTRENTAYLAVVKTVEKKADVYRVVRIATSQVAALKEARAQSTVKERELLKKFLTTKFTKIGKNGKKAITPFDIVIPRVPREQLFHNKRYGFFMVNSDTLMHNYQELWMSRSDQQILSKLVKSAKTVENGQVGRLFENIVEQINKYFPLYDINQFRKKLDQSKDIFSKLPLEGNGTTSGKRETIQNILTGAGTGAKNGDLKNLGIKTPFGFLQVPSGIVLDDDTTLIYQSPTGMLNRIVRLSEL

SEQ ID NO: 2517 - protein, 1359 aa, unidentified
  REGION 1..1359: note = Description of Unknown: Cas Enzyme sequence
MEGVTMNNKYVLGLDIGITSIGWSIIDEVKGKLLDMGVHMFEQATPAQEARLNRSARRTLRRRNWRKKQLKNAFIEFGLISKEEMNQRDYLSYTANSDTFTRPEEDTVYHLRLKALNDKVSLRELLLCLYNICGTRGHFLMENINFASSEPITFEFFVEQFYEFTHAYVNFEEDTKEFEQTILKPIFEKGKVKSNELKSLLKDEYTVEAEDNDALLEILKLICGFKCDLKKISESVVLVQEDKTKDSVKLDELLKMDNLNEFLNNAVELYDVIVVSQILKDHNYICEVAVEKLNEVLKVQKLEHSDPDKYKEEKKIIQSKMSKAIGERLRVVKNMENKYPNGLYVKEASDILHKQQKFYPNLITDNFIEACISTIKARIPYYIGPLSSQAKNSWIDRKDGTFKYGYDYCKDALVNEEESIQNWKLNMISHCTYLPEEYALPKGSFIAETFSLLNELNILTAIDKDENRYYLTREDKLKVFDELFLKRTDYVSHKEVAELLNLKSFGPKDSRKEGKFKNRYTLYQNIISVFPQFELHSILDLFDENEKEKVNKIEDIILNLNLFDEEQSKINYFTKKLNLDEKDAKKLARCKSNGFYAFSKQFIMETKMNVDGETLLEEMLRDNSENQKNEQMTLITEATDLDGNRINFDSNKYMTLLKDTKKLSIDLLMQDGKPFIPIARPVIRALNECFKLYEEVVNTYGVPDRVVIETARDLKDSAHDGDEPAKHFDQMKNLYDYLTKQMKEQKDNAKISKQYLEDWDVIQPYLEKNKRKVELYIRQNGRDMVTGDEIDIQKLEDYEMDHILPRGFGDNSMDNLMLIKKEINGKKADRLPLEYIEAETVTNQAGKRIISSDFKRRCYELNGMKLISDKKLKRLLLASTDEAMGFINRNLVDTRYIIRELMAILRAYNTVNNYDTHIVSLRSSFTTVYRNAFNMKKNRDIGDQHHAHDASIVAIADMVLSTYYPNYDERGNNKYYQEFLKRMMESQGPDSDKSENQKLYNFIRYAYNKRFGNFPNDNDSLVSQARATVPLYSVKAEKNYKGAFFDANELPRYDTKGNEKKLGVLGILGVNKDGRIYNKIKCVAVDFYKYTDKKGKKAYVGIQIPKVIVNENGEIDKEQYIKLIKNYYKVPELLDENGNVKEYYFRLRIFKNDLFYETETNTILKFGVGSITKKLLEPSHIYCLSYNDIYKEVYSLRKEMAVRFDFKENIVNPSGHHKFGDYAVNELFDFCLDNYMNLENPKNQRKLVSNTFNDMMKKQMNTVGKINYQWFLETIVYLNLIVNRKCSPLDRYRPGTDIVKKKNNEDAEYIKIKSSILGIRYTYNENGKLLISGPRKAPGKYSKIKKEKFSWKICSDVLQ

SEQ ID NO: 2518 - protein, 1355 aa, unidentified
  REGION 1..1355: note = Description of Unknown: Cas Enzyme sequence
MEGIEMDNKYALGLDIGITSIGWSIIDVVRGKLLDMGVHMFEQAIPAQEARLNRSARRTLRRRNWRKKQLKNAFVEFGLISKEELNQRDYLSYTANSDTFSRPEEDTVYHLRLKALKEQVSLRELLLCLYNICGTRGHFLMENINFASSEPITFEFFVEQFYEFTHAYVNFEENTKEFEQTILKPIFEKGKVKSNELKSLLKDEYTVEAEDNDALLEILKLICGFKCDLKKISESVVLVQEDKTKESVKLDELLKMDNLNEFLNNAVELHDVIAVSQILKDHNYICEVAVEKLNEVLKVQKLEYSDPDKYKEEKKIIQSKMSKAIGERLRVVKNMENKYPNGLYVKEASDILHKQREFYPDLITDDFIEACISTIRARIPYYIGPLSSQAKNSWINRKDGTFKYGYEYCKDALVNEEESIQNWKLNMISHCTYLPGEYALPKGSFIAETFNLLNELNILTAIDKDENRYYLSREDKLKVFDELFLKRTDYVSHKEVAQLLDLKSFGPKDSHKAGKFKNRYTLYQNIISVYPQFELHSIIDLFDENEKEKVNKIEDIILNLNLFDEEQSKINYFTKKLNLDENDAKKLARCKSNGFYAFSKQFIMETKMNVDGETLLEEMFRDNTENQKNEQMTLITEATDLDGNRINFDSNKYMTLLRDTKKLSIDLLIQDGKPFIPIARPVIRALNECFKLYEEVVNTYGVPDRVVIETARDLKDSAHDGDEPAKHFDQMKNLYDYLTKQMKEQKKKAKLSKQYMEDWDVIEPYLEKNKRKVELYIRQNGRDMVTGDEIDIQKLENYEMDHILPRGFGDNSMDNLMLIKKEINGKKADRLPLEYIEAETVTNKAGKRIISSDFKRRCYELNEMKLISDKKLKRLLLATTDEAMGFINRNLVDTRYIIRELMAILRAYNQVNNYDTHIVSLRSSFTTVYRNAFNMKKNRNIGDQHHAHDASIVAIADMVLSTYYPNYDERGNNKYYQEFLKRMKETQEPDSDKSENQKLYNFIRYAYNKRFGNFPNDNDSLVSQVKATVPLYSLKAEKNYKGAFFDATIYPQKDKKKNIAREKGVLGLLGVNNDKRIFSSINCVAVDFYKYTDKKGKKVHVGIHIPKVIVNNKGEINKEQYIKLIRDYYKVPELLDENGNVKECYFRMRVFKNDLIYDTNNYTIQKFNIGSIVNKKLEMKHLYVFSYDEIYKQVYFYKKELAGQFDFKMPKINSDGKKKFSDYKITEIIGYCLDNLMDIRDMHRYKGTVEKILKDKTNYQEFLETMAYLDLIVNRNCTPPTIVDRYIPVAGSIDDKTDTENRAQYIKIKSSILGIRYTYNENGKLLISGPRKAPGKYSKIKKEKFSWKICSDVLQ

SEQ ID NO: 2519 - protein, 1075 aa, unidentified
  REGION 1..1075: note = Description of Unknown: Cas Enzyme sequence
MQSKDYVLGIDIGVTSVGWGVIDHEHNIVDAGVRLFEEANASNNEDRRNKRGARRVKRRRKQRIVEMKRLLLREGLIDKDFAPYENPYEIRVQGLRRKLSNEELATALLHLVKRRGSSLDVIEDDEQKVKEDQKAKKQLSKNARKMWEEKKHVCEIQLERLRQRGHIRGEDNIFQTDDYKKEAKAILENQDVSKAFIDDALELIVRKRHYSEGPGSKTSPTPYGRWRYDENGQLIEVDLIEEMRGKCSVYPEEKRAPKESFSAELFNFLNDLNNIKINSREEPELSKEEKEAVIAIIRKQGHLTPKTNQPKALANILDVEIEEISGFRTDTKNNPIMTEFKGYKKLLKEFKKHNASLKDQDETLDAIAEILTAKKQKSERIEAFQDLGLAEDLADSLSELPGFTQYHSLSLKAIREINGEMLLTSKNQMEIITENNLVQQDIPDKLTLNEDAILSPVAKRAHRETLKVIEALTKKYGHFDKIVLETTRAKNSAEERQMERRRQDRNRERNKEVEELLEDYGEQAQRVKGQKALKVRLYKEQNGKCAYSYNPLSLDDIVNDRDTYEIDHIIPYSVSMDNSYHNKVLCEGRANQFKGNKTPFMYFKSGKAYGAVKDFDTFKNNVLQNPNYSRKKKEMLLREEDVTKFDMLKEFTARNLVDTSYAIRTLMTTIKQFYKHHNIPTKVFTVRGQVTNLFRNIGASAFLKDHPNIEENPLDKSREVYKHHAIDALIAARLSEQKLIRKLMRLDRTKDIDEDTGEVLYEITPLEDRELVKFVKHLAEFDEDDFKYSWKVDKKPNRAFSDETIYSTRIKDNEEYLVKKHKDIYNMESKDLKKKLFKDNKTKEKILMYHNDPQTFEKMEKTYEQYKHEKYPFAAYKEEHGPIRKHSKNGNGPLVKQIKYLDAKVGSHLDISDKYPTGEKRVVLKQISPYRTDFYKNPDGKIKFVTIKFAEMEPVQGENPFDIKEFIIPNDLYHQKKQAKKIDGNAEFLHSFNRNEIIEIVSKEKDAIQREQGRFIGTNNDTKGIIEIKTIEAKDAKQEMRTIGRKTVDVKKYAVSPIGDMKKVDREQLKLRVRA

SEQ ID NO: 2520 - protein, 1239 aa, unidentified
  REGION 1..1239: note = Description of Unknown: Cas Enzyme sequence
MKKILGFDLGVTSIGWAIIEIDENGKPIRIIAMGSRIIPFSGDDKGKDEFSQGKAISKNQNRTTKRTQRKGYDRYQLRRKSLTDVLLQNNMFDETLFKLNQLELWGLRAKAVNEKIELTELGRVLYHLNQKRGYKSSRSDANLDKKDTDYVAEVKNRHQEIKEQKITIGQKFYSELQKDQYYRIKQQVFPREAYVEEFEAICKQQQKHYPQIITDEFIVQLRDEIIYYQRKLKSQKGLVSICDFEGFWTKDKEGKEIFAGPKVAPKSSPLFQVCKIWESINTITIKSKKGEVFEIPLEKKQKLFEHLDKNEKLTSPQLFEILGLKKNDWYTNKQIERGIQGNLTKAQILNAVKGFDFNTDLLQFNLTTKTSDKEVFLVDRKTGEVTNSKHFKLIDADIEQQPLYKLWHTIYSIVDAEECVNALVKNFGIKKTVAEKLANIDFTKQAFGNKSVKAMRKILPYLMEGNVYSDACSYAGYNHSNSLTKDENAQRKLLNSIPLLQKNNLRQPVVEKILNQMINVVNAIIEKHGKPDEIRVELARELKQSKDERNETFANLNKRERENENIRKRIINEYELRATRNNVIKWRLYEEIDNEDKKLNAFCVYCGKPIALSNALRGSDVDIEHIIPKSLLFDDSQSNKTLSHRSCNEAKGNKTAFDFMSGKSEDEFNQYIERVNNLFKNKIIGKTKRDKLLMPEAKIPKDFIERQLRQTQYIAKKSKEILEQVCTNVWSTSGTVTEYLRRVWGWDDVLMNLQLPKYRELELTQFTEWETNDGQKHKQEVIKDWSKRDDHRHHAIDALVIACTQQGFIQRINNLSSVGNRQEMYDEVGKTKKGSLLENYLVVHRPFTTKEVEDKAAEILISFKAGKKVATVGVRKVKKNGKKQVVQSGIVVPRGALSEESVYGKVRTIEKDLKTGEIVKQKTKYLFENPDLIFKGYIRELVKERLGKHNNDVKKALASLKNEPIYLNVEKTKVLEYASCFKEEFVIKYPLETIKAKDAEYIVDEKVKAIVKERLEQFGNKEKEAFKTPLYFNEEKGIKIKTVRMFTGLSSVEPVKKDENGIDIGFVKPGNNHHMAFYVDENGDKQVHGCTFWHSVERKKFDFPVVIKKPNEIWDRILNDKDKYPQSFLEKLPNDKWSFAESLQQNEMFILGLSKDEFEKSIQAKDYEYLSQYLYRVQKLSMKGNGQIDLWFRHHLETELNDSNEAKTSKRYYNIQSIGAFEKLNSKKVFINSLGEIKI

SEQ ID NO: 2521 - protein, 1407 aa, unidentified
  REGION 1..1407: note = Description of Unknown: Cas Enzyme sequence
MTKTKLGLDIGTNSIGWGILVKEDKKYHFLEKLAKDGTVLPTKGSYIFPKGVDGQEKSKAATRRGFRSARRRTDRIRRRKAATLQVLSDNDMCPKLSDEEISNWRYKKNYPCNSDEFIKWQRTGSKGGDIETEKLKQPYYLRYLAATKEGLINYRIGRYQLGRAFYHLAQRRGYLSLEEEQADDAIEQFKLAVSKLLDEHTNSSSFLEPFGAVAEMYKSDKKVKSLTGKIKKKISKEPSFEVISAFIIDEFNKKENLGKVATEINDLSQQIADSEQPTLGCYLNSIYARQNGDGTTERIRGKYIDREKHYLREFNYICDKQEIGCELREKLRFAIFYQRPLKSQKDLVAKCPLDPKRKRIALSHPLFEEFRKWESINRIKIKTESDERLRFLNKEEKELIADQFNFIKDVEFNKLAERLSGDKNYRYIKDKEKLTADVEFNFPDTTTFPGCPTIARIKKVLGKDENGKYYYDSLPLLNTGHKEEKGKIQISVEDIWHCLFVDSFGEKSKQQARKEFAEKHLPWVDTEGFSKIKLKKGYGNLSKSAIKKILPYLQQGMLYSHAVFTANIDKVLGRKATSKEIEKISVCIKQALALHGFEKKVNAVVNNYIEKYKHDENGIGDDPNSQWAHQNGINDEIISWFSETDLDAMGKEEQNRLEQQCWDKFIKQADNKRPQNVEYLSSKTIPDFIEETISKEFPNETIDVNKLYHPSAMEVYPRAEKRLGNPEISSIKNPVFNKAMHQIKHLVNKLIEEELVDKDTEVNVELAREINSASYRRALTQYQKDQKAIRDWARRKIIGCYNESVRETINPTDRQITKYILYAEQNGQCLYTSQTITPRKFFTEQKYDIEHTIPRSKWNDNSLINKTLANADFNRNDKQNGLPANLDLTFEGQQIDADTIIQNRDRWLKSYNISSNEIQFNVSLESLKAEHRKYKAAARAATGDAATHDELMYRAHYARLRLDYLAQKYKTFERDEIPAKFNNANLVDTRLITKYARAYLNSYFKKVNVINGQVTDTLRKIWGLQGEYEEKDRSNHIHHCIDAVTVACVEKGTANRMSEAFHQYEREYFHGDSATKVYLPEPMDNFVDTMKKLKEEVFIYHKHVDRIKPLMDELEKENPKRLNLRGALNKPNPYGIIKKNGEEVFVQRSLVKDIQDKDIPSIIDDMIKERIIHLIHENGDVKIDRLKKDGTIFLPEYSYIQKNGKTKILSEMILRKIRLKAYKQSQYPLKEIRKIDHSEQEYKRDIYVLKEKDSNYEARLFGDLIPDNPEGRTKFTKREYFLINSINLVKSEVSINPHFPFLFSIHSGDQFLIFDKHPEEINWNNNDNLNKRLFKIKKFDEDQNIILQRNSHSYAEKDIYANESKLEEMVAFLLKKKPSSFRAVPTRVDELGRIDIEYSKAFIEKHI

SEQ ID NO: 2522 - protein, 1709 aa, unidentified
  REGION 1..1709: note = Description of Unknown: Cas Enzyme sequence
MKIKKILGLDIGTTSIGWAIVEATDQKRIDTKTGSVVDTTTDINNDRIGILHKDGKAAVGVRIIKQDTDSIQQFNAGQKLNTSSKSTPTANRRQKRGSRRLKSRYKLRRQKLHQILDFLGMLPDGISKIISNDGTTTYTQDKNSKYYTAQKGNRNSEDIGKTIYELRDKAFRIEISLQEWGRIILHLNQWRGYSSDRFAVAEKEETASGTTARVYNIEKNDDYIFKRAVKKKELETIYDTFIIEFDNGEKGIIIRTKENKNLDFVKGKLCTYKFKEDIEINGYKQIDKKNLNENSWSFKKDKINSTIQEWCDNGSTVGSYFYQNFYQQKNIERIRTNIVNREWYEKEFDKIFNLQYTKHKASFEKFSIEDIVASAFHKTYKDGSENKTYTQILNEVKKNGKDLKEQILYLISKVIIYYQRPWQQAKNKGECTFEKILVKVDRKNKETGITKKVEEYKGRTVIPRSHPLHQEFKIWNQINNVKLFFNKHDVRIELLKDNSNECKIFTGYEAYEIKELLYNELNTRGELNWRTFAEDLLKEKHPVIVVGLGKYKAKEEEDLPDFYFTVNYTKRKKKTNEIEDDKLKGNKTLYQINKILEVENKKWYNERHAVSKDQEITNLQLLWEIIYDINISDTNKVSELIQTKFPSINKDEADKLSKIKFDDSGMGQLSAKAIRNLLSLMNNGNNLTNKSKEKINSLIKVNEEEKELKDENKLIGLKDFFRDAKTRLVLVNKASIKDFTYLSFTEASAIIYGSHSSRGIQGNFKAIETVRQHSMNNPVVEKIVNETIRVVNDIYNEYDGFDEVRIELSRELKASADEREQMNEGMKKNAERVEWAKQMLREIKGKGIPLDIETSTKSNIDKIRIYEDVVIQLKPEEYKVKIKEYKLDEPSKAEVGKYLLWLEQNFRCPYTNELIPLSDVFARNKLVEVEHILPKQRYPNNSYSNKVITWEVINKAKSDNGNRTAYEFIVSKRTKDKFILSDGKEVNLVPKAEWEEHVKKMFPKGSKQNNLLRKEIPDNPIGRTLKETQYINKKLKEKLGELVGSEKIWVTSGSVTDILRNNWSLNEVMKELLRPRFEQFNIGEAKPRLALNYITTHLNTKTNKEEKIENFEGYNKRLDHRHHVLDAIIIACTKQNHVQYINTMNAINTADLNNQNEIAAKYKYLKDDVCGGNSSKVNKMPWTTTSFVEDVKNALNNVIVVNKGNNVIISPSINRNAKNVTTKQSISVRGNLHKETNYAKKNYFNKEKITVDKLIRKLLNNKYDNQNQTMILPRTFSQLIKEVVFKESIQNELIALFDPFESLLLNKNSTKKANENTISVIEKSIIKKIKDDKLLFNSRENKSFEWISIFSDNRASNRPNGFYLDFNSEKEVNGIIEPRTRKLALYRLAYVKQKETEINNEGLDKKEKDAKIRDVRAIKLYSNAIYEIRIKNTNGTYDWKEIKDITSNDIENINYPKGAQTQNIKQLLSSINLEEYKNNYIESPLFTSNTPIEIKKARQKGWFQDLYEIQPNNYVYSLDSSYFFVMQAEKNRNIIPLKFIDAVKILDHKKNNKFTAIDLLPLHLRTTEDEKLLFTLQSSDLVYMPDELSKGENYSEDQIKSIDWSDLKNILLNLYIVKDMNASGPVIVFAKLYTSNAITLTEKNAQEFFKNPEIKGNLIEEIKYGTSSMLQRCIKVFTNRLGTKIVPYWMFDNGIWEKERAIELGLIHN

SEQ ID NO: 2523 - protein, 1406 aa, unidentified
  REGION 1..1406: note = Description of Unknown: Cas Enzyme sequence
MRKILGLDLGTTSIGWALVNESKDEKSSIEKVGVRIIPLTTDEETDFQKGKSTTINASRASKRGARRTLQRYKLRRKALFDILQKHHIISGSTKLTNEAGKGKNPHVIWELRAKAATERVELEELARVFFAINKKRGYKSNRKTKDEGDGQAVDGMELAKKLYNENLTPGELMLKRLQNDKKGSPDFYRSDLQNEFNCIWKKQSEYYPSIFTSELKQKLDGANKNATYKICEEPFGLVGLKRTVKGKELRLENYQWRVKGLSEQLDLEQVVIVFQEINGQISNSSGLLSEISDRSKALYFNKQTVGQYLNNQIKNNFHNRLKSQVFYRQDYLDEFEQIWETQTKHHAVLTPELKTHIRDIIIFYQRRLKSQKGLISVCELEGKEVEITKDGKTKRKIIGPKVCPKSSPLFQEFKIWQKLNDLEFKNVLTKEESLPTLELKQNLFQELNISDKLSHSGVLKFTDLKSKDGWEINFKNGLDGNVTNKALYDQFKEIALHSGHDIDWSKLNSTETKKGIKKVFTELGVNTQILDFNTDLEGHEFTNQPAYQFWHLLYSYESDDSKTGDEKLIKKLKERFGFKEENAKLLAKVVFKDDYGSLSTKAMLKLLPHLKEGHDYTESSALVGYKHSNYLTKEENEKRTPDDKLELLPKNSLRNPVVEKILNQLVNVVNAIIVQHDKPNEIRIELSRELKKSAKERAEMTTSINQATAKHDKIRNTLKTIYPFSSGVRVTRKDVIKYKLWEELKDNGHKTLYTNAYVPLEKLFSKEFDVEHIIPKARLFDDSFSNKTISTRSFNEKKGNKTGIDAVAEYFGEDKKEAYLARIEKLYKDKLISKTKYLKLKMTESEIPDGFIDRDMRNSQYIAKKALELLTRVCRHVNSTSGGVTSKLRQDWQLVNVMQELNWGKYEKLGLVEYEKTKDGKVVRKIKDWTKRNDHRHHIMDAITVAFTSSNHVQYFNYLSARHNEQHKEHYKIKGIEDKETTIGNNGKRIVKPPMPLDEFRAEVKRHLESTLVSFKAKNKVTTRNKNKTKKLGKAHTQDILTPRGQLHKETIYGKKKRYVTKEEKVGSKFDIDKIQKVASKKYREALLARLIEFENSPKKAFTGKNAPSKAPIWVDEAHTEQVPGRVKIVELESFYTIRKEISPDLKIEKVVDKAAQAVLQSRLDEFGGDKKKAFLNLEENPIWLVQPIAKKEWKNKNKPKPHELGIPLKRVVITGISNAECLHYKKDHLGNEILDKSGQKIPVDFVSTGNNHHVAIYRDGEGKLQDQVVSFFEAVVRRNDGFPVIDKSFNKDKGWQFLFTMKQNEMFVFPNLEADFNPAEIDLEDTTNYARISQNLFRLQKLSRVSYGNSVSREYVFRHHLETTVQESKELKDRAYKKIKSLTYLDNIIKVRINHLGQIVKVGEY

SEQ ID NO: 2524 - protein, 1375 aa, unidentified
  REGION 1..1375: note = Description of Unknown: Cas Enzyme sequence
MNKLHFNYKQEKHFCQEWRKINMEKKYYLGLDIGTNSVGWAVTDENYDLCKFNGKKMWGIRLFEDAKTAAERRAKRSNRRRMARTKQRIDLLQELCEKGIFEKDPTFFIRLNESSLHLEDKSTSEKYPLFVDKEYTDVDYHREYPTVYHLRKELIENPEPHDPRLVYLACCHIIKSRGHFLVNGSISDAKDLSFICENMINSFNAASDYKISIQDMTALETILADRKMAKSVKAKQIVSLFECIPCEDKEQQKCCKAIITNLSKLIVGLKGDISKIFNESFEEIKSFKFAETKYEDEILPTMEEIYPDHAEIIEKIKSIYDWSILDEILDGEEYLSFAKVKAYEKHKKNLHDLKILIKKYCDDETYQSFFNGMNEKNKYSNYIGSIRKNGHTYKVEKCKSPEDFYKELLKLLSSINPDQEDESLLEQIKFETEDQTLLPLPRTKENGTIPNQVHIQELIKILDNASKYLDFLNEKDEYGTIAEKIISIAKFRIPYYVGPLSRRHKEEGSNSWMVRKEEGRIYPWNFGDKVDVEKSNKEFIQRMTNKCTYLIGEDVLPKNSLLYSKYMVLNELNNLKIRGKKISVKLKQQIYNDLFCTKARVTEKNILDYLKKEDPELAAEDLSGFDIDFKSSLTSYLDFKKQVIGDNIEKDHYKEMIEEIIKWKTIYNEDSKMMKRMITREFPETLNQDQIKKICHLKYNGWGNFSETFLNGIKGANKETGESYTIIEALWKTNYNLMQLLSKQFSFKEEINQINAEKTGAIGKITYENLVKDLVVSPANKRAIWQTIQITEEIKKVMKCEPERIFIEMARGGKKEKKRTVSRKTRLQELYTGCKDDTRNWMKEIGDREEREFSSRKLYLYYTQMGKCMYTGEEIDVDLLMTANSKWDIDHIYPQCKIKDDSFDNMVLVRKDVNNHVKRNHIVPSSIRKEMTPYWKMLLQKGLISKKKYERLTRSTDFTDEELSGFIERQLVETRQSSKAVAELLTRLYKNSEVVYVKAGLVSDFRHDNELLKSRRINDYHHAKDAFLNIVVGNCYRTKFTANPRKWIKKNRDTNYSIRRVFDFDIKQGDKVVWYGNKNENGKHTIDQIKKTMSRNDILYTEYTYCEKGKLFDETLTKKGNKKAVPLKKNLDPLKYGGYTSIKTSAFAFIEFDDKKKERKNHIVEIPIYVANIAKRKPEAVIKYLEEQKGYVNVVVKKYPIKKNSLLKIDGYLARLRGGDSSIITLKNAVQLVLDKKSYEIIRKVEKYLDHNSKYEANSKLEKFNENDLNIIYNELCLKLRNSIYQKRPVHQLETLEQGIDNFKSLESLKDKAKIINELLVMFRCDAKTGMDLRLIGGSSNSGRMRISKSRLTSKSLKLINQSVTGLFETEEELV

SEQ ID NO: 2525 - protein, 1338 aa, unidentified
  REGION 1..1338: note = Description of Unknown: Cas Enzyme sequence
MAKILGLDLGTNSIGWAVVEKERDSEFKLIDKGVRVFQEGVKIEKGQESSKAAERTDFRSARRLKYRRKLRKIEVLKLLSAKGFCPRLKNKDLARWRYEKVYPENNLFMDWQATDELIQTNPYHYRALAVEKKFDLHNKEDRFKLGRAFYHIAQRRGFLSNRLESTPENERSQVKASISAINKAKGKKTLGQYFYEKYQKGEKIRGVYTHREEHYLEEFNRICEFQKLDSEFVTKLKRAIFYQRPLKSQKGLVGKCVFEPNKSRCSVSRPEFEEYRMLCFVNSIKIKTPEDDHLRFLTEDEKLKITPSFYRKSKDYFDFEDLAKHLAPKKQYKFYKSRDIHQEDWLFNYSMKTTVSGCPVSSRFRDLFGNNFMELKIPYKREKDGKESVIDINDVWHVLFSYDSEDKLKEFAKNRLLLTDVQINDFLKIRLKKDYASLSLKAICKILPFLRAGLLYSHAVFLANMEEVIPGEIWQKEENKTIIKEEIRNIITNHKDEKQINEIVNGIIKKNREDELVWSEEASELFKKDLFKKIKAYFGNRTYNSFTEEKKNQIENDAFELLKKQMKKNAGRGEFISIQRIDEKVKSFLKDNFEVEWESLDKIYHPSAIEVYKPPIRKDDGKLYLGSPMVSSIRNPMAMRALHQLRKVVNELIKNEVIDSETRIHIEMARGLMNANERKAYQNWQRDRENQRKDYAQKIKEHFTSDKEPSETDILKYQLWEEQNHKCIYTGREIALNEFLGSNPSFDIEHTIPRSVSLDNSQENKTLCENEFNRRVKRNRIPFELANHTAILARIEHWKERYEDLNKQIDKTDFLLKRNSDNKDLKDNFIRKRHELRFQRDYWQNKYRRFTMKDVPEGFKNSQLVDTGIITKYSRLYLNTLFDKVYSVKGSTVADFRKLWGLQDEYKKKVRTNHIHHCIDAITIACITKEAYENLAKAYHKWEEVDRMKISDMPKVNPPWKNFVPDLKSIEKEVLISHYTPDVLPKQTKKKLREKGRIVKNKNGNPIYQQGDTVRGSLHQQTFYGAIEKTELKKNGETENVIKYVVRKPLDSLEDSSIKNIVDERVREIVRNAKKQEKEIQKQIENLLKQRRNADENEEAEIEANVTELKHQISELYCLPNKNGDPVPIKKVRIYQSSVKNPLHIKQQRDKSKKLPKPHKEHFHVANDSNYALVIYEGLDKNENIIRSFLIVNNLDAGKFFNSKSDKTPFPDKHPKYKDLYLKYLIKTGTLVLFWEMNSEELKNGDVNKVNRLYKVVKMNKDGRITFKYHQEARNDDSLKVDYRNEFGQNPPKSLTNGESYIDFEKPFAKLLLSPSKFKFLVEGYDFNLSETGVITWI

SEQ ID NO: 2526 - protein, 1346 aa, unidentified
  REGION 1..1346: note = Description of Unknown: Cas Enzyme sequence
MKILGLDLGTNSIGWAVVEKDDKKMALLQKGVRIFQEGVKIEKGIEGSKAAERTGYRSARRIKYRRKLRKINTLKALSDFGYCPKLTNEELNNWRYNKVYPENIAFKEWWLTDEETQKTPYFFRNLIVTSKLDLAKKEDRFAIGRAFYHMTQRRGFLSNRLEGTKESEGAVKKSIAEISKVKGDKTLGQYFYEKYQNGEKIRDTYTHREEHYLEEFKRICAFQDLPDTFVSQVHRAIFYQRPLKSQKGLIGKCVFEPTKPRCAVSRPEFEEYRMLCFINNIKIKTPNDEKMRPLNLKEREIVTPRFYLKRDHFDFEDIAKHLAPKKQYKFYKDLNKFPEDWLFNYSMNTTVSGCPVSARFMELFDDDFQNIQFKYLREKDDKKSVIDINDIWHVLYTFDSDEKLVDFARIRLSFNKEQIKEFLKIRLKQDYASLSLKAIRKILPYLREGLIYSHAVFLANMEEVIPSKIWCDDNNREIIRNEIHIIIQTQNEEKQILEIVNGFIKNNRGVVFAWSDEASGFYKKDLKEKVESHFGKNRYTTFSEEKKNRIEKSAFDLLKKQMQKNLGRGEFAKVQRIDDRVFNFITDNFDVKKEKLDKIYHPSAIDVFKPPVKGKDGQLYLGSPIVSSIRNPMAMRAIHQLRKVVNELIKNGIIDSNTKIHIEMSRGLLNANERKATQNWQHQNETIRKGSAAKIKEHLSGAEPTEDEILKYQLWEEQNHKCLYTGNEIGVSDFLGANPKYDIEHTIPRSQSFDNSQANKTLCENMFNRSVKKNRIPFELSNHSEILERIENWKDKYEELDKQINIAVRQAKGATDKDTKDRAIQKRHKLRYERDYWRNKYQRFTMEDVPEGFKNSQLVDTGIITKYSRMYLNTLFDKVYTVKGNTVADFRKMWGLQDEYEKKERVNHIHHCIDAVTIACITKENYENLAKFYHDWEDLYIKGVYQLPHADKPWETFTEDIKAIENEVLVSHYTPDVLPKQSKKKLRKRGIVQYNKKGEPIYLKGDTVRGSLHKETYYGAIERTVINKKGEKEKQIKYVVRKPLDSLEESNIKNIVDESVRKIVSDGRKMEKQFKKNIEGLKKKIQKADEWKEIEIQNQIKIIEQQITGLYSLPNKNGNTVSIKKVRIFQPTVTNPLNIKKQRDKSLSKSKSYKEEYHVVNDGNYMMAIYEGKDKNDKTKRDFEIVNNLDAGEFFKYSVQTLLKAQDLGKLDSLIPAKKVSGKIELPFKAVVKTGTMVVFWNKHSSEIWEISNIEKRKRLYKITKLNKDGRITFKFHQEASNDDMLRTCFEQLHGVKPPKSLTNGESKVNFKIPAPKLLLSPSNFNMLIEGVDFEITTLGEIRQLN

SEQ ID NO: 2527 - protein, 1225 aa, unidentified
  REGION 1..1225: note = Description of Unknown: Cas Enzyme sequence
MKKVLGLDLGVGSIGWCLVEKEDDNTPKRIIRMGSRIVPISSDEESGYTKGNAISKNADRTAKRTARKCYDRYQLRRQALVNLLKRLGMEPSKKLIFEQNPLELWQKRADAASKEITLEELGRVLLHINQKRGYKHSRLSNSDSKETAYVQEVNSRYDDLKAEGLTVGQHFAAKLKENEQTSADGKKYYNYRIKEQVYPRHAYEEEVEKILEVQSRFHADTLTPDVCKEIRDIIFYQRDLKSCKNLVSLCEIESYTIKKDGKEITIGPKVAPRTSPLAQLSSILETANNITIRNKRNDELYISPEQRKAIADFLDNNEVMKLTDLYKILNIGRKDGWWAGKAIGKGLKGNTTKYQIRKAMSNLPKDQVNSLTAFQLEYDEYVDEETGEVRKRINNTSAEKQPLYRLWHLLYSIKDVDELSGALRHLGIKDEESIQKLCNLDFRTAGYANKSAKAIGRILPYLMEGMMYSEACERAGFDHSRRINPDRKLQTSLPQIQKNELRQPVVEKILNQLINIVNALLEKEGIIDEIRIELARELKQSKDERNEAFKRNNQNERLNKEYAERIKEYGLTPTRNRIMKMKMWEESDYTCMYCGQPVNVTEFLKGADVEREHIIPRALLFDNSFTNQVCSCRRCNSQKGMRTAYDFIEDDKGQEGLNAYIERINDLFNRKNISRSKFNRLLVSHKAYISRKAQGKETEEDKELWENFIDRQLRQSQYIARKSVEMLQQVCKDVYTTSGSVTDFVRHQWGYDEILHDLNFERFKKAGLTTMVTQLHSGKEVEVERIKDWTKRLDNRHHAVDALAIACTTQGMIQRLNTLNASREGILDELNSKEERVVDPERSMLEKWIYTQPHISYAQAKEAIDNIIISQRPNIRITVPGKRYITQNRKRTLAQTGIIVPRGALHAEFVYGRIMKQGADGVTLTPQYVRKYKLGIGAQGFLFNGKEFYKEELKKDSKTDLSSIVVTDKIKDVLEKVVDGGIRQRILERLNRGFEEGTDYRANVAQALANLKNLDEDPIFSDDAKTRPIRTVRKYVSSSTMVAVRKDCNGKPIAFVEPDGNHHVAIYKDENGMITESIVTKWQAVQRKLNHIPVIIDNPSQTWSEIMGRNDVPEELLQTLPKDKSTLLLSLQIGEAFIMGMDDAEYQKAVEEKDMQALAEHLYFVQSISSSDYRFRRHIESQYDTNDINKEDLRFLRIRKIQALFEYNPQKVKVTVLGDIILLNT

SEQ ID NO: 2528 - protein, 941 aa, unidentified
  REGION 1..941: note = Description of Unknown: Cas Enzyme sequence
QAQHYPFLTKIKPKLESLVTFRIPYYVGPLTHHDEKRNGRNFAWSQRYTGTENKRIYPWNWESIIDKSASAEKFILRMTGKCTYLYGEDVLPRESLLYQEFCVLNELNGARWNCDGERRMPLSNEDCKAIYRQLFLKKQKVSYTDVSNYLKEQGHINNTVSGGQGERGFESTLSSHHFFRKLFNVDAADDLSAEQIKIAEQLILWGTIFEDKEIFKQEIEKHFGNMFSKEIDTIVRHKFSGWGKCSKRLLSGLTVETARGHESIIDVLRNGHPDNSRTLVFMQIITDKKLRFNEKIEECNNTYLANTNESILDTAIMSPAIKRGVTQALHIVNEIKQITKHDPKYIYIETTRDEKDGKDTKRPPLRSTKLEEYLKNLKSIDKAHEPEIIQTLELLKEYKEKIDDKLFLYFTQNGKCMYSGKPLDINNLSSYEIDHIIPRFYITDNSFDNRVLVYKRENQHKGDSLLDEAIQRKQRMFWSLLKKAELISQKKYDNLMRSKFSDAQLKGFINRQLVETSQIVKILRDELSRILPNTKIIPVKASLSHDVRIACDFYKSRRANSFHHAHDALLACTIGRFIQTRFPDMYENPVKYAKTMRDYIVQHNNQARHFNLRSFMAHTFFYDYSNENDDTIWNSASEIKRLRCALSYKNLYLTRRPFIYAGKFWDQTIYSPHDKNKTLESLIPLKKNLDIKKYGGYSGKGYAHFFIYSVLNKKGNVEYRFDGVPLYIAANINRDDRGALEQYAKKLVEHENVPNAKGKTKDLVFQRIERACVPKYQLICITQTNKNSKHLERNYYYITGVEEARNALQLIFPWHLCEAINTMDDNKKLGDSILEELAEYIRQTIPSIAPDVFSRLNLTEKLKNYLDIPERIKLQEAILGIIDLINAENNRCNLQILGGATHAGKTEHKLKKRLNDPATTVTFIDQSVTGMFERKETIGIS

SEQ ID NO: 2529 - protein, 1134 aa, unidentified
  REGION 1..1134: note = Description of Unknown: Cas Enzyme sequence
MSTDMKNYRIGVDVGDRSVGLAAIEFNDDGLPIQKLALVTFRHDGGLDPTKNKTPMSRKETRGIARRTMRMNRERKRRLHKLDKVLEGLGYTVPEGPEPETYEAWTSRALLASIKLASADELNEHLVRAVRHMARHRGWANPWWSLDQLERASQEPSETFEIILARARELFGEKVPANPTLGMLGALAANNEVLLRPRDKKKRKTGYVRGTPLMVAQVRQGDQLAELRRICEVQGIEDQYEALRLGVFDHKHPYVPKERVGKDPLNPSTNRTIRASLEFQEFRILDSVANLRVRTGSRAKRELTEAEYDAAVEFLMDYTDKEQPSWADVAEKIGVPGNRLVAPVLEDVQQKTAPFDRSSAAFEKAMGKKTEARQWWESTDDDQLRSLLIAFLVDATKDTEEAAAEAGLSELYMSWPAEEREALSNIDFEKGRVAYSQETLSKLSEYMHEYRVGLHEARKAVFGVDDTWRPPLDKLEEPTGQPAVDRVLTILRRFVLDCERQWGRPRAITVEHARTGLMGPTQRQKILNEQKKNRADNERIRDELRESGVDNPSRAEVRRHLIVQEQECQCLYCGTMITTTTSELDHIVPRAGGGSSRRENLAAVCRDCNAKKKRELFYAWAGPVKSQETIERVRQLRAFKDSKKAKMFKNQIRRLKQTEADEPIDERSLASTSYAAVAVRERLEQHFNEGLALDDKSRVVLDVYAGAVTRESRRAGGIDERILLRGERDKNRFDVRHHAVDAAVMTLLNRSVALTLEQRSQLRRTFYEQGLDKLDRDQLHPGEDWRNFTGLYPASQKKFLEWKDAATALGNVLAEAIEDDSIAVVSPLRLRPQNGSVHDETIDPVKKLTLGSAWSADDVKRIVDPEIYLAMKDALGKLKALPEDSARSLELSDGRFVEADDEVLFFSKKAASILTPRGAAEIGASIHHARLYSWLTKKGELKVGMLRVYGAEFPWLMRESGSRDILHMPIHPGSQSFRDMQDTTRKAVESGEAVEFAWITQNDELEFDPDDYIANGGKDELKQFLEFMPECRWRVDGFKDAGRVRMRPALLSREQLPSEIQDRLDTKSLSKGETVLVKALDDGLYISIGGLLHLESMKVIRRNNLGFPRWRGNGTLPTSFEVRSSALRALGAEG

SEQ ID NO: 2530 - protein, 1136 aa, unidentified
  REGION 1..1136: note = Description of Unknown: Cas Enzyme sequence
MSTDMKNYRIGVDVGDRSVGLAAIEFDDAGFPIQKLALVTFRHDGGLDPTENKSPKSRKETRGVARRTMRMNRRRKQRLRDLDKVLENLGYAVPEGPEPETYEAWTSRALLASIKLTSADELNEHLVRAVRHMARHRGWANPWWSLDQLEKASQEPSETFEIILARARELFGEKVPANPTLGMLGALAANNEVLMRPRRNYNAKEANNPKKAGKYLADYGTQPLMAAKVRQEDQLAELRRICEVQGIEDQYEALREAVFTHVRPYVPKDRVGKDPLNPSEIRASRASLEFQEFRILDAVANLRVRTDSRAKRELCEGEYDAAVDFLMSYTGKEQPSWADVAEEIGVPGNRLIAPVLEDVQQKTAPFDRSSAAFEKAMSKKTEARKWWESNDDDQLRSLFIMFLADATDDTAEAAVEAGLYELFESWPEEEREALSNIAFEAGRAGYSATTLSKLSEYMHEHRVGLHEARKAVFGVDDTWRPPLAKLEEQTGQPTVDRVLTILRRFVLDCERQWGPPQAITVEHARTGLMGPAQRQDILREQKKNREENERIRNELRESGVENPKRVDVRRHLVIQEQECQCLYCGTMITTTTSELDHIVPRAGGGSSRRENLAAVCRYCNAMKSNTPFYRWASPEKLKETIDRVRQLKAFKDPKKAKMLKNQIRRLKQTEADDPIDERSLASTSYAAVAVRERLEQHFNEGLAPDDNSRVTLDVYAGAVTRESRRAGGIDERILLRGEHDKNRFDVRHHAIDAAVMTLLNRSVALTLEQRHQLKRESMETKRDNGWSDFTGLAPASQEKFLEWRKAATVLGDLLAEAIEDDSIAVVSPLRLRPQNGAVHKDTIAAVKKQTLGSAWPADAVKRIVDPEIYLAMKDALGKLKELPEDSARSLELSDGRFVEADDEVLFFPKNAASILTPRGVAEIGESIHHARLYGWLTKKGELKVGMLRVYGAEFPWLIRESGSRNVLSMPIHPGSQSFRGMQDAVRKVVESGEAVEFAWITQNDELEFDPADYIAHGGKDELRQFLEFMPECRWRVDGFYDVGRLRIRPALLSREQFPLDIQRSLDEKKPLTVEQQVIVKSLEKGLAISLGNLMGLETMRVIRRNNLGFPRWRGNGNLPTSFEVRSSALRALGLEG

SEQ ID NO: 2531 - protein, 1341 aa, unidentified
  REGION 1..1341: note = Description of Unknown: Cas Enzyme sequence
MRFQNKKTGDYFVGLDIGTNSVGWAVTNEKYEILRAKNHRMWGSRLFEEGKTAEERRAHRAGRRRLTRRNDRLMILEELFAEEISKVDKAFYQRLHESQYRQEHKTVSGQYFLFNDKDFTDEDYHIDYPTIYHLRVALMKAPAKDIRLLFLAIHHIIKYRGNFLHEGETLKTTGGLTDILQRVLACNEFSGLKQHIDDTVLVKLLTNKGITRSDIAKQISELVTDKLYRKQAKAFASLVLGLKANLDDLFNEPEYKELDSEIRTVEFSGREYWEERDKYEPYLGESLFALDGCKTLYDTLLLSNIKPDGKYLSEAKVETFEKHHEHLESLKDLLKSNKALYNRVLRDDEKNLNNYITYIGKSEFNKRCSRDEFYKFLKQTIKDISDNENKAGIVKLMDLDSFLPLLRVRENGVIPYQIHEEELEQILNVSSEKYPFLNKADGSGFTIAQKILKLLTFRIPYFVGPLNPAHKDKENGFAWVVRKAPGKVYPWNFEDKVDISASATAFIENLTNKCTYLIGEDVLPKYSLAYSKFSLLNELNNLRYDGKPLSYETKQSFIKDCFEKEHRKMTEKRIREFLKRLGGTDGKGALTGLDVDIKSDLKSYRDMVRILGDGFDEVTAERIIRYVTLFGEAKKVLLSTLETEFGDDLSDTQKKQILKLQYRDWGRLSATFLKGIKGVAGDNPECSILECMEQQPLNLMEVLSSHNTYLAAIEEFNKERTEPTDVVDYKLVDDLYISPAVKRSVWQTLRILDEITKLRGSAPKKVFVEVARTNRAEKKKTDSRKERLLQLYKTIKDEERNWTEEIKQRDAGDFNSKKLFLYYTQQGRCMYSGEKITSIGDLFTSKYDIDHIYPRSVTKDNSWDNLVLVKAELNREKKDIYPIEKDTQDRCIGLWKQLLEQGLISERKYERLVRTTPLTADELADFVNRQLVETNQSVKAVTNLLKRLYPDTTICYVKAENVSDFRQEREFVKLRSLNAHHHAKDAYLNIVVGNIYHEKFTNNPRNFIKNARSDKKRPYSLNHMFDYLLQVGNKEIWNPKTDNNLVKKMMRNNDVQVTRMLVEQKGALYDATVYKASVTKADSYVPLKSSDAVLSDVKKYGGFTSIKIAYYSIFRFYKKDSEEFETHIISIPVLKADRLNSEEDYVAYGTGIMNKQKYDRVELVYKKLCMNSLVRINGVMYYLGGKTNNSLYIDSAISLVLQDDVAKKIKAVEKYIARVAENGNYKPQPDQVSPEINMIIYKALEEKMKQPAFSGLKTNRGSELEKDTTRTAFSAMSLLEQCKMLMEILNLLTQQKTTYALKPIGISASRSTLGMNITGLSEFTIITQSVTGLQEKEIRII

SEQ ID NO: 2532 - protein, 95 aa, unidentified
  REGION 1..95: note = Description of Unknown: Cas Enzyme sequence
MKKKTISPIALDLGAKNTGAYFAHYTENSSLADIEKDGKVYQLDNNSYTYLMQGRTAARHQRRCIKRRKLAKRLFKLIWENHFGLSTTTVGKRRK

SEQ ID NO: 2533 - protein, 1576 aa, unidentified
  REGION 1..1576: note = Description of Unknown: Cas Enzyme sequence
LGKDENSDGSYNLDSVLKELATEGDSVVKQLFETLNEKPKDIAVNNVFITRTEKLKEYAQVRINNQTITEKDKDKVKLAQLSQWILEKWSNSGVINLPQSIEKKSIDMVEYLNKLEPEKAQQIVDSLPPDVSDEKNTLKNSVWNFTIEKFDLDKNEDKFDKDGNPDIKTHLHHLAFAVYKILAELQSGSRYRSKYFDEVKDVLENEDHQQKYLKKLCQSLANGEFNGLNAKTLTNLIAHISNLELKPLRKYFNKPEFANSDQWDEQTLAQIVHNWLWNEWRVGEKDTKKVEKGEQDYQVIKAKWRKFHNVEPDKKIDKNLVKNVVDFWLKTEPAYTIPPYQDNNNRKPPKCQSLVLNVAELNACYPNWQQWLQNTEDTKEGQRYLADYKKTLTDVKSGKGATYFSDNFTGKLKKDSGKRTNEHLQARTLQFILDRTKKTDPFNLNEIYGLAKKIKQKSEGWQEYPTKLKEAIRNSQLPPELKSQAQNGIFDQHSFLHLICKYYKLRQRARDGRIFIHPKYKDNRYKGRGYEDSGRFETEGHLLIYCNHKPRQQRYLLGYDVAGVLQISPKKLKELAGSLEEKNIEQWLNESLNALPTRCKNAAKEQKDRRGNLKPDVSKIFGKLYYYRKEHNIDKEIELNKKQETAALNNSNVVDASTLYKECKAAKIAFTALMEKLGNHKAVNELQRNPVVALYFFSQLQNIVFKERQGNAKTCSICSADNALRMQVQPEFDNAKAQRLPAISVRIIDGAIKRIARIVGGRIADDKWQVIAQDLQNGHKVTVPIITESNAFEFEPSRHSLVNPKKVKKAEEKSQKIKNISETHFQEKNDRIKKASQGICPYIGDPIGEGSDKDHIIPRSSKWGTLNDETNFIWASDKGNRQIKVNKIFSLANLHTNYKAEIFGNKSDKQIEQWIEQTLEDDDSKKTDKFKFGVYRSFINLDPKEQKAFRHALFLVGTKLRDKVIKAIDNKNRTIVNGTQRYFASVIANNLYKKAKALGVERAISFDYFGIDNFNNDGVSVYDVRQQFEQVSDDINKFAKTDLAKQKDYSHLLDAQIAFMIAACEHRQSGSLKLNIPEYVKPSPLLVNQKTGEILTKQADTDDIEYLYTFSGSMLENIMVQPPETKADQDAMYKKLVAVSSNAKISNAVLQNTRLSHQKFSRLITKPIFKQNALGERFRPIVYYKDNWYIGYPQKLSNNEYDIEKYCVLLTKKTDCLKAKQIVKDNRYYKSHIKNSTIAIYTIKLVAGVKQLNIDSGQFFNTLDVSTLNEQQLAQAKQIEWIISNCRYYVQKTSVNNLTKVLINNENCKLPLIENWLRLDKKWRLYLKDCGLDYVAINEQSNDEVKTHFDKLCRDYFLNNKSKQPHTNVRGEFTMLAVASPSGTMYRINRGGKNVFQTVGIDTNIVSKNRSNFLVQNSKNIVPASKSPLKDLKAGISSEQEFTIDNEPIDALDIIFNDEFLQKLTEQQKANLSAYISKTSIAIANFPLSEFKKCLFTSNKELKEVNSIAVSKSNDDEDKIVVNKKKLKEVISATFRDGNIKEIKVAPEQSLINFDLPFKKDDIKKLWNQYQQNNTE

SEQ ID NO: 2534 - protein, 1377 aa, unidentified
  REGION 1..1377: note = Description of Unknown: Cas Enzyme sequence
MKRILGLDLGTTSIGWAVVDQAESEKEKSDIIKLGVRVNPLTVDEKDNFEKGKSVTTPADRTRCRGMRRSLQRYKQRREHLIDILTRHNIITDATVLCEGGNNTTFETYRLRAKAAKNEVSLDQLARVLLMINKKRGYKSNRKANNQEEGELIDGMAVARKLYDEHLTPGELTYDLLQNTKSRMIPSFYRSDLQAEFDKIWNEQAKYYPHVLTDEVREQLVGQNKRNTANLLKSLCHVEPAEIKDRKDRTLNYYRWRAQSVNQKMELEAVATALVEVNGAIAAASGYLGSISDRSKELEMNHMTVGEYLMSRLEQDPHYRIKNRVFYRQDYLNEFEAIWETQRKFHPELTDQLKEQIRDTVIFYQRKLKSQKGLIAYCEFESHEITVKNERGNDKKVITGLRVAPKSSPIYQEFKLWQVINNIVIYDEMAESPDGFALNQQQRVLLHDALCYTRELKKSAILKLLKLPAKRFNINYVAVPGNTTMASLVEGYKKVLEWSGHDIEGFDKMTAEQKLHQLTAVFGLLGAKTDFLSCGASVDEQSTLYKLWHLLYSYEGDNSRTGTESLPVRIAELTGLPVDYAKALIGITFQPDYGSLSAKAIKKILPFLRQGLVYSEACEKAGYRHSKASLTSDEIAQKQLKSALETITSGTLRNPVVEKILNQMIHVVNAAIREYGIENEKGEGPHFDEIHIEMARELKQTREQREKATERIARRTRETEQIVKILKGHPFDIPNPTRNDIIRYRLYEELAPLGYKTLYTGTYIAKEKLFSREFDIEHIIPQAKLFDDSQSNKTLESREANIEKGDQTALDYVAAKFGEQALEDYRARVGMIVDKKKREHLLTTGSDLPSGFLNRDLSDSQYIARKAKELLEQVTRRVVTTTGSITARLREDWQLIDVMKELNWDKYKAVGMTEEVKNKEGHTKRIIHDWTKRNDHRHHALDALTIAFTRLSHIQLINNVSANGGERLAPSAFAIQRKQLTKDGRFLPPMPLDQLRAMTLAHMSNILVSIKAKNKVVTPSVNRIKTKRGVKRQLTLTPRAQMHNETVYGQQMQYVTKNERVGAAFDRDKIMTVARKDYREAMMTRLDEFGGDAKKAFTGKNSLDKKPLYADAAHAIAVPAVVKTVTLEPRFTIRKPITKDLKVDKVVDKHVREILMQRLAEYNGDQAKAFANLDENPIWLNREKGIAIKSVTITGVNVAMPLHDKRDKSGQCILNEQGDKQPVDYVSTSNNHHVAIFEDADGNWQEHIVSFFEANERACQGLPVVDRLYNHDLGWKFLFTMKRNEYFVFPDQASGFNPAEVDLKDPKNSADVSQHLFRVQKLATKNYVFRHHLETNVQEEKELRNVTWIRVQNCNGLMGIVKVRVNHLGQIVDVGEY

SEQ ID NO: 2535 - protein, 1032 aa, unidentified
  REGION 1..1032: note = Description of Unknown: Cas Enzyme sequence
MPYELSLDLGTNSIGWAILDLNDGYEPYAIQASGVRIFSDGRNPKDGTTLCERRRLKRSERRRRDRFIKRRESLIKTLISFGIWPVEEQERKKLEKIDPYFLRYKGIKEKLTLEEFGRAIFHLNQRRGFKSNRKTPVQDDKEAKLIDNGVKYLAKKMEETSSCTYGEFLYNIRSSSKGIRIREGVDFYPSREILEAEFDQLFKTQSQYYPNILTPIVRDTLRSKIFYQRPLRPVNPGRCAFDPTIFRGAKAHPLFQRFRMWTEINNLQYSQDFGMPIQLTLEQKKLIFAHLERKGKLSFKSILKLLGIKNGHINLEAGGREELLGDQTGIALVKVFGESWWTFEDAFRIEVVETLLQENETILIETAQKWNFNPDQIQALLETQLPQGYSNLGISTIQKILPYLEKGLSNYDACVQAGYQPLGSPPTERLTELPFYSELPALRGYLGLNDQIANPTVHIALNQLRRVVNAIIAEYGAPFRVIIEVTRELKHTRKQKERISKRQNNNRKINEDATDLFRRLGIADNSANRFRYRLWREIPNPICVYTGEAIDERMLFSPEIEIDHLIPYADSLDDSISNCVLVKREANRDKRKRTPYDAFKDSQKYNWKEICKRVKVLAEISSQWESRAWRFDPKETAVSLVQSENQEYKLQPKDFLARQITDTAYIAKVARLYLQHITDPNQVYTVPGTLTVMFRYRWNLNSLLDNEIGTEKNRKDHRHHAIDAIVIGCLTRSMLHKVSLAAKKSSSHLIDVMPEPWPHFRQHVKEGLNQIQVSHKMDHGDNGQLFKETALGIVSEEDNLFVYRKPFLDLKEGDLDYIRGPIKAKIKEALRSNSDLKTILMALAKQEGIRRIRLYTRKNEVSRVRIVKHGKNKQYVKAYAIGESHHLRILEKDKRWIGQRIEYSDWNESLKKKSLIPIPSGYEVVMELFQGDTISITKDGKDLLLLVKSFTETGIQCAETHVAGKSHDIRESLSFNQMKRYNAQKVFVHPLGVERRQEVSSSPNQTLTFFNGMNCEIMNSVLNEELGLSLAK

SEQ ID NO: 2536 - protein, 1410 aa, unidentified
  REGION 1..1410: note = Description of Unknown: Cas Enzyme sequence
MDCIISPVTIDLGGKNTGLFLAQYAAGDAPDASHCLATTLVLPEEGGGITWSQKSRTATRHRVRGNKRRKLAKRLINHVFFEGLNRPLDQAEQQALHGLLNRRGYNRLERERDTGILERIDPYWFAEALPDYFTDHENLQDQLDRLCQQPDILRRLQMEALLSQNKNEFRKNLGSDYDAGEKKALTDAFDCIKGAITDSMNQIDYGHKHRRDYLKAIAAEIRHDTRLKKLREQLGERGLLNLIGNISNFQLRTLRWYFNDPAMQQSRAPFNNKRLHQCVQRWVYNFHPKEESERENRRKVLKKLDEESDILKALREIDPEWTIPPYEDQNNRRPPKDYALWLSPTKMEKHYGESWRIWAQKLMRANPDYAEGIDEILQQIDRNSRRKQEIDKDKLRHGYFLQRLLDRNKKLDDYALRELGAGRQSHRLENAHARLERDLGGQHMKGFLKFCRAYYDEVTHARQGTWFESERNLLERCDLNPPHKKRILHILVGNLLGEPLNPDQFKDFINRSWRRRHGRPTLMGLCRDVEETRKEYGNSFNERLKRLQYRLNEGHLTRRQLRGDDKRIWQAHEKTTQAAEIIAGYFTHTDEQKGRYDNPYSIAQLYTLIETDRHGFSSSTLATHQENNWRMQLVDLGEGEQAARCSRLPADSVRPFDGVLRRVLERQAWEIARIKFKQLQTLDIPNADIHIPIALEENRFTFTLSLVELKKAGTNRINKIKKIMERAGSPWLDKNERIKQASKDICPYTGNGIGRHGERDHIIPRSYSTNSRGTIYNSEANLIWCSRDGNQKKGNQLYTLSDLAPAYLRALYGTDAVDSITQTIENRILPLTDIPVFEEINDELLRDLRHALFLPRENAARQKAEQLLATQQRTRVNGTQAWLAKRIIQFIEELAGDWCRQHGHRLRFSVCRVDSREVSAIRQLLGEHNTKLAKPEPQPVASHAIDALCVLAQAAALPAWRDAFQLSAGLSEDMAWLARLLPAGIDIKRITSRPLYDKKPVSGRQLFKEGIYAENFLTIWYSRDGIRIGFEPNRAVPVEGRDPQQLLNILKPVLSSDVPEEAPAKPVRLVIHKTRAIELLHKVAKQPTSEDELTLADVLDVLRYCTSKKEIQSKLLKSSEREFKKKDDILKDGFTITLDINRKLGLPFVVKKSEITLPSKADWQRLCEHPQLAVRLGTKLEKDEYFDWHGLQEAVFRPGSKRAHGKTRRIFSLPVKDDPSGGFRIRRRTPDGNAIWQLHATEATYKAFAVVDGNIDWNRPVPMDYLLNSPDVSGLGQRHETVEKNVPFGQWLTVADNLGNGILRVDMAPGTKDRRYIRIHQATDQFFECLKAGGVDIDSSDFLQLDAEIKLPKDKRKRFNEALGYAWLGKPRSNLFIETLGKIIEYWYIVESSNQEMNQYYQKAYTELVE

SEQ ID NO: 2537 - protein, 1084 aa, unidentified
  REGION 1..1084: note = Description of Unknown: Cas Enzyme sequence
MWRLALDLGTNSIGWTALQLEFEGKDKPKPTEILDMGVRIFTDGREAKTGTPMNEARRNARQMRRQRDRKIRRKKAMLNFLINNKLMPHDKEKRLIVARLDPYQLRVAALERKLKPYELGRIMMQFSVRRGFKSGRKGQTEKTAEQEGMLGGIQTLEADLQGLTLGQWLFRQKEKGNSVRFKPVMEKSKILYSFYPSREMYETEFIAIMDKQKKYYKELNWERVYKIIFLQRPLKPSERGSCQFYTEEKRGYGAFVSAHRFRILQDINNLKYYNDENIEEEISSELKQKLFDALNTQKSLAFSKIRKTLGKDNTGSFNLEDSKRENLKGNETSFVLRKPEYFGSIWDDLTVQKQDEIIEQLMIEDDEKVIYDFLATFSLTTEQIKNISGYNFPAGTTMLSSKFMIDCSEVMLKEWIGYSDAVKKMGLSKKEARQIQRSLPYYGKILTGQVSGAKGEDYEGNDEEKYGRIANPTVHIALNQLRKLVNALVRRFGKPTEIIMEVNRELKSSRTKKEEEMKKQAKNQKDNERIRNEIKELGYLQVGSEDIKKYKLWEELAPEGIARRCPYCGKTISAKQLMSGAVEIDHILPYSRTLLNSRDNLIVAHRECNQAKRNRSPFEAFGNNTGGFDWNQIMDITAKLPYRKRRKFFPDAMTSFNEEEGGFLDRQLTDTAYLSKAGEKYLSVVCKSNAIWVSPGKLTALLRGFWGFNTLLNRGQETWYKNRSDHRHHALDSLVIGLCDRNIIAEAARINNNMSYREIHAPPCPIDRKVIEEHLKSIVVSYKPDHGIEGKLYAETAMAKHSYLEQINPTELGENEINRIVPKSIKEDIALLVEKEGFRKAKSLIQKKYKFLRVFRDKWVSRTPLESIKDISRIADLVIRDRIQALLNSKSGKVGQKLEDVLAQFSKKNGIYSVRYFPKDQVPVSIKDNANKAYMPDDFYRVDIWRLPEQKGKTKYEGVFVSRPVAMQGHEYNEETGFLQKPHPAAKLIMSLCKNDVVQLSNKTTQEFCRIAGYATTRNKIDIRPIYASDTIAAWKKNTNTNLTSAFWPSDIEGQNFKSINVLFNEFDVKKIKITIDGKLNCRS

SEQ ID NO: 2538 - protein, 1086 aa, unidentified
  REGION 1..1086: note = Description of Unknown: Cas Enzyme sequence
MWRLALDLGSNSIGWTALELDNEAKPKPIKILDMGVRIFSDGREAKTGTPLNEARRNARQMRRQRDRKIRRKMAMFNFLVNNKLMPNEREKQHSIAQMDPYILRVASLERKLKPFELSRIMMQFSVRRGFKSGRKDQQTENNAEKEGMLGGIETLKTELHGLTLGQWLCKQREAGNSVRFKARTEKTKIIYTFYPSREMYENEFAAIRKKQEPYYKDINWERLHWLIFFQRPLKRPERGRCQFYADEDRGYKAFPSAHRFRILQDITNLRYYNDENKEEQIPSELKLKLFETLNTQKSISFDRIRKLFGENYTGSFNLEDNKRDKLKGNETSVEFRKPEYFGKVWDEQDVKKQDEIIEKLMIEDDESVIFNFLKPFGLTNEQIQKISGYNIPVGTTMLSSRFMIDCSEVMQKDWMQYSEAVKHMGLHHSKKEQKELRRSLPYYGKVLVGQVSGARGESFKGNDEKQYGYIPNPTVHIALNQLRKLVNALIRRYGNPNQIIMEVSRYLKLSKTKKDELFREQTKNQKDNERLKKELTDLGLIKIGSEDIKKYKLWEELAVEGIARLCPYCGKTISASQIISGNVEIDHILPYSRTLLNSRDNLTVAHRQCNQIKKNQSPFEAFGNNQKNYDWNRITELAAKLPFNKRRKFYPDAMKKFNEEEGGFLDRQITDTAYLSKASKEYLSVICKNNNIWVTPGRLTALLRAFWGLNTILNRGHDTWYKNRSDHRHHALDALVIGLCDRNLLSEAARINSGRGYSEIDAPSCPIKRNEIEERLKLIIISYKLDHGKEGKLYAETALSKHSYLEQINSDELKENEIHRIVPKTIQNDIFQLVQKEGFRKAKIIFQKKYKYLRIFQDKWVTRAPLESLSERDIPNIADKLLREKIQKYITSNPIQTGQKLQDVLSKFSQKTSIFIVRYFHKDQVPVLIDSCDNKAYMPGDFYCVDIWRIPQSEGKYKYEGVFISRPEAVRQPLLCEKKAKRHDHPAAKFIMRLCKNDIILLQNNNEQEFCRIAGFATTRNKVDIRPLYASDSIASWKKNTNINLTTAFWSPDIENQNFKSINVLFNEYEIKLVKITVDGKLIYRS

SEQ ID NO: 2539 - protein, 1084 aa, unidentified
  REGION 1..1084: note = Description of Unknown: Cas Enzyme sequence
MWRLALDMGTSSIGWSALDIENPENVKILDMGVRIFPDGREPKTGMPLNEARRNARQMRRQRDRKIRRKKTMLSFLVNNGLMPKEREEQQTVAQLDPYTLRTAALDRKLKPFELGRIMMQFSVRRGFKSGRKEQQAENTAEREGMLGGIQSLETELRGLTLGQWLCKQREVGNSVRFKAKMEKTKIIYSFYPSREMYETEFDAIRKKQEKYYKEINWDRLHWLIFFQRPLKRPERGRCQFYTEEERGYRAFPSANRFRILQDINNLRYYNEENREEIIPSELKLILFEALNSQKSLSFDRIRKLLGENYTGSFNLEDSKRDKLKGNETSVDFRKPELFGPSWDKMDFKKQDEIIEKLMIEDDENVIYDFLKPFGLSEKQIQKISGYNLPVGTTMLSSHFMIDCSEIMLKEWLPYSEAVKKMGLHHSKKDKQKIQHSIPYYGKILTGLVSGAKGESYKGNDEERYGRIANPTVHIALNQLRKLVNALVRRFGNPDQVIMEVARELKLSKTRKDELFKEQSKNQKENERIKKELTDLGVVQVSSEYIKKYKLWEELAVEGIARLCPYCGKTISAKQLISGDVEVEHILPYSRTLLNSRDNLTVAHRKCNQAKKNQSPFEAFGDSPKGFDWNRIMELAAKLPFNKRRKFYPDAMVRFHEDEGGFIDRQITDTAYLSTASKDYLSAICDSNAIWVSPGRLTAMLRGLWGFNTLLNRGHDTWFKNRSDHRHHALDALVIGLCNRHLIAEAARINSSKGYSEINAPPCPVKRIDIEEQLKSIVVSYKQDHGKEGKLYAETALAKHSYVEQINPEELGEKDINRIVPKKIQTDIALLIQKEGFRKAKTLIQKKYKHINVFRDKWVTRAPLESLSERDIPNIADPVIREHIQKFVKSHPVQTGQKLQDVLARFSKKTGIYSLRYFPKDQIPVSINSCNNKAYMPGDYYRVDIWRIPQPKGKYKYDGVFISRPEAIWQQLHGIAAVSLQKPHPAAKLIMSLCKNDIITLSNETEQEFCRIAGFATTNNKIDIRPLYASDTIATWKKDTNINLCSAFWPSNIEGQYFKSINVLFSEYKIKLVKITVDGRPIYRS

SEQ ID NO: 2540 - protein, 953 aa, unidentified
  REGION 1..953: note = Description of Unknown: Cas Enzyme sequence
KEQQAENTAEREGMLGGIQSLETELRGLTLGQWLCKQREADNSVRFKAKIEKTKIIYSFYPSREMYETEFDAIRKKQEKYYKEINWDRLHWLIFFQRPLKRPERGRCQFYIEEERGYRAFPSAHRFRILQEINNLRYYNEENREEIIPSELKLKLFEALNSQKSLSFDRIRKLLGEDYTGSFNLEDSKRDKLKGNETSVDFRKPELFGPSWDKLDFKKQDEIIEKLMIEDDENAIYDFLKPFGLSEKQIQKISGYNLPVGTTMLSSHFIIDCSEIMLKEWLPYSEAVKKMGLHHSKKDKLEIQRSLPYYGKVLTGLVSGAKGESYKGNDEERYGRIANPTVHIALNQLRKLVNALVRRFGNPDQVIMEVARELKLSKTKKDELFREQTKNQKENERIEEELKDLGLLKISSEDKKKYKLWEELAVEGIARLCPYCGKTISAKQLISGDVEIEHILPYSRTLLNSRDNLTVAHRKCNQVKKNQSPFEAFGNSPKGFDWNRIMELAVKFPFNKRRKFYPDAMVRFHEDEGGFIDRQITDTAYLSTASKDYFSAICDSNAIWVSPGRLTAMLRGLWGFNTLLNRGHDTWFKNRSDHRHHALDALVIGLCNRHLIAEAARINSSKGYSEIDAPPCSVKRNDIENQLKSIVVSYKQDHGKEGKLYAETALAKHSYVEQINPEDLGEKEINRIVPKKIQADITFLVQKEGFRKTKTLIQKKYKHINVFRDKWVTRAPLESLSERDIPNIADPIIREQVQKFIKTHPIKTGQKLQDVLARFSEKTGIYSLRYFPKDQIPVSIDSCNNKAYMPGDYYRVDIWQIPQPKGKYKYDGVFVSRPDAMRQQLHGDDAVSLQKPHPAAKFIISLCKNDIIVLSNETMQEFCRIAGFATTNNKIDIRPLYASDTIAIWKKNTNINLCSTFWPSDIEGQYFKSINVLFSENKIKLVKITVDGRVIYRS

SEQ ID NO: 2541 - protein, 1090 aa, unidentified
  REGION 1..1090: note = Description of Unknown: Cas Enzyme sequence
LIEEVIMWRLALDMGTSSIGWLALDIGNPENVKILDMGVRIFPDGREPQKGTPLNEARRNARQMRRQRDRKIRRKKAMLSFLINNGLMPKEQEEQHGIAQLDPYTLRTAALERKLKPFELGRIMMQFSIRRGFKSGRKEQQTENTAEREGMLGGIQSLETELRGLTLGQWLCKQRETGNSVRFKAKMEKTKIIYSFYPSREMYEIEFAAIRKKQEKYYKEINWDRLHWLIFFQRPLKRPERGRCQFYTEEERGYRAFPSAHRFRILQDINNLRYYNEENREEIIPSELKLKLFEALNSQKSLSFDRIRKLLGENYTGSFNLEDSKRDKLKGNETSVEFRKPEFFGTIWDKLDFKKQDEIIEELMIEDDESVIYDFLKPFELSEKQIQKISGYNLPVGTTMLSSHFMIDCSEIMLKEWLPYSEAVKKMGLHHSKKDKQEIQHSLPYYGKVLTGLVSGAKGESYKGNDEERYGRIANPTVHIALNQLRKLVNALIRRFGNPDQIIMEVARELKLSKTKKDELFREQSKNQKENERIEKELKALGLLKISSEDKKKYKLWEELAVEGITRLCPYCGKTISAKQLISGDVEIEHILPYSRTLLNSRDNLTVAHRKCNQAKKNQSPFEAFGNSPKGFDWNRIIELAAKLPFNKRRKFYPDAMVRFHEDEGGFIDRQITDTAYLSKASKDYLSAICDSNAIWVSPGRLTAMLRGLWGFNTLLNRGHDTWFKNRSDHRHHALDALVIGLCNRHLIAEAARINSSRGYSEIDAPPCPVKRIDIEEQLKSIVVSYKQDHGKEGKLYAETALAKHSYVEQINPEELGEKDINRIVPKKIQADIALLVQKEGFRKAKTLIKKKYKHINVFRDKWVTRAPLESLSERDILNIADPLIKEQIQKFVKSHPVQTGQKLQDVLARFSQKTGIYSLRYFHKDQIPVFINSCNNKAYMPGDYYRVDIWRIPQQKGKYKYDGVFVSRPEAMRQQLYGIDAVLLKKPHPAAKLIMSLCKNDIIILSNETEQEFCRIAGFSTTQNKVDIRPLYASDSIAAWKKDTNINICSAFWPSDVEGHYYKSINVLFSEYKIRLVKITVDGRQIYRS

SEQ ID NO: 2542 - protein, 1091 aa, unidentified
  REGION 1..1091: note = Description of Unknown: Cas Enzyme sequence
MWRLALDLGSNSIGWAALSLAKPKLDKEKPKVTKIIDMGVRVFPDGREAKTGTPLNEARRIARQMRRQRDRKIRRKKAMITFLINNKLMPEARDEQMAVARFDPYQLRADALERKLKPFELGRIMMQFSVRRGFKSGRKQQAENTAEQEGMLGGIQSLESELRNNTLGQWLCKQREAGYPVRFNPKIEKTKVIYTFYPSREMYETEFNAIRKKQEKYYKDINWNRLHWLIFFQRPLKRPERGRCQFFTEEERGYRAFPSAHRFRILQDINNLKYYNEENRVEDIPSELKLKLFDALNAQKSLSFDKIRKMLGENYSGSFNLEDKKREKLKGNETSVDFRKPEFFGQVWDTINIQKQDEIIEKLMIEDDENAISEYLSNFDLTNDQILKISGYNLPVGTTMLSSRFMIDCSEIMLKEWLPYSNAVEKMGLHHSKKGKQEIHRSLPYYGKILVGQVNGARERNYDSNVEEQYGRIANPTVHIALNQLRKLVNALIRRFGNPDQIIMEVTRELKLSRERKNELFREQAKNQRNNERIKKELADLGLLRISGDDIKKYKLWEELAPEGIARRCPYCGRTISAKQLVSGIVEIEHILPYSRTLLNSHDNLTVAHRECNQAKKNKSPFEAFGNSPIGFDWNRILENINKLPFSKRRKFFPDAMVRFHEAEEGFMDKQLTDTAYLAKASKEYLSVICDSNSIWVSPGRLTAMLRGFWGYNTLLNRGHDTWYKNRSDHRHHALDALVIGQCDRSIISDAARINSGRGYSEIDAPPCPIMRQDIEKWLKSIIVSYKTDHGKEGKLYAETALAKHSYLEQINPDNLKEDEIKRIVPKVIQEDIEHLVQKEGFKKAKTIIKNKYKFLRVFRDKWVTRAPLTSLSERDIPNISDPVLREEVLDYVNKHPIQSGEKLQDILARFSEKKQVYSVRYFPKDQVPVSIDSCNNKAYMPNDYYRVDVWLIPLKKEQFKYEGVFISRPDAMQKRSNSDNTCFLKKPHPAAKWIMSLCKNDIITLSINGKLEYCRIAGFSTTKNSIDIRPIYASDTIASWIKNTNTNLTSSFWPHDCENQNFKSINMLFSKYQPKIVKSAVDGRPLNRYL

SEQ ID NO: 2543 - protein, 1085 aa, unidentified
  REGION 1..1085: note = Description of Unknown: Cas Enzyme sequence
MWRLALDLGTNSIGWTSLELDNEAKPIKILDMGARIFSDGREAKTGTPLNEARRNARQMRRQRDRKIRRKNAMLNFLVNNKLMPKEREEQHSIAQLDPYILRAAALERKLKLFELGRVMMQFSVRRGFKSGRKDQQAENKAEKEGMLGGIETLKTELQGFTLGQWLCKHREAGNSVRFKAKTEKTKIIYTIYPSREMYENEFAAIRKKQETYYKEINWDRLHWLIFFQRPLKRPERGRCQFYTDEDRGYKAFPSAHRFRILQDITNLRYYNDENIEEQIPSELKLKLFETLNSQKSISFDRIRKLFGENYTGSFNLEDNKRDKLKGNETSVEFRKPEYFGKVWDEQDIKKQDEIIEKLMIEDDESVIYNFLKTFGLTNEQVQKISGYNIPVGTTMISSRFMIDCSEVMIKEWMQYSEAVKYMGLHHSKKEQKEIQRSLPYYGKVLAGQVSGARGESFKGNDEKQYGYIPNPTVHIALNQLRKLVNALIRRYGNPNQIIMEVSRDLKLSKTRKDELFREQTKNQRNNERIKKELSDLGLIKVGSEDIKKYKLWEELAAEGIARLCPYCGKTISANQLLSGNVEIDHILPYSRTLLNSRDNLTAAHRQCNQIKKNQSPFEAFGNNPKGYDWNRIMELAAKLPFNKRRKFYPDAMKKFNEEEGGFLDRQITDTAYLSRASKEYLSVICKSSNIWVTPGRLTALLRGFWGLNTLLNRGHDTWYKNRSDHRHHALDALVIGLCDRNLLSEAARINSGRGYREIDAPSCPIKRNEIEEKLKLIIISYKLDHGKEGKLYAETALSKHSYIEQINSDDLKENEICRIVPKSIQNDISQIIQKEGFKKAKIIFQKKYKYFNIFQDKWVTRAPLESLSERDIPNIADKILREKIQIFVTSNPVKTGQKLQDVLNKYSNKTGIFSIRYFPKDQVPVSINSCDNKAYMPGDFYCADIWKIPQSKGKYKYEGVFISRPEAMRQLLLGGKNVKRHEHSAAKLLMRLCKNDIILLQNDNEQEFCRIAGFATTRNLIDIRPLYASDTIASWKKNTNINLTTAFWSPDIESQNFKSINVLFNEYKIKMVKITVDGKLIYRSS

SEQ ID NO: 2544 - protein, 1052 aa, unidentified
  REGION 1..1052: note = Description of Unknown: Cas Enzyme sequence
GVRNLLRGRGSQDGNPPKRSPAGCQAMRRQRDRKIRRKKAMLKFLVNNKLMPCDRDEQQAIARLDPYMLRNAALERKLKPFELGRILMQLSVRRGFKSGRKGQQAENKAEQEGMLGGIQSLESKLQGLTLGQWLYQQREAGHSVRFKAKLEKSKAIYSVYPSREMYETEFTAILKKQEKYFKDINWERLHWLIFFQRPLKRPERGRCQFYTEEDRGYKAFVSAHRFRILQEINNLRYYNEKNIEEKIPAELKLKLFEALNLHKSLSFDRIRKLFGDDYTGSFNLEDSKRDKLKGNETSVDFRKPEFFGKIWDELEIRKQDEIIEKLMIEDDENVIRNLLKTFELSDEQIKNISGYNLPVGTTMLSSRFMIDCSEIMLKELLPYSEAVKQMGLHHSEREKREIQRSLPYYGKILVGQVSGAKGESFDGNEEERYGRIANPTVHIALNQLRKLVNALIRRYGNPDQVIMEVNRELKQSKALKDEIFREQAKNQKANERIRNELTELRLLQIGSEDIKKYKLWEELASEGIARRCPYCGKNISANQLITGTIEIDHILPYSRTLLNSRDNLTVAHRECNQAKKNQSPFEAFGNSPKGFDWNRIMELTAKLPFNKRRKFYPDAMNRFHEEEGGFIDRQITDTAYLSKAGKDYLSAICDSKAIWVSPGRLTARLRGFWGFNTLLNRGHDTWYKNRSDHRHHAIDALVIGLCDRSIIAEAARINSGRFYGEITAPPCPIKRHDIEERLKSIIISYKSDHGTEGKLYAETALAKHSYLEQISPADLEENEINRIVPKTIKEDVSLLVQKEGFKKAKALIKSKYKYLRVFRDKWVTRAPLISLSERDLPNISDPIIRADITEFVKSQSEQKIQDVLAQYGEKKKIYSVRFFPKDQVPVCIEDNPNKAYMPGDYYKVDIWQVPLNKGKCKYEGVFISRPEAMRQSLLDDTDHLRKPHPAAKLVISLCKNDIISLSKNEDSPSEHEFCRIAGFSTTVNCIDIRPVFASDTIADWKKNTHIALCSSFWPSDIKGQYFKSINALFNEYVIKLVKITVDGRLIYR

SEQ ID NO: 2545 - protein, 1087 aa, unidentified
  REGION 1..1087: note = Description of Unknown: Cas Enzyme sequence
MYRLSLDLGTNSIGWSVLELDNAKSPKVKKILDMGVRIFSDGREAKTGTPLNEVRRNARQMRRQRDRKIRRRKAMLNFLINNNLMPQDRDEQQVAARLDPYTMRTAAMERKLKPFELGRIMMQFSIRRGFKSGRKENQAENTAEREGMLGGVHSLESALEGLTLGQWLCKQREKRNSVRFKPTMEKTKIIYSFYPSREMYENEFAVIRKKQEKYYKELNWERLYWLIFFQRPLKRPERGRCQFYTEEERGYKAFVSAHRFRILQDVNNLKYYNEKNIEEEIPSELKIKLFDSLDSQKSLSFDRIRKLLGENYTGSFNLEDSKRDKLRGNETSVDFRKPELFGPTWDKLPVKEQDTIIEKLIIEDDENVIHNSLITYGLNDDQIKKISGYNFPTGTTMLSSRFMIDCSEIMLKEWCPYYEAVKLMGLHHSKKEKQKIQRSLPYYGKILIGQVSDAKGEGFNGNDEVRYGRIANPTVHIALNQLRKLVNALIRRFGNPDQIIMEVTRNLKQSKAMKDEIFEEQAKNYKDNERIKKELTDLGLLQISSEDIKKYKLWEELAPEGIARRCPYCGRTISAKQLMSGAVEIEHILPYSRTLLNSRDNLTVAHRECNQKKNNQSPFEAFGSNPKGFDWNRIMELTTKLPFKKRQKFFPDAMVRFNEKEEGFIDKQLTDTAYLSKASKDYLSVICDSNAIWVSPGRLTSLLRGFWGLNTLLNREHDTWYKNRSDHRHHALDALVIGLCDRRIISEAARINSGRGYREIDAPSCPIKKKDIEDRLKSIIISYKQDHGIEGKLYADTALAKRSYLEQITPMDLEEKEINHIVPKTIQTDIANLVQKEGFRKAKSMIQNKYKYLRVFRDKWVTRTPLVSLSERDIPNIADADIREQILKFLKSHPVQSGQKLQDVLTLFSKKNKIYSIRYFYKDQVPVSIEDNTNKAYMPGDYYRVDIWRIPQQKGKYKYEGVFISRPQAIKQQTYGDNTGSLRKPHSAAKLIMSICKNDIIILSNKTEQEFCRIAGFSTTQNKIDIRPLYASDTIASWKKDTNSNLCSAFWPLNIEGHFFKSINVLFNEYEIKLVKITVDGRQIYRY

SEQ ID NO: 2546 - protein, 1084 aa, unidentified
  REGION 1..1084: note = Description of Unknown: Cas Enzyme sequence
MWRLALDMGTSSIGWTALDIENPENIKILGMGVRIFPDGREPKTGTPLNEARRNARQMRRQRDRKIRRKRAMLSFLVNNGLMPKEREEQQVVARFDPYTLRAAALERKLKPSELGRIMMQFSVRRGFKSGRKEQQAENTAEREGMLGGIQFLETELQGLTLGQWLCKQREAGNPVRFKPTMEKTKIIYSFYPSREMYETEFAAIRKKQEKYYKEINWDRIYWLIFFQRPLKRPERGRCQFYTEEERGYRAFPSAHRFRILQEINNLRYYNEENKEEILPPELRLKLFEALNSQKSLSFDRVRKILGEDHTGSFNLEDSKRDKLKGNETSVDFRKSELFGTLWDELDIQKQDEIIEKLMIEDDENAISDFLKPFGLTKEQIQKISGYHLPVGTTMLSSRFMIDCSELMLKEWLPYSEAVKKMGLHHSKKEKQDIRHSLPYYGKILTGLVSGAKGEGYKGNDEECYGRIANPTVHIALNQLRKLVNALIRRFGNPDQIIMEVARELKLSKTRKDELFREQTKNQKDNERIKKELTDLGLLQISSEDIKKYKLWEELATDGIARLCPYCGKTISAKQLVSGAVEIEHILPYSRTLLNSRDNLTVAHRECNHAKKNQSPFEAFGNSPKGFNWDRIMELAAKLPFNKRRKFYPDAMVRFHEDEGGFIDRQITDTAYLSKASKDYLSAICDSNAIWVSPGRLTAMLRGCWGFNTLLNRGHDTWFKNRSDHRHHALDALVIGLCNRHLIAEAARINSGRGYSEINVPPCLIKRNDIEERLKSIIVSYKQDHGKEGKLYAETALAKHSYVEQINPEDLEEKEINRIVPKKIQDNIVLLVQKEGFRKAKALIQKKYKHLNVFRDKWVTRAPLESLSERDIPNIADPIIREHIQKFIKSHPVQTGQKLQDVLVRFSKKTGIYSLRYFPKDQIPVSIDSCNNKAYMPGDYYRVDIWQIPQSEGKYKYEGVFVSRPEAMRQQLHGDDTVSLRKPHPAAKLIMRLCKNDNIALSNETEQELCRIAGFSTTQNKIDIRPLYASDTIATWKKNTNINLCSDFWPSGIEGQYYKSINVLFNEYEIELVKITVDGRPVYRS

SEQ ID NO: 2547 - protein, 1078 aa, unidentified
  REGION 1..1078: note = Description of Unknown: Cas Enzyme sequence
MWRLALDLGTNSIGWTALRLKNTKKPQIHNIIDIGVRIFPDGREPQKGTPLNEARRNARQMRRQRDRKIRRKRAMLNFLVNNKLMPREREEQQAVAQLDPYALRVAALERKLKPFELGRVMMQFSVRRGFKSGRKEQAENTAEQEGMLGGIESLKTELQGLTLGQWLCKRREAGDSVRFKAQIEKTKVIYDFYPSREMYETEFTAIREKQEKHFKEINWDRLHWLIFFQRPLKRPERGRCQFYTDEERGYRSFPSAHRFRILQDINNLRYYNEKNREEPIPSELKLTLFEALNSQKSLSFDRIRKLLGEDYAGSFNLEDNKRDKLKGNETSVDFRKPELFGPAWDELEIQKQDEIVEKLMIEDDENVIRDCLKPLGLTEEQIKEISGKNLPTGTTMLSSRFMIDCSAIMLKEWLPYSEAVKQMGLHHSKKEKQEIQRSLPYYGKILVGQVSGAKGENYKGDDEEQFGRIANPTVHIALNQLRKLVNALIRHYGNPSQIIMEVTRELKLSKTKKDELFREQAKNQKDNERIRKELTDLGLLKISSEDIKKYKLWEELAVEGIARLCPYCGKTISAKQLISGNVEIEHILPYSRTLLNSRDNLTVAHRECNQAKKNQSPFEAFGNSPKGFDWNRIMELAAKLPFSKRRKFFPDAMDHFHEEEGGFLDRQITDTAYLSKAGKEYLSVICNNNAIWVTPGRLTSLLRRFWGLNTLLNRGHEKTRSDHRHHALDALVIGLCDRGLLAEAARLNSNRGYREIDAPPCPIERRDIEERLKSIIVSYKQDHGKEGKLYAETAMAKHSYLEQINPDDLKENEINRIVPKTIQNDIAALVKKEGFRKAKTSIQGKYKYLRVFRDKWVTRAPLESLSERDLPNIADTLLRKQIQKYVETHPIKAGQKLQDVLNKFGDKTGIYSIRYFPKDQKPDTIRSCNNKAYMPGDYYRVDVWKIPQAKGKYKFEGVFISRPEAMRKDVPLKRHEHYAAKLIMRLCKNDIIVLSNETGQEFCRIAGFSATQNKVDIRPLYASDTIATWKKDTNINLTSAFWPSDIEGQYYKSINVLFNEYEIKLVKITVDGRLIYRS

SEQ ID NO: 2548 - protein, 1135 aa, unidentified
  REGION 1..1135: note = Description of Unknown: Cas Enzyme sequence
MQWRLGLDVGTNSIGWVVLKLSNKALKPNGVGDMGVRIFPDGREPSQKDRVGDSLAVGRRQSRGMRRNRDRRQKRLRRCAKAMVRMGLLPKKESERKVVFQDVDPYQARYLAATENVDKKTLARALMHLCKRRGFLSNRKTDSCNGDKEKKEGSKAKTGDKDKKLTERMRVFERYLHERDITLGQYLCERLSCRIVEENGLETDQRVRFNGNDVWETIDDEERAVYPKRQMYVDEFQAIRKKQRNRHLNDRQWNELLDIICFQRPLLKQEVGICTFERGEERASKHLPVSHRFRIIQEVNNLSFTENGTTRILAQQQRNQLIALLEEQETTTFSAAKTKLGLSRSGYFNLEGSVGDKKRGELNGNKTACKMRKVFANHDHDWDALDSKTQNDYVQLLFDVETDGEFKQAVQNNGRALPTALIEDMLAVSFTSSYGRLSHVAMEKLIKPMSAEDDADEDSAGMLYWQAAHHVYGGHTDRDFDSGKLLDKLPYYGQVLPDAMTPVRKNGIVSPQEKEHGRIPNPTVHVALNQIKRVVNELIDIHGKPDEIHIELAREIKNSAKKCQEITQAINANTKENERRKKLIAAARGIDEDDVTGIEVIKCKLWEELANSDRAGDAGSLARVDVYTGRNISLVECLSDEVEIEHILPYKMTRDDSMANKTITFREVNRAKGKRVPYRYAIEDGEDAAQEMIERAARLPRNKRWRFHEDALDHYEKMITNKLTPAEKEKFDADREGGFIDRQLVDTQYISKTAARYLATLVGRDNVVPVNGRMTAILRRQWKLEESKAKGTDQERDDHRHHAIDALVVAMTNRAMIKSITAYTKKKQDLRGESKARLYVPQLDGKIRSQMQDIYDDINVSYKPDHRLNGKFYEETAYGFLPNDAPERVEGYNAVVRRKLTALKAASKRKKSEVEAIRNPQVRNAIIEALDTAQVKSKGKWEDKLAFLAKEGVLICGYRRYIRRVKILINVSTLEAIPSAPYKGYPPAERAFCDIWRIPVKKTKSNPDGFRYKGRFVTYAQAKHFENPKKPDRVFDAELFEELRRLRLIHPAAKHMMRLFKNDMVMVEDDKGDKYLMRVASFNTTRNKLVLQPHFQSKAGQEEKTIPDLMTPQQKEGKLTKMKKVLITPAGRLIL

SEQ ID NO: 2549 - protein, 1122 aa, unidentified
  REGION 1..1122: note = Description of Unknown: Cas Enzyme sequence
MRVLSNFNFYKSKEECYTDFMKYRLGLDLGTNSIGWAVYSLDYENEPQKLEDMGVRIFPDGRDPKTKEPLAVSRRIARGQRKIIYRRKLRRKATFRLLQEQGLFPKTKDETQKLKTLNPYELRVKALDEKLEPSELARVLFNLSVRRGFKSNRKDTSNEETVASSNSEKLSQKDMSDMLSNAIKEANCRTLGEFLWKNQEKNHGIRFVPGRMSYYPLRKMYEDEFFAIRAVQEPFFKSIDWEGIYNSIFFQRKLQSQERGCCQFMSDKKRTFKSMPCAQKLRILQEIRNLNYQNEEGKTLPISEEQEDILLSLLDSKEKVTFDAFRKALKLNSACTFNLEKNRDFLLGNATAVKMCHKNRFGDLWDSLSLEDQDLIIEKLITADEDSEILALLEKYNLTDEQKDSILKLQLQTGTTMLCKEASEKLVHKMESDSAYTYTAAVESLGYKYADQTVEKFDELPYYGKVLIGSTMGVNPSADESKPEQKYGKISNPTVHVALNQTRVVVNALIKQYGKPAQIAIELSRDLKASRDAKEAIQKKQNENKKRNEITNINIRDANPNIQYPNRNDRLKYRLWEELGAEGLPRKCLYCGKTISGAELFSKNIEIEHILPFSRTLLDAESNLTVAHSSCNAFKKERSPYEAFGSNPKGFNWEEILMRANQLKNPAKRRRFAIDAMESFEKDSGFIARQLTDNAYLSKMAMKYLKSVCDNIWSVNGGMTKLLRDRWEIDSILKRKIGDTEIVHFGLKDEQIGEYKKNRYDHRHHALDASVIALIDRSIVKEISTLNARSQKNRIEVPPMAVPRLELQEKVKNIVVSFKPDHGAEGKLSKETLLGKIKREELLEISKVEEADIPLIKSDKVRKDFEEKFTETKDIKQVRKAFKDVYPQVKVFKEFFVSRTAISSLKESNIEDIVDDKIRNKLQDFVALHKGEKFEELLERFSEQTGIKKVRCINRVQTPIVINGDVPRYLAPEDYFAAIIWQIPPKKEGAKPTFEAQYIRRTEVGKDNRPKAAVIEAWKKQHHPAAKNLGILHKNDYLEFCDGGKWYKCRVAGFSATQNKLDIRPIYSVTDCKDWIIATDENQLEECWKLQKAQNWLSVNVLFGEKEARFITVNPIGRVFRK

SEQ ID NO: 2550 - protein, 1098 aa, unidentified
  REGION 1..1098: note = Description of Unknown: Cas Enzyme sequence
MKYRLGLDLGTNSIGWAVYALDSDNEPIELTDMGVRIFSDGRDPQTKEPLAVARRTARGQRKLIYRHKLRRKATFRLLQEQGLFPKTKEETQKLKSLNPYELRVKALDTKLEPYELARVLFNLSVRRGFKSNRKDAAGTETGSSQTTAKEKLSQGEKCAELTKAIAESGCRTLGEFLWKHQQKNRGLRFVPGRTDYYPLRSMYTDEFNAIRAVQEPFYKTISWQAVYDAIFFQRRLEPQERGRCRYMPEKERTFKAMPCAQKVRMLQDIRNLNYRNECGQTVPVTESESQVLLKLLDTKEKVTFDAFRKALHLNEACVFNLERSREFLPGNKTAVKLRGENFFGSLWDTLSLETQDTIVEKLITADDDDEVRALLEHYELTDTQLQAIVKVQLPAGTTMLCREASEQLVHKMETTGCDFTTAVQALGYKDAEQTVEKSDTLPYYGKVLIGSTMGADPAAGEDTPELKYGKIGNPTVHVALNQTRTVVNALIRQYGKPAQIVVELSRDLKASREAKAAIQKKQRENKARNELLNKNITEAYNIPYPNRSDRLRYRLWEELGAGSLPRKCLYCGKTISGAELFSKNIEIEHILPYSRTLLDAESNLTVAHASCNAFKKERSPYEAFGSSPNGYSWQHILDRANQLKNPAKRARFAEDAMQAFEKESGFIARQLTDNAYLSKMALKYLKCVCEDIWAVNGGMTKLLRDEWRIDSILKRKIDDKEIAYFGLTDAQIGEYKKNRYDHRHHALDASVIALIDRSLVQRISTLNARSQKNRIEVPPMAVPRLELQEKVRHIVVSFKPDHGAQGKLSKETLLGKIKQETLVAVGSLEADDIPLIKNDRVRADFEKELAQSQDIKRVRKALKDVYPQVKVYKEYYVARTALAELKEKNIEDIVDCKIRTSLQDFAKRHTGEKFENILEQFSRQTGIQKIRCINRVQTPIVIDRTVPRYLAPEDYFAAIIWQIPPKKDGIRATYEAQYIRRTEVGKDNKPKASAVRPPHPAAKNLGILHKDDYLEFCDSDQWYKCRVAGFSATQNKLDIRPVSAVTDCADWIITTNDMQLERCWKQKKGQNYISVNILFGEKQARFITVNPIGRVFRK

SEQ ID NO: 2551 - protein, 1091 aa, unidentified
  REGION 1..1091: note = Description of Unknown: Cas Enzyme sequence
MWRLALDLGTNSIGWTALRLKNAQKPQIHNIIDMGVRIFPDGREPQKGTPLNEARRNARQMRRQRDRKIRRKRAMLNFLVNNKLMPKEREERQDIARLDPYTLRVAALERKLKPFELGRIMMQFSVRRGFKSGRKGQAENTAEQEGMLGGIESLKTELQGLTLGQWFCKRREAGDSVRFKAKIEKTKIIYDFYPSREMYEAEFAAIREKQQKHFKEINWDWLHKIIFFQRPLKRPERGRCQFYTDEERGYKAFPSAHWFRILQDINNLKYYNKENREEPIPSELKQKLFEALNSQKSLSFDRIRRLLGENYTGSFNLEDNKRDKLKGNETSVDFRKPELFGPAWDELEIQKQDEIIEKLMIEDNEDVMRDFLRSFGLAEEQIHNISSYKLPVGTAMLSSRFMIDCSAIMLKDWLPYSETVKQMGLHHSKKGGQDIQHSLPYYGKILVGQVSGAKGESYKGNEEEQFGRIANPTVHIALNQLRKLVNALIRRYGNPSEIIMEVNRELKLSKTKKDEIFREQTKNQKDNERIRKELTDLGLLQISSEDIKKFKLWEELATEGIARLCPYCGKTISAKQLISGNVEIEHILPYSRTLLNSRDNLTVAHRDCNQKKKNMSPFEAFGNSPKGFDWNRIMELAAKLPFKKRRKFFPDAMDRFHEEKGEEEGGFLDRQITDTAYLSKASKEYLSVICNNNAIWVTPGRLTSLLRGFWGFNTLLNRGHDTWFKNRNDHRHHALDALVIGLSDRGLLAEAAKLNSGRGYREIDAPPCPVKRNDIEEQLKSIIVSYKQDHGKEGKLYAETAMAKHSYLEQINPDDLKENEINRIVPKAIQNDIAALVKKEGFRKAKTAIQGKYKYFRVFRDKWVTRAPLESLSDRDIPNIADPLIRGQIQKYIESHPLKAGQKLQDVLTMFGNKKKIYSVRYFPKDQVPVPIESCNNKAYMPGDFYRVDIWKIPQQKGKYKFEGVFISRPEAMRQKLHGEDTASLRKPHSAAKLIISLCKNDVVKLANETVQEFCRIAGFSTTNNSIDIRPIYASDTIAAWKKDTDINLTSAFWPSNIEGHYFKSINALFNEYEIKLVKITVDGRLIYRSL

SEQ ID NO: 2552 - protein, 1347 aa, unidentified
  REGION 1..1347: note = Description of Unknown: Cas Enzyme sequence
MPIYLGLDIGSNSVGSAWVNTDTGEIVTGISIFPAGVDESDEKRGDPKNAKRRMARRTRITLARRSERKRALRLKLIAAGLLPRTQQEFALLLETTDPWDLRRRGLDEPLHPYEFGRVLLHLAQRRGALGLKPIADDIATDESAVEDGKVKAAIQDVRQKMLDRKARSFGEFIAMLRAERVNPITTKDARAPHRRKGPREFRTAVRNRGGNYEHCSDRAMIQSEFAQLWDAQERFGGETAKLLLPDLRAQLDSPSTDSTWRHRGLLFGQRRQSWDLGTLGRCVLEPTERCAPHADMYASKYLVVETVNNLKIIERGKEARPLTPEERNKIKNYLCGPLGMEKGRKRKGDTKHAAERPKTKVSVADLRELMGWPRASKSSPYSFNIEADEDRLINTDWFSREIIHGAITPAIWESLTQDQREGLNRALLKFDPSEPKDEAKLLQGVTTWGGLSADAAAKLVAAWRLRPNPETKRLSLSRRAVRNLLALMDRDEPWPDPEQPGKTRWLSQVAARRMIAADGDFEDVTTGKKLDDHTRRRYATGTKGATARDRRYLRKHILRENGEPIFDDQGHPISEPPPAPLVSNPVVRKAIHEVRRHVVEYLVRFGRRPDYVCVELAREARMGKRDADRLLFKNRLRNRIRNDILTTFHLDSVSATQQRAAVDRVVLGAQQGWVCPLCGQRDGLTPMNAAHGRGCELAHILPRGSGGDNGLGNLVLAHTKCNRDMDRRTPRQFWEASLPGGFDAGVIWIEKIYSNVERIKPAELKSTTGDALWACYFDTRDDRRKLEQFKKNISDIKTMTERQDAATKYASRQVMSYLADALFGGEGLPERGGQRRIFTTDGIWTSRLRREWGLFFDPHQKRAKGLSNTQVQERKEKDRGDHRHHAIDAIVIALCDSSLKARWDERERQADRERINTADEAQMDSFRKSHPLLPPSAFSSVGGLRAAVQEAVFGHEKQERPICHRPVKRKLIGALHEETLFGPILDRAGQLTSYFTARKSVLSLTPKHLRLPRPESTDQAIARLAARRQQAKGVDSKTARNWAKEVVASSSFIPRLVEPLPEKSGIVRDIALRKRIRQCLSEAGVNPDSFSTNELKKVVEQGALRQASGVPIRSVVLLRAMSDPVIVPRKRPDYETGKLLPDDNPASMRAYLSGNNHHLEIRVSKDKHGKDIVRGQIVSAFEAAQRKLARLRAIRMAGVPKPSKLRRLPKKERLQWRTVLKSIDAANPIVDRRYDDAKGGQFLMSLCEGETLWLRQKPRKKGDPCGDASYFVVAKLEKGDNAVLVPHWDARAAGEQKDSSGNKVPNSKREQFSITPSDLKTLAPPGHPFAVKVRVSALGKVTVLKND

SEQ ID NO: 2553 - protein, 1082 aa, unidentified
  REGION 1..1082: note = Description of Unknown: Cas Enzyme sequence
MTTRLGLDIGTNSIGWCLYDGDSIRAIGSRIFSDGREPSKLPIPGSGTSLAVKRREARGMRRRRDRYLGRRDAMLRELRKHGLLPFDDLAGKALAAEDPYDLRVRALSEEISPYQLGRALFHLNQRRGFKSNRKADRKSADEKDAGKIAPATKLLDAEMKRLGAQTLGQFLVMRDQESGGTKGKRVRMRPDADGYDFYPDRRHILDEFRAIWDVQKAYHPALLSDAAWHDIFRIIEFQRDLKPAVVGLCTFAGMNGVPDDELRLPKAHPLFQQRRLYEEVNQLAVVAAGAASRPLSVQERDTLILKLRDKKKVSFETLGKAIKLKDGERFNKESENRKELAGDEVRAELSGKKLFGTRWPHFSGEEQCEIIDRLLEEENSQTLIGWLKARYGLDDASAEAIGNARLPEGHGRFGLTATKALLEQLRADDVPTYAQAAERAGFHHSDHRTGEDFDELPYYGEVLTREIAPGKDDYGDAEERRFGKITNPTVHIGLRQLGRLVNAIIRAYGKPDFIFVELARELKMNEKEKIAYSKQIKVNTDAARARSDKLGTMAMRDSGRNRLILRLWSDLNPGNVLDRRCPYCGEMISQGMIRNGEVDIDHIIPYSQCFDDSIGNKVLAHGRCNKAKGNDTPWGRWGRDPVRWAKIQDQVSRLHKSKQWRFGPDAIARYQTQEGSFLPRQLTDTQYLTRIAAKYLACLYPVRGERHVFAVHGSMTAMLRRLWGLNDILPDHNWVENEHSNAPKNRLDHRHHAIDAAVVGVMTPALIAEIAKAAARAEDKKLDRLFDGLPMPWARHEGDYRFRDELREKVLATTVSHKADHGRAGKPVKGRDVTTGKLHKETAYGLTGLTSDSGLPIVVHRVPLASLTPADLTDPLRIPDSALQRALYEATEGLSGKDFERAVLEFSRKHPIFKGIRRLRVREGLTVIPIKDKTGRAFKGYMGGANALYTIWQMPDGKWITHWKDRNGNLKSGIISSFDHHQHGYQEERPHPAAKKVMALRQNDMVALEKDGSRKIYRVQKFGQNGQIFLIEHAQAGNMVERNKSGNDPFTFWGPSASALQKVKARQIRIDELGRIFDPGPR

SEQ ID NO: 2554 - protein, 1070 aa, unidentified
  REGION 1..1070: note = Description of Unknown: Cas Enzyme sequence
MTTRLGLDIGTNSIGWCLYDGDSIRDIGVRIFSDGREPSKLAVSGSGTPLAVKRREARGARRRRDRYIGRRSAMLRELRRHGLLPADPELARALETQDPYALRVRALDEKLEPHQIGRALFHLNQRRGFKSNRKAERTSKAGEDGKIATATRLLDEDMRRLGARTLGEFLVKRDHESNGTMGKRVRMRADSKAYDFYPDRRHVLDEFRAIWDAQKAWYPDLLTPQAWNGIYRVIEYQRPLKPQIVGPCTFAGINGVPTDEKRLPKAHPLFQQRRLYEEVNQLRVVAPGAAGRPLTLDERDALILKLQDKKSVSFDTLGKTLKLKDGERFNKEGENRKALDGDEVRAELSHKKLFGPRWFHFSAEEQWTIIERLLEEEDSDTLLTWLKSEYGLDDETALAVANAKLPEGHGRFGLTATKALLKEYKADVCTYAEAAKRAGFHHSDFRTGEAFDQLPYYGEILSREIAPGKPEYGDANERRFGKITNPTVHIGLNQLARLVSAIIRVHGKPDQIFVELARELKLNEKEKVAYNRQLKENTDAARDRGAKLGTMGVRDTGRNRLILRLWTELNPKDVLNRRCPYCGENIGQAHIRNNDVEIDHIVPYSQSYDDGIGNKVLVHTWCNREKGSQTPWERWGHDPDRWSIIQEQVAHLHRSKQWRFGPDARDRYAAEEGSFLPRQLVDTQYLTRIAAKYLACLYPERGERHVFAVHGGMTAMLRRLWDLNSILPDHNWVDNKESNAPKNRLDHRHHAIDAAVVGIMTPALIAEIAKAAARAEKQNLDRLFEDLPMPWARHPNDRRFRDELREKILAATVSHKADHGRRGKPEPGRDITAGKLHNDTAYGFTGLISDTGLPVVVHRVPLASLTPKDIADPDRIPDTALRDALWQATRDVAGKEFEKALLDFSRTHPHFRGIRRVRVREGLTLIPIRDRTGKPYKGYLGDSNARYNVWQMPDGRWVHQVISTFDLHQPGFIEQRPHPAAKKVLSLRQNDLIAIERDGGPRQIMRVQKYGQNGQIFLIEHNEAGNMTERNKNPDDPFKFYGPGASALKNMKARQVRVDELGRIFDPGPR

SEQ ID NO: 2555 - protein, 1090 aa, unidentified
  REGION 1..1090: note = Description of Unknown: Cas Enzyme sequence
MSYRPPSYSNNSFAFDVGTNSIGWCVFDLDETRQPIRVRDCGVRIFSDGRDPKSRTSLAVARREARAMARSRDRYLRRRKKTLSVLTEYGLMPADDAERKRLLAETVDHPAGSDIPKTDPYNLRLRALTGKLPLFQIGRALFHLGQRRGFKSNRKTDKKSNDKGKIDVGIGELKKQIQEAGAATLGAYLATRRSQGHVVRIRAGSEASGEADGYAFYPERSMLEDEFHKIWEAQSAFYPDVLTAGRRDHLFKVIFYQRPLKKPKIGRCSFNPNEERLAKAHPLFQEFRLYKEVNELGVRMPDMSIRKLTVEERDTLVSLLRPKRKIAFSTLRKALKLPAGVTFNKESESRKDIAGDEIYAAMSDKKLFGPQWADFSQEKQWDVIGHLREEEEPQALREWLYSNFRLDDAQVEAVADARLPEGYGRLGQSALAAMLEELKSDVIPEAKAAENCGYDHSLFNRDNEGLDKLPCYQEVLERHIPPGTGDPDDIYDIQKGRITNPTVHIGLNQLRKITNALLRKYGKPVEIAVELARDLQLSDKQKREVNSKIAENTRAARGRSEKLKELGQHDNGYNRQLLKLWEELNEKPENRICIYSGRPINIGMLFSGEVDIDHILPWSRTLDDSQANKLLCLKKYNREKGNHAPAEVTEWANKYDKIIERASCLPKNKQWRFAHDAMQRFEKEGGFLARQLTDTQYLSRMALEYLNALYPAEEPDKDGVFQRRKHVRVVPGRLTELLRRNWGLNSILADHNIANTNHLKNRSDHRHHAIDAAVVGVTSQSLLQKISSAAARPEGVDFENSIKRIVAASLPWQGFRDNLEQAINILVVSHKADHGTVSRAGYGKGEGQTAGQLHNETAYGLTGEKDEKGNTIVVRRKLFLSLKAKDIDSIRDEDLKAELYTAVAGLAEDKQFQEALLHFQKNHKRYKGIRRVRVTETLNVIPIRNAQGLIYKGYKGDANYRYDVWKTLDDKWIGEVISMFEIHQPGWKSKVHSENPTAKKVLSLHQNDMVAYDHPDDGYTIARVVKFDINKNIVFAPHFEADVDKRSRDKDDPFKYFTKTPNGLKKIHCRQIRIDPVGKVFDPGLILRNR

SEQ ID NO: 2556 - protein, 1081 aa, unidentified
  REGION 1..1081: note = Description of Unknown: Cas Enzyme sequence
MTVRLGLDLGSNSLGWCLVEVDADGRDDRFIGIGSRIFSDGRVPKSGASLAVDRRKARAARRRRDRFIGRRSAFMQALREFGLMPTERAAAKALEKLGPYELRAKALDEKLEPYHLGRALFHLNQRRGFKSNRKTERKDKDSEKEQAKIASGAKALDEAMKKLDARTYGEFLFKKAKKNEAGGKKAEMRVRMGGKNQAYDFYPERRHYEKEFEKIWEKQAGFHPDLPTGEARKRLYDILFYQRDLRPQEVGACTFAGVNGVPKVARRLPRAHPLFQETRLYQEVNQLEVTAPGERSRKLTLDERDRLIMRLSKSKRVTFKSLGKLLKLADGESFNKASENRKHLIGNETFAEFSNKKRLGNRWAHFSPDERWTIIERVKDEQDPVKLHDWLTREYDLDEDTAREVAAAKIPEGYGRLGEMATRAILTELKEDVITYDEAVRRAGFASHSDLDRTGEILDQLPYYGEVLARDIPPGSLDSREKNPEVRWGRITNPTVHIGLNQLRRVVNAIIARHGRPDEIVIELGRELKMSEKQKADYRRTLKKNTAAAKRRSETLLAMGKPDSGANRMLLRLWEESNPADALNRRCAYCGVQIKAGMLMNGGIDIDHVIPYSRSLDDSASNKVVVHRHCNREKDDKTPWGKWGGTDRWPVIAEQVGYLHKSKQWRFGPDAMERVERDGGFIARQLNDTQYLSRMAGKYLNRLYEAEREAGERRVFVIPGRMAAMLRRLWGLNDILWDHNIVENPHSNAPKNRLDHRHHAIDAAVVAVTRNSLLMQVARAAARAEARELDRLFADLPQPWPGFREELRDVVTATVVSHKAEHGLGKKALKDPQQTAAQLHNDTAYGLTGEVNEKDVPIIRYRVPLLGLKPKDFMDPDRIVDTDLRDALYRATQGLSGRDYYRALEEFSKRSGPYQGIRRVRIRKPLNVIPVRDKSGKAYKAYQGDANSRYDIWQMPPDKKGRRKWVAVVISTFDIHQPDFDEQARRPHPAAKKIMSLRQDDLIAIERDGGPRQIMRVQKYNQSGQIYIVEHNEAGNLTQRDKNPDDRFKMFGPYPSRLQKMKARQIRIDELGEIRDPGPRE

SEQ ID NO: 2557 - protein, 1343 aa, unidentified
  REGION 1..1343: note = Description of Unknown: Cas Enzyme sequence
VHRLAFDIGSNSVGSAWIDTENGTITTGTSVFPAGVDETDDKRGEPKNAKRRQTRRTRITLARRSSRKTELRLKLIAEGLLPPTEPAFRKLLSATDPWALRKKGLDQPLTPPEFGRVLLHLAQRRGALGLTISTVTEEDADAPSDDGKVKKSIGIVRQKMLERKARTFGEFIAAVRTERVTLIKTPDNRRADRRSGPREYRDAVRNKASNYEHCADRAMIRHEFQTLWNAQKKFGGELSQRLNDELLVTLDDERGDSLWRHKGLLFGQRRQTWDLGTLGRCVLEPTERCVPHVDQYASRFLVVETVNNLRIIEGRSPPRQLTTEERKKVLNYLSGPLGTTPVRRKNTDSAPSLAKPKTTASVTDLRILMGWGRATKTSPFRFNVENDEDRVINTDWFSREIIHGAVAVEAWSDLAQSVRVGINRALLKFDPDDESHAQRLREGLLSWGTLNEAQTEAVLSAWRRRPNIAAKRLAMSRRAVRNILSRMDREAPWPDNKPSSGYRWLTAIEARKAVAEDPTFIDCTTGKPLDGIARERYATGAKGSTARDRYYMRKHVLTRAGKPILDPNGAPLSEPPPAPLISNPVVRKAIHEVRRHLVAYMKKFGRKPDQVIIELSREARMGKMEADRLLMRNRLRNRIRNDITDEFSLDSLSPAQQRAAFVRVILSVQQDGVCPLCGNTTGKQVITPRLAAEGRDCEVAHIIPRACGGHDGLSNIVLAHTKCNRDMNRRTPREFWTAAVPGGVDAAMTWVEAIYRDVDRPKPSEVRSAKGNALWKCYFTRRDDLTKLEQFLKNVTDIQGMTARQDAATKYAARQVMSYLADALYEGQGLPERGGTRRIFASDGIWTSRLRREWGLFFDVHGARRKDIGEGERNDRREKNRGDHRHHAIDAIVICCTTTDVQNEWAQRERIAERAIPNSADEAVMEAYRRQNPMRPPIPFRSPAAFQGAAEQSVFGTSEEGKPVCHRPVKRKLIGAFHEETLLGPVVSATGSFTGLFTCKKAITSLKPNHLRMPHPESKKDAISRLAAGRITNKYLSKIEARKWALEIVTAASYKPMLIDPPPAKSGVVRDIGLRRRIRECISIAGIDPDSFRPGEIKKLAELGVIRQHSGVPIRSAVLLRSMSDPVIIDRQKPEYGSSNRSVDPSLRSRRAYIGGNNHHVEVRIDSKNKYTGVVISAFGASQRKLSKLKAFRREEIPRPSEFQNLSSSEKERLRPIIREIEFSHPIVDRRDDDSKGGAFVMSLCEGETLLMRAKMPGGEIGPPGFFVVAKLEKPNVIVLVPHWDARSATDRKDADEKPVAGSRRQQFSIVPSDLPILAPDNATLPIKVSVDPLGFPSPLPGD

SEQ ID NO: 2558 - protein, 1098 aa, unidentified
  REGION 1..1098: note = Description of Unknown: Cas Enzyme sequence
MKYRLGLDLGTNSIGWAVYSLDSENEPNELVDMGVRIFSDGRDPKTKEPLAVARRTARGQRKLIYRRKLRRKSVFRLLQQQNLFPKTKEESQKLKALNPYMLRVKALDEKLEPYELARVLFNLSVRRGFKSNRKDGSGEEEVTSKSGEKLSQKDMCNELAKAIKESGCRTIGEFLWKNKDKNKGLRFVPGRMTYYPLRQMYIDEFNAIRTVQEAFYKSVDWEAIFDEIFFQRPLKAQERGRCQYMQEKERTFKAMPCAQKLRMLQEVRNMDYQNERGQKIPLSEEDEKIILNLLDTKDKVTFDAIRKALKLTGACTFNLESTSRTSLNGNTTAVKLRNKNRFGELWDTLSLEEQDSIVEKLITADEDKEIYDLLEKYNLTDEQKESIVKVQLPAGTTMLCKEVSEKLVQKMESGSAFTYTAAVESLGYKYADQTVEKYDMLPYYGKVLVGSTMGIDPSKPEDKPELKYGKISNPTVHVALNQTRTVVNALIKQYGKPSQIALELSRDLKASREAKDAMLKKQNENKKRNEILNKNITDAYKIAYPNRNDRLKYRLWEELGAEGLPRKCIYCGKNISGAELFSKSIEIEHILPYSRTLLDAESNLTVAHASCNAFKKERSPYEAFGSNPSGYNWNEILARANQLKNPAKRGRFSVDAMETFEKESGFIARQLTDNSYLSKMALRYLKSVCDNIWSVNGGMTKLLRDKWEIDSILKRKIDEKEIAYFGLKDEQIGEYKKNRYDHRHHALDASVIALIDRSLVKEISTLNARSQKNRIEVPPMAVPRIELQEKVKNIVVSFKPDHGAEGKLSKETLLGKIKREEVVELSKIEEGDIPFIKNEKVRGDFESKFAESKDIKRVRKEFKDIYPQVKIFRECFVSRSPIASLKENNIEDIVDVKIRSRLQDFYALHKGEKFEDLLQKFSEETKIKKVRCLNRVQTPIVINSEVPRYLAPEDYFAAIIWQIPPKKDGAKPTYEAQYIRRNEVGKDNKPKAGVVKTPHPAAKNLGILHKNDYLEFSESGKWYKCRVAGFSATQNKLDIRPVFAVTDCKDWIIATNETLLESCWKQQKGQNFYSVNVLFGEKQARFITVNPIGRVFRK

SEQ ID NO: 2559 - protein, 1089 aa, unidentified
  REGION 1..1089: note = Description of Unknown: Cas Enzyme sequence
GVRIFSDGRDPKTKEPLAVERRTARGLRRILYRRKMRRKQMFRLLREQGLMPNDPSEATALKSLNPYELRVRALDAKLEAYELGRALFNLSVRRGFKSNRKEAVQEKEKDSQNDVKSQNEKCERLANAIKDSGCRTLGEFLWKHKNTETEQTENDARDIGMRFAPGRSNYYPTRRMYVEEFDAIRKVQEPYYSGVNWDALYEKLFYQRPLRAQERGKCRYMPDKERTFKAMPCSQKIRILQEVYNMDYIDALGKAFPIGNAQTDMLIALLDKKEKLTFKAMKKELGLDESCTFNLERGGREYLQGNTTAVKLRNKNRFGELWDSLSLAEQDAIVEKLITADEDAEIISILEQYDLTDEQKKNIAATVLPSGTSMLCKEVTEMLVQKMEQNKIPLTVAVQMLGYRYADQSVHEENELPYYGAVLTGSTMGAHPEQDESKPELKYGKISNPTVHVALNQTRTVVNTLIKAYGKPQQIVVELSRDLKASREAKARIQQTITANQKRNERDNKNITEITKIPYPNRDERLKYRLWEELGSDSFSRKCLYCGKTISGSEIFTKNIEIEHILPFGRTLFDGETNKTVAHTNCNRDKGNRSPFEAFGSNPSGYNWHEICARANSLKNPAKRALFAENAMEKFEKGSSFIDRQLTDNAYLSRSALRYLRCICKDVWPVNGGMTKLLRDKWNIDSILKRKIDDPEIAYFELKNEQIGQYKKNRYDHRHHALDASVIALIDRAMVQEISRLNKIRLTNRIEAPQMPVLRSELIEKVKHITVSFKPDHGRQGKLSKETLLGKIKKIEKVDIDSIQTDDDIASIKDDAVRTRFETKRRELGTLTKVRASLKTEFPKLDVFKTYYVSRTPILSLTEKNIDNSIVDEKIKEKLKTFIKEHADLSFAEQLQKFSETEWIGKPSADGKPGKKYRIVKVRCINRVQTPIPITSSAVPRYLCPEDYLAAVVWQMPAKKKDAEPEYQATYLRRDEFDVNNKPKKLEKPHDAAKYICMLYKDDYLEFTESGATHLCRIAGFAATRNNIDIRPIYAVSDCKDWIIATNENMLESCWKPQKGQNHVSVNVLFGKRKAHSVTVNPIGRVFRK

SEQ ID NO: 2560 - protein, 1127 aa, unidentified
  REGION 1..1127: note = Description of Unknown: Cas Enzyme sequence
MNDKNQKYRLGLDLGTNSIGWCIYSLDVDNKPETLIDMGVRIFSDGRDPKTKEPLAVERRTARGLRRILHRRKLRRKQMFRLLQEQGLMPNDASEAAALKSLNPYELRVKALDTKLEPYKLGRALFNLSVRRGFKSNRKEAVQEKEKDSQNDAKSQNEKCEHLAKAIKDSGCRTLGEFLWKHKNTETQQTENDARDIGMRFAPGRSNYYPTRRMYVEEFDAIRKVQEPYYSGVNWDALHEKLFYQRPLRAQERGKCRYMPDKERTFKAMPCSQKIRILQEVYNMDYIDEYGKTIPLEEAQTDSLISLLDKKEKLSFKAMKKELGIDESCTFNLERGGREYLQGNVTAVKLRNKNRFGELWDSLSLAEQDAIVEKLITADEDAEIISMLAQYNLTDEQKKKIVATVLPSGTAMLCKEVTEMLVEKMEQNKIPLTVAVQMLGYTYADQSVHEESELPYYGTILTGSTMGAHPEADESEPELKYGKISNPTVHVALNQTRTVVNALIKAYGKPQQIVVELSRDLKASREAKARIQKTITENQKRNERDNKNITDITKIPYPNRDDRLKYRLWEELGSDSLSRKCLYCGKTISGAEVFTKDIEIEHILPFGRTLFDGETNKTIAHTSCNAFKKDRSPFEAFGSSPNGYNWHDIRARANSLKNPAKRALFAKNAMEKFEKDSSFIDRQLIDNAYLSRSALWYLRCICKDVWSVNGGMTKLLRDKWNIDSILKRKIDDPEIAHFELKNDQIGQYKKNRYDHRHHALDASVIALIDRAMVQEISRLNKKRLKNRIEAPQMPVRRSELIEKVKHITVSFKPDHGWQGKLSKETLLGKIKKIEKVDIDSIKTDDDIASIKDDAIRTRFETKCREFGNMTKVRAALKTEFPKLDVFKTYYVSRTPIVSLTEKNIDSIVDEKIKEKLKTFIKEHADLSFAEQLQKFSETEWIGKPNAAGKPGKKYRIEKVRCINWGQTPITITSSAVPRYLCPEDYLAAVVWQIPSKTKNAEPEYKATFLRRDEFDVNNKPKKLEKPHDAAKYICMLYKDDYLEFTESGATHLCRIAGLPASQNNKIDIRPIYAVSDCKDWIIATNENMLEPCWKPQKEEKRISVNVLFGKHKARSVTVNPIGRVFRK

SEQ ID NO: 2561 - protein, 1127 aa, unidentified
  REGION 1..1127: note = Description of Unknown: Cas Enzyme sequence
MNDKNQRYRLGLDLGTNSIGWCIYSLDGTNKPDALIDMGVRIFSDGRDPKTKEPLAVERRTARGLRRILHRRKLRRKQMFRLLQEQGLMPNDVSEAVALKSLNPYELRVKALDAKLEPYELGRVLFNLSVRRGFKSNRKEAVQEKEKDSQNDAKSQNEKCERLAKAIKDSGCRTLGEFLWKHKNTETPQMENDTSDIGMRFKSGRSNYYPTRQMYVEEFDAIRKAQEPYYSGVNWDALYEKLFYQRPLRAQERGKCRYMPDKERTFKAMPCSQKIRILQEVYNMDYIDEYGKTIPLEEAQTDSLISLLDKREKLSFKAMKKELGLDEACTFNLERGGREYLQGNVTAVKLRNKNRFGELWDSLSLTEQDAIVEKLITADEDAEIISTLAQYDLTDEQKENIVTTVLPSGTAMLCKEVTEMLVEKMEQNKIPLTVAVQMLGYTYADQSVHEEDTLPYYGAILTGSTMGAHPEADESKPELKYGKISNPTVHVALNQTRTVVNTLIKAYGKPQQIVVELSRDLKASREAKARIQKTITMNQKRNERDNKNITEITKIPYPNRNDRLKYRLWEELGSDSFSRKCLYCGKPISGSEIFTKDIEIEHILPFGRTLFDGETNKTVAHTNCNRDKGNRSPFEAFGSSPHGYNWHEICARANSLKNPAKKALFAENAMEKFEKDNSFIQRQLTDNAYLSRSAQRYLRCICKDVWSINGGMTKLLRDKWNIDSILKRKIDDPEIAHFELKNDQIGQYKKNRYDHRHHALDASVIALIDRAMVQEISQLNKIRLKNRIEAPQMPVLRSELIEKVKHITVSFKPDHGRQGKLSKETLLGKIKRIEKVGIDSIQTDDDIASIKDEAIRTRFETKRRELGDITKAKAALKTEFPKLDVFKAYYVSRTPIVSLTEKNIDNSIVDEKIKEKLKTFIKEHADLSFAEQLQKFTETEWIGKPSADGKPGKKYRIVKVRCINRVQTPIPITSSAVPRYLCPEDYLAAVIWQVPSKTKNAEPEYKATFLRRDEFNDDNKPKNLEKPHDAAKYICMLYKDDYLEFTEKGIAYLCRIAGFSATNNNIDIRPIYAVSDCKDWIIATSDNMLEPCWKPQKGQNYVSVNVLFGKRKARSVTVNPIGRVFRK

SEQ ID NO: 2562 - protein, 1128 aa, unidentified
  REGION 1..1128: note = Description of Unknown: Cas Enzyme sequence
MNDKNQKYRLGLDLGTNSIGWCIYSLDIDNKPETLIDMGVRIFSDGRDPKTKEPLAVERRTARGLRRILHRRKLRRRQMFRLLQEQGLMPNDASEAAALKSLNPYELRVKALDTKLEPYELGRALFNLSVRRGFKSNRKEAVQEKEKDSQNDAKSQNEKCEHLAKAIKDSGCRTLGEFLWKHKNTETQQTENDARDIGMRFVPGRSNYYPTRRMYVEEFDAIRKAQEPYYSGVNWDALHEKLFYQRPLRAQERGKCRYMPDKERTFKAMPCSQKIRILQEVYNMDYIDEYGKTIPLEEAQTDSLISLLDKKEKLTFKAIKKELGIDESCTFNLERGGREYLQGNAAAVKLRNKNRFGELWDSLSLAEQDAIVEKLITADEDAEIISMLAQYNLTDEQKKNIAATVLPSGTAMLCKEVTEMLVEKMEQNKIPLTVAVQMLGYTYADQSVREEDTLPYYGAILTGSTMGAHPEADESEPELKYGKISNPTVHVALNQTRIVVNTLIKAYGKPQQIVVELSRDLKASREAKARIQKTITANQKRNERDNKNITDITKIPYPNRNDRLKYRLWEELGSGSNSFSRKCLYCGKPISGSEIFTENIEIEHILPFGRTLFDGETNKTVAHTDCNRDKGDRSPFEAFGSSPNGYNWHEICARANSLKNPAKRALFAENAMEKFEKDNSFIQRQLTDNAYLSRSALRYLRCICKDVWSINGGMTKLLRDKWNIDSILKRKIDDPEIAHFELKNDQIGQYKKNRYDHRHHALDASVIALIDRAMVQEISQLNKIRLKNRIEAPQMPVRRSELIEKVKHITVSFKPDHGRQGKLSKETLLGKIKKIEKVDIDSIQTDDIASIKDDAIRTRFETKRRELGDITKAKAALKTEFPKLDVFKTYYVSRTPIVSLTEKNINSIVDEKIKEKLKTFIKEHADLSFAEQLQKFSETEWIRKPSAAGKPGKKYRIEKVRCINWGQTPITITSSAVPRYLCPEDYLAAVVWQIPSKKKDTEPEYKATFLRRDEFDVNNKPKKLEKPHDAAQYICMLYKDDYLEFTESGATHLCRIAGLPASQNNKIDIRPIYAVSDCKDWIIATNENMLEPCWKPQKEEKRISVNVLFGKHKARSVTVNPIGRVFRK

SEQ ID NO: 2563 - protein, 1129 aa, unidentified
  REGION 1..1129: note = Description of Unknown: Cas Enzyme sequence
MNDKNQKYRLGLDLGTNSIGWCIYSLDVDNKPETLIDMGVRIFSDGRDPKTKEPLAVERRTARGLRRILHRRKLRRKQMFRLLQEQDLMPNDASEAAALKSLNPYELRVKALDTKLEPYELGRALFNLSVRRGFKSNRKEAVQEKEKDSQNDAKSQNEKCEHLAKAIKDSGCRTLGEFLWKHKNTETQQTENDACDIGMRFVPGRSNYYPTRRMYVEEFDAIRKAQEPYYSGVNWDALHEKLFYQRPLRAQERGKCRYMPDKERTFKAMPCSQKIRILQEVYNMDYIDEYGKALPLEDTQTDSLISLLDKKEKLSFKAMKKELGIDESCTFNLERGGREYLQGNAAAVKLRNKNRFGELWDSLSLAEQDAIVEKLITADEDAEIISMLAQYNLTDEQKKKIVATVLPSGTSMLCKEVTEMLVEKMEQNKIPLTVAVQMLGYTYADQSVHEEDTLPYYGAILTGSTMGAHPEADESEPELQYGKISNPTVHVALNQTRIVVNTLIKAYGKPQQIVVELSRDLKTSREAKARIQKTIAANQKRNERDNKNITDIIKIPYPNREDRLKYRLWEELGSGSNSFSRKCLYCGKPISGSEIFTENIEIEHILPFGRTLFDGETNKTVAHTDCNRDKGDRSPFEAFGSSPNGYNWHEICARANSLKNPAKRALFAENAMEKFEKDNSFIQRQLTDNAYLSRSALRYLRCICKDVWSINGGMTKLLRDKWNIDSILKRKIDDPEIAHFELKNDQIGQYKKNRYDHRHHALDASVIALIDRAMVQEISQLNKIRLKNRIEAPQMPVRRSELIEKVKHIAVSFKPDHGRQGKLSKETLLGKIKKIEKVDIDSIQTDDDIASIKDDAIRTRFETKHRELGNMTKVRAALKTEFPKLDVFKAYYVSRTPIVSLTEKNIDSIVDEKIKEKLKTFIKEHTDLSFAEQLQKFSETDWIGKPSADGKPGKKYRIVKVRCIHTDQKPISITSSVVPRYLCTEDYLAAVIWKIPSNKKDTEPEYKATFLRRDEFDVNNKPKKLEKPHDAAKYICMLYKDDYLEFTENGIAYLCRIAGLPASQENKIDIRPIYAASNCKDWIIATNDNMLEPCWRAKEQEKRISVNVLFGKHKAHSVTVNPIGRVFRK

SEQ ID NO: 2564 - protein, 1025 aa, unidentified
  REGION 1..1025: note = Description of Unknown: Cas Enzyme sequence
MAWRLGLDLGTNSIGWCVLELGADSLPCNLLGAGVRIFSDGREPAAKGRIGDSLAVVRRGARGMRRNRDRRISRKKTLADYLIGLGALQKNSPHCPYECRAKAVSGTVTKDELGRALFHLGQRRGFLSNRKTDSDEETAFKSKISALRAVLAERKQTLGQYLFDREQTGQSLRFRGDEGDYYPDRRMYKEEFALIRDKQAAFFTPEQWDAIDNIIFHQRPLKPVEKGKCQFYHDQDRAHAGLPIAHTYRIAQEVNNLRWLDEGLAPHRLDAEQRHVLYTVLHQQKSLSWSAMRSKLKRADGTPLFPKASKFNFEDADNRRTGLKGNDTYIDLSGLFGALWEKLDQTRQNDLVELMYDAAKDEEVAGYCKSIGFTDEQAAQACKYKLPSATYKVSRHFMQQIIPPMMEEGLRYDEAVLSLGLHHSYDEDGEIFEKLPYYGAVLLGSTIGGNPSASEDEPERKYGKIGNPTVHVALNQIRRVVNALVDRYGLPDQIHLEVGRELKQSRDDRAEMSKKIAKNEKENDRIREKCRKLGLAHPAAMDVKKYKLWEELGTDRLSRQCPFSGASISAAMLFNGDVEIEHILPFSQTKDNGMMNMTLATRQANRIKRNRCPYDARHDFAAQGWAWEDILERAKKLPQKKRDRFGESASQEWLDTTAFLDRQVTDNSYIAKIARRYLGKLCGGNNVVCVSGQLSGLLRGKWRLNNLLNEEGKKMRDDHRHHAVDAIVVGMTSRSIIQGVNTNRTDDGRIHYDVPALPQGLYQQAQALLNTMIISVKPDHGKNGKFFNDTAYGFVGEEQRDADLKDYNLVVRKPIDSLSNKEITNIRDPYIRGLVINYFYQQTGENPKDSKLDDKKRAALLHDFGHKEWPRISGQARPMRSIRILVANQKVEPIPSAPYKGYAIPNFICCDIYRVPKGKAGAWKKGEYKYEGVFWSYIDIQNGEKDDKKPHPAAKFLMRLYKDDMVVLERNGKKDVMRVYGYSTTNNCLDLRPQYQTDGKQTFVGINTVASTMKKINLSPDGKVA

SEQ ID NO: 2565 - protein, 1057 aa, unidentified
  REGION 1..1057: note = Description of Unknown: Cas Enzyme sequence
MKYRLGLDLGTNSLGWSIFSLDDENNVQELIDLGVRIFSDGRDPKTKEPLAVARRTARSQRKLIYRRKLRRKQTFKLLQSQELFPASKEECTSLKASNPYELRIKSLDKKLEPYELGRALFNLAVRRGFKSNRKDGSREETSEKKPTGEIKTQADMQNALDKAIKESNYRTITEFLYKTQDQNGGIRFTPGRMNFYPTRKMYEEEFNQIRSTQEKFYPQVDWDKIYKGIFYQRPLKPQPRGYCIYEKSKERTFKAMPCAQKLRILQDIGNLAYFDGISKVKTELNDDQDKILYELFNSKDKVSFDQIRKALKLPESYSFNLEENRDSLIGNPTAVKMRNKKRFGKLWDDISLEEQDLIVETIITADEDDAVYEVIQKYNLTQEQRDFIVTNTVLQSGTTMLCKEVSEKLVKRMEDIADLKYDKAVESLGYKFSDQSIEQCDVLPYYGVILKGSTMNVDPSAPETNPEKRYGKISNPTVHVALNQTRVVINSLIKEYGKPSQIAVELSRDLKNSVAEKAEIARKQNQRAKENISINNSITDLYNKAFPGKTFYPNRNDRLKYRLWQELGLGCKCLYCGRGITASELFTKEIEIEHILPFSRTLLDSESNLTVAHSSCNAFKAERSPYEAFSSNPKGYNWTEIVQRANQLKNTSKKNKFSPTAMESFEKDSSFIQRQLVDNQYIAKAALRYLKCLVEKPSDVWATNGSMTKLLRDKWEMDSILCRKFTEKEVAILGLKPEQIGNYKKNRFDHRHHAVDAVVIGLTDRSLVQKLATKNSHKQNRIEIPEFPIYRNDLIDKVKKIVVSFKPDHGAEGKLSKETLLGRIKIHGKETFVCRESIVSLSEKNLDDIVDEKIRTQVKHYVSKHSDEKIDSILTQFSKETGIKKVRCVNRVQTPIEITSGLVPRYLAPEDYFAAVIWEIPGDKKTYKAQYIRRNEVERNSKGLNIVKTSVLECGKPHPAAKQICLLHKDDYLEFTDNGKMYLCRIAGYSATQNKIDIRPIYAVNNSADWIYSTNENMLTGYWKPIAGQYYISVNAFFSQFQAHPVTVSPIGHVFRK

SEQ ID NO: 2566 - protein, 1060 aa, unidentified
  REGION 1..1060: note = Description of Unknown: Cas Enzyme sequence
MKLNRWRLGLDLGTNSIGWSVFSLDKDNSVLELVDLGVRIFSDGRDPKTKEPLAVARRTARSQRKLIYRRKLRRKQTFRLLQAQGLFPATKEECLELKSLNPYELRIKALDSKLEPYELGRALFNLSVRRGFKSNRKDGSREETAEKKPSDEIKTQADMQSHLEKAIKENNCRTITEFLYKNQDENGGLRFAPNRMTYYPTRKMYEEEFELICTEQKKYYPDVDWDVIYKSIFYQRPLKPQARGYCVYETDKERTFKAMPCSQKLRILQDIGNLAYYDSATKTKIELNDNQDSILYELLNSKDKVTFDQMRKALKLSDSNSFNLEENRDFLIGNPTAVKMRSKNRFGKLWDDISLEEQDLIIETIITADEDEEVYKVLEKYDLTQEQKDFIVKNTILQSGTTMLCKEVSEKLVKRMEEIADLKYHDAVDSLGYKFADQTVEKYDLLPYYGKVLTGSTMGVNYSEPESNPEKRYGKISNPTVHVALNQTRVVVNALIKEYGKPTQIAIELSRDLKNSVAEKAEIARKQNQRAKENIIINNDISELYNKAFPGKTFYPNRNDRLKYRLWKELGLGSKCIYCGKGISASELFTKEIEIEHILPFSRTLLDAESNLTVAHSSCNAFKAERSPYEAFGSNPKGYNWTEIVQRANGLTNTSKKNKFSPTAMDSFEKDSSFIARQLSDNQYIARSALRYLKCLVENPSDVWATNGSMTKLLRDKWEMDSILCRKFTEKEVTQLGLKPEQIGNYKKNRYDHRHHAVDAVVIGLTDRSLVQKLATKNSHKNNRIEVPEFPILKTDMIEKVKNIVVSFKPDHGAEGKLSKETLLGKIKIHGKETFVCRENIISLTEKNLDDIVDEKIKKLVKDFVAKHKGEKIENILTQFSQETGIKKVRCVNRVQIPIEITSGIVPRYLAPEDYFAAIIWELPGEKKTYKAQYIRRNEVEKDSKGMNIVRKQVIEKGKPHPAAKYICLIHKDDYLEFTDGGKMHLCRVAGYSATRNNLDIRPIYSVSYCADWIFSTNENMLENYWKPSPGQNWVSVNVLFSQLQAHLVTVNPIGRVFRK

SEQ ID NO: 2567 - protein, 1060 aa, unidentified
  REGION 1..1060: note = Description of Unknown: Cas Enzyme sequence
MKLDKWRLGLDLGTNSIGWSVFSLDNDNNVVELKDLGVRIFSDGRDPKTKEPLAVARRSARSQRKIIYRRKLRRKQTFRLLQAQGLFPATKEECLKLKELNPYELRIKALDSKLETYELGRALFNMSVRRGFKSNRKDGSREEINEKNNSEEIKSQADMQTHLENAIQESGFRTITEFLYNKRDINKGLRFVPNRMTYYPTRKMYEEEFELIRTEQQKYYPQVDWDAIYKAIFYQRPLKPQARGYCIYETNKERTFKAMPCSQKLRILQDIRNLAYYDSTTKKKIELNDEQDIVLYELLNLKEKVSFDQMRKALKLSEANSFNLEENRDYLIGNPTAVKMRSKNRFGKLWDDIPLEEQDKIIETIITADEDDAVYDVIKKYNLTQEQQDFIVKNTILQAGTIMLCKEVSEKLVARMEEITDLKYHEAVQSLGYTFSDQTIDKYELLPYYGKVLVGSTMGVNPSEPESNPEKKYGKISNPTVHVALNQTRVVVNALIKEYGKPTQIAIELSRDLKNSVEQRAEIARKQNQRAKENIAINDTICALYNKVFPGKTFYPNRNDRLKYRLWNELGLGNKCIYCGKGITGAELFTKEIEIEHILPFSRTLLDSESNLTVAHSSCNAFKAEQSPYEAFGTNPKGYNWTEIVQRANQLKNTSKKNKFSPTAMESFEKDSSFIQRQLTDNQYIARAALRYLKCLVDNPADVWATNGSMTKLLRDRWEMDSILCRKFTEKEVAILGLKPEQIGNYKKNRYDHRHHAVDAVVIGLTDRSMVQKLASKNSHKSNRIEIPEFPILKLDLIEKVKNIVVSFKPDHGAEGKLSKETLLGKIKVHGKEVFVCRENLVSLPEKNLDDIVDDKIKQQVKEYVSKRKGDKIENILTDFSNETGIKKVRCINRVQTPIEINSGKVPRYLAPEDYFAAVIWEIPGEKKTYKAQYIRRNEVEKNSKGINIVKPSVLETGKPHPAAKQICLLHKDDYLEFSDNGKMYLCRIAGYAATNNKLDIRPIYSVAYCADWIYSTSENMLNGYWKPSPGQNWVSVNVLFDKQKAHPITVSPIGKVYRK

SEQ ID NO: 2568 - protein, 1113 aa, unidentified
  REGION 1..1113: note = Description of Unknown: Cas Enzyme sequence
MKYRLGLDLGTNSIGWAIYSLDNENKPQKLADMGVRIFSDGRDPKTKEPLAVARRIARGQRKIIYRRKLRRKATFRLLQEQGLFPKTKEESQKIKLLNPYELRVKALDEKLEAAELARVLFNLSVRRGFKSNRKDTSSDESAKSKSSEKLSQNEMCEELTKAISEANCRTLGEFLWKNQKKNHGIRFVPGRMSYYPLRKMYEDEFNAIRSVQEPFYKNIDWEGIYNAIFFQRPLKTQERGRCQYMSDKERTFKSMPCAQKLRILQEIRNLNYQDEHGKTFPISAANELFLFSENNEEILLNLLDTHEKVTFDTFRKKLGLSPNCTFNLEKGGRTFLLGNATAVKMRKKNLFGDLWDSLTLEEQDAIVETLMTADEDGEVYKILENYNLSDEQKESIVKLSLSSGTTMLCKEVSEQLVHKMESDSAYTYTVAVESLGYKYADQTVEKFDELPYYGKVLVGSTMGSDPSADESKPEKKYGKISNPTVHVSLNQTRVVINALIKQYGKPAQIAIELSRDLKASREAKEAIQKKQNENKKRNEITNKNIRDANPNIPYPNRNDRLKYRLWEELGAEGLPRKCLYCGKNISGGELFSKNIEIEHILPYSRTLLDAESNLTVAHASCNAFKKERSPYEAFGSNPKGFNWEEILMRANQLKNPAKRRRFAVDAMETFEKDSGFIARQLTDNAYLSKMAMKYLKTVCDDIWSVNGGMTKLLRDKWEIDSILKRKIDDREIAHFELKEEQIGEYKKNRYDHRHHALDASVIALIDRSLVKEISTLNARSLKNRIEVPPMAVPRLELQEKVKNIVVSFKPDHGAEGKLSKETLLGKIKREELLEISKIEEPDIPLIKSDKVRKDFEEKFAETKDIKQVRKEFKDVYPQIKVFKEYFVARTAVMSLKENNIEDIVDNKIRTKLQEFIALHKSEKFEDVLERFSEKTGIKKVRCLNRDQNPIVIKGSVPRYYETKDYCAAIIWKTPHKKEGAKPTFEAQYFLRTEIDKNNKPKKEIIEAWKKQHHPAAKRLPFLLHKDDYLEFLDNGKWYKCRVAGYAATNNKLDIRPIYAVNDCADWLISTEETVLEQFWKPTRGHNFISVNVLFGEKEARFITVNSIGRVFRK

SEQ ID NO: 2569 - protein, 1096 aa, unidentified
  REGION 1..1096: note = Description of Unknown: Cas Enzyme sequence
MNYRLGLDLGTESIGWSVFSLDDECRVQNLEDFGVRIFHDGCNPKNRESLATERRKARSQRRIIFRRRMRRLKTFRLLQREKLFPETKSECIQLKSMNPYELRIKSLDEKLAPYELGRVLFNLSVRRGFKSNRKADADEKNETKSEKMTQAQKIDSLAQAMKSSGARTLGEFLWKNREENGGTRFAPGRMNYYPLRKFYMDEFDAIQKNQQKFFSSVDWDAIRHEIFYQRPLQPQERGKCIYLPEKDRTFKSMPCSQKMRILQDVYNLNFTKNGKQVNLPDEWRDELIKLLDSEEKVTFDKMRKKFGLDEKITFNLETESRTFLQGNSTAKKLRQEKCFGRKWDEFSLSEQDDIVETLISADENSDVEKMLEKYSLSQSQVENIERLNFQSGTANLCREISEKIVAQMEESHCRIHEAVEKLGFKYADQSVEKFDRLPYYGKILTTSTMGKKSNPRNDEEKFGRIANPTVHIALNQTRKVVNTLIETYGKPRQIVVEVSRDLKAGRIAREDILKRQAQNRKENERLNKEIRDENPQIPFPNKNDRLKQKLWEELGEGTIERRCVYCGKPIGGADIFSSSIQIEHILPFARTLCDSEFNKTVAHEKCNAFKGNRSPYEAFSGNPGGYNWSEIQERASNFKDPKKRRAFTENAMEIFEKESGFLSRQLTDNAYIAKSALKYLKSVVEKDSDVWAVSGGMTALLRKKWDLDSVLKRKIGREEIANLELKDEEIGTYKKNRFDHRHHALDAFVIAQIDRSMVQEISRLNQIYRADSIKVPELPVLREDLIEKTKNITVSFRPDHSSAGKLSEETPLGKIKKVRQIPVAELKKEQIKGIRSDKVRADFEAKFGETKDMKKTISLLKDIYPTISVYEEIFVKREYLSSLNENNIDKIIDEKIKNALKEFIKNHPDEKFEAVLEKFKNETGIKKVRCKNHVQVPIEIVNKDKTKRFLCPADYFAAVVWEIPPKKADGKKTYKATFIRRDQANSAEEKPQSDAKKICRVHKDDYLEFCHEGKWYKCRVAGYDTIHNRLDVKPIFATTSCRDWIISTNKRMLEPCWKPTKEHNCISVNKLFGEMQAHYITVSPIGKVCRKKQKFD

SEQ ID NO: 2570 - protein, 1094 aa, unidentified
  REGION 1..1094: note = Description of Unknown: Cas Enzyme sequence
MKWRLGLDLGTNSTGFSVLELDSNNRPCGLLDLGVRIYADGRDPKTLEPRAVARRLARGARRRRDRLIARKRTLANQLVRDGLFPISLEARQALKKLDPIRLRTDALDRRLEPHELGRALFNIGVRRGFKSNRLTDQTTEKESSPEDKLTQTMKMTALTNEIHNSNCRTLGEYLQSRLDRHLGIRFRSGGFDCYPSREHYLDEFRAIRAVQEPFYPQVGWERIEEIIFRQRPLRKQERGRCQFYTEEDRAYAALPSSQQFRIVSEVNNLRYSDGLGSVISLSDAEKDALFSTLNHCKTLSFGKIRKVLGVDGRFNLEDDKRDKLLGNETAVEMRKPNRFGYRWDSFPIEKQDEIVDTLLEAETDVEVEEYLGSLGCTVDEIHGISTLHIGRATTRLSSRFMRECVSMMTGRHLGYAEAVDAMGLHHSYRRRETLDERLPYYGKAVPGAVLGTHPEADEGNPEYKYGKIGNPTVHIALNQLRKIVNSLIERFGEPSQIVVEVSRDLKNSVVERRRITGEQAKAQVENESIREVLKTTLHVIEPSSWDVKKYKLWVELGKDAMTRRCVYCGKPISANQLFTPAIEIEHILPYSRTMLDSMSNLTVAHKACNQVKKEMSPYEAFGHSPEGFHWEDILVRANSLPSQKHRKFLKNAIDDFTDQNDFIARQLTDNAYLSRTASEYLSCICDQKNIWVTPGRQTSILRAKWGMNTILNSSGDNWTKNRSDHRHHAVDALVIGLTDRGLIKRMADLNSNSLPYEINVPEFPFNREDVLMKLRKMLVSHKMDHGYQSRIFKETAAGLKMVKIPTTLSKLKLEDLENLADESMRRRFEGVDTQARLNRAKALLRIERSESGDPDEPVIEVLSKVWITRVRLVDLDAQDIKNHRLFNKELDRMVSDSTIDVLEDRKLLANRLNELSKELGVKRVRYVPKGQEFTQIRSVPNKWYENDGLHCVVVWAVPRRGKKPVYQGEFINYQKAYDLQSGRLKAIPKPHPAAKRIMTLYKNDVLLIRPENGGSYHVRVAGFASTSNKVDIQPIHSSGTIKEWLEGTNAEVIENYSMWAGAGSGEGHNHKSINVLFSENEIKVLRVLPDCQLK

SEQ ID NO: 2571 - protein, 1070 aa, unidentified
  REGION 1..1070: note = Description of Unknown: Cas Enzyme sequence
MATRLGLDIGTNSIGWCLYDGDSIRDIGVRIFSDGREPSKLTVSGSGTPLAVKRRDARGARRRRDRYIGRRSAMLRELRKHGLLPADPKQAKALETQDPYALRVRALDEKLEPHQIGRALFHLNQRRGFKSNRKAERASKAGEDGKIATATKLLDEEMQRLGARTLGEFLVKRDSEFDGEAGKRVRMRADSKAYDFYPDRRHVLDEFRAIWNAQKVWHPELLTEQAWNDIFRVIEYQRELKPQVVGHCTFAGINGVPADEKRLPKAHPLFQQRRLYEEVNQLKVVAPGEAGRPLTRDERDALILKLQDKKSVSFETLGKTLKLKDGERFNKESENRKALDGDEVRAALSGKKLFGTRWFHFSAEEQWMIIERLLEEEDSETLLTWLKIGYRLDDEAALAVANAKLPEGHGRFGLSATTALLKELKADVCTYAEAAKRAGFHHSDFRTGEVFDQLPYYGEILAREIAPGKPEYGDENERRFGKITNPTVHIGLNQLTKLVNAIIRLHGKPDYIFVELARELKLNEKEKIAYNRQLKENTDAARDRGAKLGTMGVRDTGRNRLILRLWTELNPGDALNRRCPFCGEQISQRMIQNGEVEIEHIIPYSQCFDDGIGNKVLSHVRCNRQKGDQTPWERWGHDPDRWSIIQEQVAHLHRSKQWRFGPDARDRYAAEEDSFLPRQLIDTQYLTRIAAKYLACLYPERGARHVFAVHGGMTAMLRRLWDLNSILPDHNWVENLNSNAPKNRLDHRHHAIDAAVVGIMTPGLIAEIAKAAARAEKQNLDRLFEELPMPWAQHPNDRRFRDELREKILAATVSHKADHARQGKPERGRDITAGKLHNDTAYGFTGLTSDTGLPVVVHRVPLTSLTPKDIADPDRIPDTTLRDSLWQATRDLSGKEFEKALLDFSRTHAQFKGIRRVRVREGLTLIPIRNHAGKPYKGYLGDSNARYNVWQMPDGRWVHQVISTFDLHQPGFIEQRPHPAAKKVLSLRQNDLIAIERDGALRQIMRVQKYGQNGQIFLIEHNEAGNMAERNKNTDDPFKFYGPGASALRNMKARQVRIDELGRIFDPGPR

SEQ ID NO: 2572 - protein, 1050 aa, unidentified
  REGION 1..1050: note = Description of Unknown: Cas Enzyme sequence
MRRLGLDMGTNSIGWCLIEDDKRIVDIGVRIFSDGRDPKSGASLAVDRRDARAMRRRRDRYLGRRSAFLSTLIAHGLMPADADETRLIAARDPYDLRKRALSEKLSPFEIGRALFHLNQRRGFKSNRKADRKAKPGEEGKIASGSRALIQAMAEAGADTLGQFLAGRDTKRVRLNSENQEYDFYPQRSDIEYEFGRIWDAQANHRPALLTDAAKAALSRILFFQRPLKEQEVGYCTFAGMNGVSADERRLPKAHPLFQQRRLYEDVNQLRVVAAGAADRALTRDERDALILKLQDKKKVSFESLAKVIKLAEGERFNKESENRKELIGDEVRAELADKKRFGTRWLHFGLEEQLRIIDRIQNEEDPATLLGWLESKYGLDEAAAEAVANARLPEGHGRFGETATRRLLDALKADVVTYDKAAEAAGFHHSDHRTGEVLDRLPYYGQLLTREIAPGKAEYGDADERRYGKITNPTVHIGLRQLEKLVNAVIAVHGRPDQIVVELARELKLNEKDKDEHKKRIKRDTDAAIARGEKLALEGFQDTGANRILLRLWEELNPGNPLDRRCPYCANPISIHQLFAEADIDHIIPYSRSLDDSAGNKVVAHRACNRVKGNKTPHERWGHDSDRWDKISAQVARLHKSKQWRFGPEAMERVERDGGFLARQLTDTQYLSRIAGKYLRSLYPRAEDGRVDVIPGRMTAMLRRLWGLNSLLPDHNYVENQHSNAPKNRLDHRHHPIDAAVVAATTLSRMQQIAHAAARAEDKDLDRLFEDLPQPWPGFREELGEKLARVTVSHKPDHGRKGRPAKHRDVTAGRLHNETAYGLTGEVNAKGDPLVVWRVPLSSIQPRDLGDPERISDRALREALYDATRGLSGKEFEKALAAFSKADGPFHGIRRVRLRRPLNVVPVHDASGKAYKGYQGDSNALYNVWAMPDGKWVADIISTFDVHQRSFVEKRPHPAAKKILSLRQNDLLAIERDGGPREIVRVQKYSQNGQIFLIAHQETGNMVERNSNPNDPFKFYGPGANALKAMKARQVRVDPLGRVFDPGPRE

SEQ ID NO: 2573 - protein, 1074 aa, unidentified
  REGION 1..1074: note = Description of Unknown: Cas Enzyme sequence
MRRLGLDIGTNSIGWCLVEYDDAQSIGVRILDIGVRLFGSSPQGAGRDPKTGASLAVDRRAARAARRRRDRYIGRRSAFLDNLVRIGLMPADSDEAKLIADRDPYVLRARALIQRLDPYEIGRALFHLNQRRGFKSNRKAERRAKDNDDGKIAGGARALDQAMAEAGADTLGQFLAGRDEKRVRLNGESQGYDFYPQRRHIEYEFGRIWEEQAKYHPALLTDEARAALHRVLFYQRPLKEPKIGVCLFAGRYGIPRDEPRLAKAHPLFQRRRLYEEVNQLEITAPGEAPRKLTRDQRDALILELRGKKERSFDALARRLKLQPGESFNKASETRTKLAGDEVYAALSHKDRFGDRWAHLSAERQWEIIGRLLDEEDPEALHAFLTGECGLDEDAARATAKASLPEGYGRLGETATRRILEQLEADVVTYSQAVERCGWHHSDDRTGEILVRLPYYGELLSRDIPPGSFDPADESQPEKYWGKITNPTVHIGLRQLEKLVNAIIAVHGKPDQIVVELARELNLNEEDKKKHEARIRKETAAAIARGEKLEEEGIPNTGANRALLKLWEELNPANPLDRRCPYCAEPIGMHQLFAGEADVDHIIPYSRSLDDSASNKVVAHHHCNQVKGNRTPYERWGHDEDRWEKIAAQVARLHKGKQWRFGPDAMARVEKDGGFIARQLTDTQYLSRLAGKYLRSLYPTKEDGSVYVIPGRMTAMLRRLWGLNSLLADHNYVENEHSNAPKNRLDHRHHAIDAAVTAVTTRSLLQRIARVAGQAEDKDLDRLFEGLEQPWEGFREQLGDVLLNVTVSHKPDHGRKGRPSRDRDVTSGQLHNETAYGLTGDVNRNGDSLVVYRIGLTSLQPKDLTDPERMTDHHLQAALYEATRGLTGTAFQKALADFAKAPGPWQGIRHLRVRKPLQVIPIRDRAGRAYKGYQGDSNALYTVWQMPDGKWITHWTDREGIARSGIVSTFDYHQKGFVEHRPHPAAKKVLVLRQNDLIAIERDGGPRQIMRVQKYGQNGQVFLIAHNEAGKMADRDKNPDDPFNFYGPRASSLQKMKARQVRIDPLGRIFDPGPR

SEQ ID NO: 2574 - protein, 1187 aa, unidentified
  REGION 1..1187: note = Description of Unknown: Cas Enzyme sequence
MTKKVLGLDLGVGSIGWCLITLDKDEKPQSILGMGSRIVPLSTDDATEFTQGKAITKNKMRTVARTIRKGMDRYQLRREALKKVLSEHGMLPDESLIKLPLLELWELRARAATPGEQLSLAELGRVLLHINQKRGYKHAKADEAAEAEAESKSKKEKEGYVAQVKGRYQALKEKGQTIGQHFAEELRANQQTAPRGVYYTYRIKEQVYPREAYLEEYDRIMAVQREFYPEILTDELIQRIRDRIIFYQRPLKSCKQLVSTCEFEKKERVVQVKRINKEGVEELVERTITIGPKVAPKSSPIFQVCKVWESIHNIRLYHPDGTERKLEQEEKQKLFDYLQKNDKLSLTALRKELKIKPKDKLWCDKLLEKGIAGNTTAAILSKAFKGYEQYEDLLRFDLVRRDSHEADEDGVIRPIIDESYQNEPLYKLWHILYSIEDRADMYRALVGQLGIKRGDLDDGLMDALYKIDFVKQGYGNKSAKFICKLLPHLQEGKMYSEAAEAAGVRHSDSMTAQERDERSLLEEIPLLQKNALRQPVVEKILNQMINLVNALKREHGEIDEVRVELARELKMSREEREETTKSNNAREKENKAIAERIVEYGLTPTKSRIQKYRLWQESAESCIYCGKHVDLVQFLRGEEIEVEHIIPRSILFDDSMSNKACACRSCNQEKGNRFAMEYIQSKGWEQDYIKRVDSLFHAKKISYSKRQRLLMLPKDLPEDFIERHLRLSQYISREAQSILRKGIRLVSASEGGVTAKLRQLWGYDNILQKLNLDRYRSMGETEVVTVEHRDGERTDERIKDWSKRKDHRHHAIDALVVACTRQSYIQRLNRVNAEADREEMDTFIKEQQQEHKLSKKEKLSLLEHWLIRQPHFTTGEVTSHVEGILVSLRPGKRTISRGRNIYNRSGKTDVQRGVLIPRGALSEETIYGVIRVDGEDKVVCKYPLQSLKPKDVGYIVDEVLREKVRERITQRGEKEAFAEPLYFDEAQTQEVHSIRCFTGKDLSKLVPLRYNAESEAVGFVAPGNNHHLALYRDVDGRMVESVVTFWQAVARIRYGLPAIVTHPREVMEQAFSIPDLPEEVLEALPISRLRLMEVLRINDMFLIGMTDGEIKAAIEGEDYPTLSRHLYRVQKLATHDYVFRYHLETTLDGKDNVGGIPKSYRAQSLKAYVKLNPRKVKIDLLGRISLA

SEQ ID NO: 2575 - protein, 1189 aa, unidentified
  REGION 1..1189: note = Description of Unknown: Cas Enzyme sequence
MTRKVLGLDLGVGSIGWCLITLDNDEKPQSILGMGSRIVPLSTDDATEFTQGKAITKNKMRTVARTIRKGMDRYQLRREALKKVLSEHGMLPDESLIKLPLLELWELRARAATPGEQLSLAELGRVLLHINQKRGYKHAKADEAAEAEAESKSKKEKEGYVAQVKGRYQALKEKGQTIGQHFSGELRANQQTAPRGVYYTYRIKEQVYPREAYIEEYNQIMAIQRTFYPELLTDALIGRIRDRIIFYQRPLKSCKQLVSFCEFEKKERVVQVKRINKKGVEELVERTITIGPKVAPKSSPIFQVCKVWESIQNIRLYYPDGTERKLEQEEKQKLFDYLQKNDKLSLTALRKVLKIKPKEKLWCDKLLEKGIAGNTTVAILRKALKGYEQYEGLLRFDLTIRDGHKADEDGVIHSIVDESYQNEPLYKLWHILYSIEDRDDMYRALVGQLEIKEEDLDDGLMDALYKIDFVKQGYGNKSAKFICKLLPHLQEGKMYSEAAEAAGVRHSDSMTAQERDERSLLDEIPLLQKNALRQPVVEKILNQMINLVNALKREHGEIDEVRVELARELKMSREEREETTRSNNAREKENEKTAERIKGEHGLTPTKSRIQKYRLWQESGGCCIYCGKHFGIKQFLEGEEIEVEHIIPRSILFDDSMSNKACACRSCNQEKGNRFAMEYIQSKGWEQDYIKRVDSLFHAKEISYSKRQRLLMLPKDLPEDFIERHLRLSQYISREAQGILRKGIRLVSASEGGVTAKLRQLWGYDNILRDLNLDRYRSMGETEVVTVEHRDGERTDERIKDWSKRKDHRHHAIDALVVACTRQSYIQRLNRVNAEADREEMDVFIKEQQQEHKLSKREKLSLLEHWLIRQPHFTTGEVTRHVEGILVSLRPGKRTISRGRNIYKRSGKTDVQRGVLIPRGALSEETIYGVISVDGEDRVVCKYPLQSLKAKDVVSIVDEVLREKVIERITQHGEKEAFAKPLYLDEAQTQEVRSVRCFTGKDQAKLIPLRYNDESEAVGFVAPGSNHHLALYQDERGNLVESVVTFWQAISRIRYGLPAIVTHPREVMEQALSIPELPEEVLGALPESGLRLMEVLRMNDMFLIGMKDEEIEAAIEGEDYPTLSRYLYRVQKLSSMYYVFRYHLETEVKDEKNTSGEIPKFYRIKSLGRYQELNPRKVKIDLLGRISLA

SEQ ID NO: 2576 - protein, 1192 aa, unidentified
  REGION 1..1192: note = Description of Unknown: Cas Enzyme sequence
MARKVLGLDLGVGSIGWCLITLDKDEKPQSILGMGSRIVPLSTGDAKEFTKGEAISKNKMRTVARTIRKGMDRYQLRREALKKVLREHGMLPDESLIKLPLLELWELRARATTPGDQLSLTELGRVLLHINQKRGYKHAKADEAAEAEAEGKSKSKKEKEGYVAQVKGRYQALKEKGQTIGQHFAEELRANQQTASRGVYYTYRIKEQVYPREAYIEEYDSIMKVQRTFYPELLTDALIGRIRDRIIFYQRPLKSCKQLVSTCEFEKKERVVQVKRINKEGVEELVERTITIGPKVAPKSSPIFQVCKVWESIQNIRLYYPDGTERKLEQEEKQKLFDYLQKNDKLIFTALRKELKIKPKEKLWCDKLLDKGIAGNTTTAILRKALKGYEQYEGLLRFDLKNKVDEDGVILPIIDESYQNEPLYKLWHILYSIEDKDDMRRALVGQLGIKEEDLDDGLMDALYKIDFVKQGYGNKSAKFICKLLPHLQEGKMYSEAAEAAGVRHSDSMTAQERDERSLLETIPLLEKNALRQPVVEKILNQMINLVNVLKREYGEIDEVRVELARELKMSREEREQVLSNNRKRKGKNETIAKRIAEYGLTPTKSRIQKYRLWQESDECCIYCGKHVDVVQFLRGEEIEVEHIIPRSILFDDSMSNKVCACRSCNQEKGNRFAMEYIQSKGCEQSYIERVNSLFHDKKISYSKRQRLLMLPKDLPEDFIERHLRLSQYISREAQGILRKGIRLVSASEGSVTAKLRKLWGYDNILRDLNLERYRSMGETEEVKVEHRDGARTDERIKDWSKRKDHRHHAIDALVVACTQQSYIQRLNRVNAEADREEMDAFIKEQQQEHKLSKKEKLSLLEHWLIRQPHFTTGEVTKHVEGILVSLRPGKRTISRGRNIYKRSGKTEVQRGVLIPRGALSEETIYGVIQLHRKDKSSTELERSYVKRIPLSKVNPSNVKNIVDSRIRDVVQAALLSLSGRKGVLPTELYLDDSRKRVVRSVRCLVRSSTLIPIRFNADGEAIGFTKPGLNHHVALYRDGVGNIRESVVPFFRAVERARYGIPMIISDPSKAREQARANPNLPESVLLSLPEEDWQLEEILQGDEMFLLGMTDEAIDRAMETKDYTTLGRHLYRVQSLAAGDYMFRYHLETTLDGKDNVGSIPKSYRIQGLKTYRKLNPRKVKIDLLGRISLA

SEQ ID NO: 2577 - protein, 1195 aa, unidentified
  REGION 1..1195: note = Description of Unknown: Cas Enzyme sequence
MARKVLGLDLGVGSIGWCLITLDKDEKPQSILGMGSRIVPLSADDATEFTQGKAITKNKMRTVARTIRKGMDRYQLRREALKKVLSEHGMLPDESLIKLPLLELWELRARAATPGEQLSLAELGRVLLHINQKRGYKHAKADEAAEAEAESKSKKEKEGYVAQVKGRYQALKEKGQTIGQHFSGELRANQQTAPRGVYYTYRIKEQVYPREAYIEEYNQIMAIQRTFYPELLTDALIGRIRDRIIFYQRPLKSCKQLVSFCEFEKKERVVQVKRINKKGVEELVERTITIGPKVAPKSSPIFQVCKVWESIQNIRLYYPDGTERKLEQEEKQKLFDYLQKNDKLSLTALRKVLKIKPKEKLWCDKLLEKGIAGNTTVAILRKALKGYEQYEGLLRFDLTIRDGHKADEDGVIHSIVDESYQNEPLYKLWHILYSIEDRDDMYRALVGQLEIKEEDLDDGLMDALYKIDFVKQGYGNKSAKFICKLLPHLQEGKMYSEAAEAAGVRHSDSMTAQERDERSLLDEIPLLQKNALRQPVVEKILNQMINLVNALKREHGEIDEVRVELARELKMSREEREETTRSNNAREKENKAIADRIKGEYGLTPTKARIQKYSLWKESAESCIYCGKHVDLVQFLRGEEIEVEHIIPRSILFEDSMSNKVCACRTCNQEKGNRFAMEYIQSKGREQDYIKRVDSLFHAKEISYSKRQRLLMLPKDLPEDFIERHLRLSQYISREAQGILRKGIRLVSASEGGVTAKLRQLWGYDNILRDLNIERYRSMGETEVVTVEHRDGERTDERIKDWSKRKDHRHHAIDALVVACTRQSYIQRLNRVNAEADREEMDAFIKEQQQEHKLSKREKLSLLEYWLIRQPHFTTGEVMKHVEGILVSLRPGKRTISRGRNIYKRSGKTDVQRGVLIPRGALSEETIYGTIQLHRKDRSGTELVRSYVKRIPLSKVNPSNVKNIVDSQIREVVQAALLSLSGRKGVLPTELYLDDSRRRVVRSVRCLVRLNTLIPIRFNADGEAIGFTKPGLNHHVALYRDGVGNIRESVVPFFRAVERARYGIPMIISDPSKAREQARANPNLPESVLLSLPEEDWQLEEFLQGDEMFLLGMTDEAIDRAMETKDYTTLGRHLYRVQSLAAGDYMFRYHLETTLDGKDNVGSIPKSYRIQGLKTYRKLNPRKVKIDLLGRISLA

SEQ ID NO: 2578 - protein, 1191 aa, unidentified
  REGION 1..1191: note = Description of Unknown: Cas Enzyme sequence
MARKVLGLDLGVGSIGWCLITLDKDEKPQSILGMGSRIVPLSTDDATKFTQGEAITKNKMRTVARTIRKGMDRYQLRREALKKVLREHGMLPDESLIKLPLLELWELRARAATPGEQLSLTELGRVLLHINQKRGYKHAKADEAAEAETESKAKAKKEKEGYVAQVKGRYQALKEKGQTIGQHFAGELRANQQTDPRGVYYTYRIKEQVYPREAYIEEYDRIMAAQRVFYPELLTDALIGRIRDRIIFYQRPLKSCKQLVSTCEFEKKERVVQVKRINKEGVEELVQRTITIGPKVAPKSSPIFQVCKVWESIQNIRLYYPDGTERVLEQEEKQKLFDYLQKNDKLSLTALRKELKIKPKDKLWCDKLLEKGIAGNTTAAILRKAFKGYEQYEDLLRFDLVRRDSHEADEDGVIRPIIDESYQNEPLYKLWHILYSIEDRADMYRALVGQLGIKREDLDNGLMDALYKIDFVKQGYGNKSAKFICKLLPHLQEGKMYSEAAEAAGVRHSDSMTAQERDERSLLDEIPLLQKNALRQPVVEKLLNQMINLVNALKREHGEIDEVRVELARELKMSREEREETTKSNNAREKENKAIAERIVEYGLTPTKSRIQKYRLWQESAESCIYCGKHVDLVQFLRGEGIEVEHIIPKSILFDDSMSNKVCACRSCNEKKGNRFAMEYIQSKGWEQDYIKRVDSLFHDKDKKISYSKRQRLLMLPKDLPEDFIERHLRLSQYISREAQGILRKGIRLVSASEGGVTAKLRQLWGYDNILRDLNLERYRSMGETEVVTVEHRDGERTDERIKDWSKRKDHRHHAIDALVVACTRQSYIQRLNRVNAEADREEMDAFIKQQQEHKLSKKEKLSLLEHWLIRQPHFTTGEVTKHVEGILVSLRPGKRTISRGRNIYKRSGKTDVQRGGLIPRGALSEETVYGVICVDGENKVVCRYPLQSLKPKDVGYIVDEVLREKVRERITQHGEKEAFAKPLYLDEAQTQEVRSIRCFTGKDLSKLIPLRYNAESEAVGFVAPGSNHHLALYRDVDGRLVESVVTFWQAVARIRYGLSAIVTHPREVMEQAFSIPDLPEEVLEALPISRLRLMEVLRINDMFLIGMKDGKIQAAIEGEDYPTLSRHLYRVQKLSSMYYVFRYHLETEVKDEKNTSGEIPKFYRITSFSAYQKLNPRKVKIDLLGRISLA

SEQ ID NO: 2579 - protein, 1190 aa, unidentified
  REGION 1..1190: note = Description of Unknown: Cas Enzyme sequence
MARKVLGLDLGVGSIGWCLITLDNDEKPQSILGMGSRIVPLSTDDATEFTQGKAITKNKMRTVARTIRKGMDRYQLRREALKKVLREHGMLPDESLIKLPLLELWELRARAATPRKQLSLPELGRVLLHINQKRGYKHAKADEAAEAEAEGKSKSKKEKEGYVAQVKGRYQALKEKGQTIGQHFAEELRANKQTASRGVYYTYRIKEQVYPREAYIEEYDRIMAVQQEFYPEILTDELIQRIRDRIIFYQRPLKSCKQLVSTCEFEKKERVVQVKRINKDGVEELVERTITIGPKVAPKSSPIFQVCKVWESIQNIRLYYPDGTERKLEQEEKQKLFDYLQKNDKLILTALRKELKIKPKEKLWCDKLLDKGIAGNTTTAILRKALKGYEQYEGLLRFDLTIRDGHKADEDGVIRPIVDESYQNEPLYKLWHILYSIEDRTDMRRALVGQLGIKEEDLDDGLMDALYKIDFVKQGYGNKSAKFICKLLPHLQEGKMYSEAAEAAGVRHSDSMTAQERDERSLLETIPLLEKNALRQPVVEKILNQMINLVNALKREYGEIDEVRVELARELKMSREEREETTKSNNAREKENKTKAEYIKGEYNLTPTKSRIQKYRLWEESGGCCIYCGKHFGVEQFLRGEEIEVEHIIPRSILLDDSMSNKVCAHRSCNQEKGNRFAMEYIKSKGWEQSYIERVNSLFHDKKISYSKLQRLLMLPKDLPEDFIERHLRLSQYISREAQGILRKGIRLVSASEGSVTAKLRQLWGYDNILRDLNLERYRSMGETEVVTVEHRDGERTDERIKDWSKRKDHRHHAIDALVVACTRQSYIQRLNRVNAEPDHQEMDVFIKEQQQKPTHSKGQKLSSLENWLIRQPHFTTGEVMKHAEGILVSLRPGKRTISRGRNIYKRSGKTDVQRGVLIPRGALSEETIYGVIRVDGEDKVVCKYPLQSLKLKDVEYIVDEVLRDKVRKRIDQRGEKEAFADPLYFDEAQTQEVRSVRCFTGKDQAKLIPLRYNDESEAVGFVAPGSNHHLALYRDVDGRLVESVVTFWQAISRIRYGLPAIVTYPREVIEQALSIPELPEEVLGALPKSRLRLMEVLRINDMFLIGMKDEEIKAAIEGEDYPTLSHHLYRVQKLTAHDYVFRYHLETTLDGKDNVGDIPSSYRITSQKRYVKLNPRKVKIDLLGRISLA

SEQ ID NO: 2580 - protein, 1206 aa, unidentified
  REGION 1..1206: note = Description of Unknown: Cas Enzyme sequence
MARKVLGLDLGVGSIGWCLITLDNDEKPQSILGMGSRIVPLSTDDATEFTQGKAITKNKMRTVARTIRKGMDRYQLRREALKKVLREHGMLPDESLIKLPLLELWELRARAATPGKQLSLTELGRVLLHINQKRGYKHAKADEAAEAEAEAEGKSKSKKEKEGYVAQVKGRYQALKEKGQTIGQHFAEELRANQQTASRGVYYTYRIKEQVYPREAYIEEYDRIMKEQRTFYPELLTDALIGRIRDRIIFYQRPLKSCKQLVSTCEFEKKERVVQVKRINKEGVEELVERTITIGPKVAPKSSPIFQVCKVWESIQNIRLYYPDGTERKLEQEEKQKLFDYLQKNDKLILTALRKVLKIKPKDKLWCDKLLDKGIAGNTTTAILRKALKGYKDREKLLRFDLKNKVDEDGVILPIIDESYQNEPLYKLWHILYSIEDKDDMRRTLVGQLGIKEEDLDNGLMDALYKIDFVKQGYGNKSAKFICKLLPHLQEGKMYSEAAEAAGVRHSDSMTAQERDERSLLEEIPLLQKNALRQPVVEKILNQMINLVNALKREYGEIDEVRVELARELKMSREEREETTKSNNAREKENKAIAERIKEYGLTPTKSRIQKYRLWQESAESCIYCGKRVGVVQFLRGEEIEVEHIIPRSILFDDSMSNKVCACRSCNQEKGNRFAMEYIQSKGWEQDYVKRVDSLFHAKEISYSKRQRLLMLPKDLPEDFIERHLRLSQYISREAQGILRKGIRLVSASEGSVTAKLRQLWGYDNILRDLHLERYRSMGETEVVTVEHRDGERTDERIKDWSKRKDHRHHAIDALVVACTRQSYIQRLNRVNAEADREEMDAFIKEQQQQKPTHSKGEKLSLLENWLIKQRPFATEDPTKDPTEEVKKHVKKILISFRPGKRTVSRGRNIYKRSGKTDVQRERVLIPRGALSEETIYGVIRVDGEDKVVCKYPLQSLKLKDVEYIVDEVLREKVRERITQHGEKDAFAEPLYLDEAQTQEVRSVRCSTGKKQAKLIPLRYNDKSEAVGFVAPGNNHHLALYKDDDGNVVESIVTFWQTVERARYGLPIVVASPREVMEKALAIPELPESVLKALPASNLCLMEVLRINDMFLIGMKDGEIQAAIEGEDYPTLSRHLYRVQKLSSMYYVFRYHLETEVKDEKKAGGKDEKEEEVKIPKFYRVQSMKAYEKLNPRKVKIDLLGRISLA

SEQ ID NO: 2581 - protein, 1196 aa, unidentified
  REGION 1..1196: note = Description of Unknown: Cas Enzyme sequence
MARKVLGLDLGVGSIGWCLITLDKDEKPQSILGMGSRIVPLSTDDATEFTQGKAITKNKMRTVARTIRKGMDRYQLRREALKKVLREHGMLPDESLIKLPLLELWELRARAATPGEQLSLTELGRVLLHINQKRGYKHAKADEAAEAEAEGKSKKEKEGYVAQVKGRYQALKEKGQTIGQHFAEELRANRQTASRGVYYTYRIKEQVYPREAYIKEYDRIMAEQRVFYPQLLTDELIQRIRDRIIFYQRPLKSCKQLVSTCEFEKKERVVQVKRINKDGVEELVERTITIGPKVAPKSSPIFQVCKVWESIQNIRLYYPDGTERKLEQEEKQKLFDYLQKNDKLSLTALRKVLKIKPKDKLWCDKLLDKGIAGNTTTAILRKALKGYEQYEGLLRFDLTIRDGHKVDEDGVILPIIDESYQNEPLYKLWHILYSIEDRKEMRSALVKQLGIKEEDLDDGLMDALYKIDFVKQGYGNKSAKFICKLLPHLQEGKMYSEAAEAAGVRHSDSMTAQERDERSLLETIPLLEKNALRQPVVEKILNQMINLVNALKREHGEIDEVRVELARELKMSREEREETTRSNNAREEENKTKAEYIKEKHGLTPTKSRIQKYRLWQESGGCCIYCGKHVDVEQFLRGEEIEVEHIIPRSILFDDSMSNKVCACRSCNQEKGNRFAMEYIQSKGWEQDYIKRVDSLFHAKEISYSKRQRLLMLPKDLPEDFIERHLRLSQYISREAQGILRKGIRLVSASEGGVTAKLRQLWGYDNILRDLNLERYRSMGETEVVTVEHRDGERTDERIKDWSKRKDHRHHAIDALVVACTRQSYIQRLNRVNAEADREEMDAFIKEQQQKPTHSKGEKLSLLENWLIRQPHFKIEDVMKHVEGILVSFRPGKRTVSRGRNIYKRSGKTDVQRGVLIPRGALSEETIYGVIQLHRKDKSSTELERSYVKRIPLSKVNPSNVKNIVDSRIRDVVQAALLSLSGRKGVLPTELYLDDSRKRVVRSVRCLVRSSSLIPIRFNADGEAIGFTKPGVNHHVALYRDGAGNIRESVVPFFRAVERARYGIPMIISDPSKAREQARANPNLPESILLSLPEEDWQLEEILQGDEMFLLGMTDEAIDRAMETKDYTTLSRHLYRVQNLSSMYYVFRYHLETEVKDKKNTSGEIPKFYRITSFSSYQRLNPRKVKIDLLGRISLA

SEQ ID NO: 2582 - protein, 1225 aa, unidentified
  REGION 1..1225: note = Description of Unknown: Cas Enzyme sequence
MKTKILGLDTGTNSLAWAVVERDENGKYSLLKYGDTIFTEGVKIEKGIESSKAAERTGHKALRVHYYRRRLRKIETLKALVQLNLCPYLSGEQLAEWKRKKTYPLMSDFMLWQRSGSALEDNPYFCRHICLTQKLDLADQGQRFLLGRAMYHLAQRRGFLSNRLDTSADSEDSGKVKSGIAQLSVEMEKAGCRYLGEYFYQLYKQHGNTVRLRSRYTDREEHYQKEFFAICEKQELDAQWVETLQRALYFQRPLKSQRKGVGMCTFEPKKHRCAESHPDYEAFRMLCFINNVKIQTPKDVSLRPLNAEERETIWPLFFRKSKPNFDFEDIAKTLAGKNNYAWFDESCEKPYRFNYRMHQGVSGCPVTAQLIDIFGSDWKAGIAETYTAVGKKNGTKTIDEMADDAWNVLHSFSSKDKLKAFATEKLQLDEASATKFANAKLPHGFAALSLKAIRNILPFLRQGFIYAHAVLLAKIPDIVSNAVWDDAHKREQILSGLLEIIENYNPKDRGVEGTIDFCIKSHLQDVIDLRPGAADALYHPSMIETYPDAKPNAEGKLQLGSPRTNSIRNPMAMRSLHVLRSVVNQLLRDGIIDRNTEVHVEYARELNDANKRKAIADYQKDIERKRADYRKRIIELYKDECHKEIEPTDTDILKFQLWEEQNHKCLYTDSEIGICDFLGDNPKFDIEHTIPRSVGGDSTQMNLTLCDAKFNRQEKGAKLPVQLSNHDDILVRISPWNDKCDELRKQIDRIRTFSGMEKGMKDRLIQKRHRLKMELDYWQGKYNRFTMTEVPEGFSRRQGAGIGLISKYAGLFLKSLFHNEQNPNKSNVYVVKGITTAEFRRMWGLQGEYEKKSRVNHCHHCIDAITIACIGKGEYDRMAQYYHIEELYNWHGSTSKPHFDKPWPKFAEDVLNIEHSLLVKHLTNDNMPKQAKKHVRTAKGKYLAQGDTARGSLHKDTYYGAIEQEGEIRYVLRKSLNDFDSESELENIVDQAVKEKIKAAVAGKNFKAAIAEPIFMNKEKGIRINKVRCYADSVKNPLHIRQQRDLSDKEYKQQFHVVNDSNYMLAIYEGEVKGKVKRDFVLVNNITAASFFKRSNRRKNAETLVPKISPKGNLPLLVILKIGMQVLLYEKSSEEIKFDKPHDLVKRLYKVVGLSIDGSCIMIDLRYNQEARQAKDVKPKKGAYMENEQFRPCIRLRHTQFKALVEGIDFEFNILGEIKKKDNHA

SEQ ID NO: 2583 - protein, 1082 aa, unidentified
  REGION 1..1082: note = Description of Unknown: Cas Enzyme sequence
MNWRLGLDLGAGSLGWCALALGEEGQPAGILAAGSRIFGDGRAPARGEQAGTPLAVERRTARAMRRRRDRYQRRRTGLLRQLTTDGLFPEEPEARLALQGLDPFELRARALDQPLSPHEIGRAFFHLNQRRGFKSNRKADRGTDKETGKIAVGIDRLRTAIEASGARTFGEFLHLRRRNAPDQNRIPSVRTRLRPEPGEGAKGDGYDFYPGRALIEEEFEAIWEAQRQFHPDRLTEAVHDRLHEIVFHQRPLKEPKVGTCTLVPGETRLRKAHPLFQKRRLLEEVNALLLVRTGETAQRLTREQRDLLYLRLKDKQKVSFETLRTRVLKLDPSTRFNKESESRSDLKGDEVAALLGDRKRFGTAWAPLPAERQWAVVERLLDVETDEEAAALQAWLQQEHDLPAERAAAVVAAAGRLPQGYGRFGETATRGLIAALEAEVIVYSEAVVKAGFGHHSDFRDGEVHAELPYYGAILERHILPGTGDPADPEELRVGRLTNPTVHIGLNQLRRVVNALIRTHGRPAEIAIELARELKLDADEKARRSRENAKNRIEAEKRSQKLQEIGQRDTGANRNLLKLWEELNPDNVLDRRCVYSGRQISIDMLFNGSTEVDHILPFDATLDDSNGNRILCLREANRDKRKRSPFEAWGHTDRWPEIAERAARLPREKRWRFEPDAMKRFADLGGFHARHLTDTQYLSRLSREYLSALYPEKGEGSSHVWVSPGRLTEMVRRKLGLNDLLPDHNIGGGAEHAKNRLDHRHHTIDAAVVAVVDRGLLNEMARASGQEGRDGAERVIVPEPWPGFREDLRRAVNAIVVSHRPDHGTASKAGLPRGRDQTAGKLHNDTAYGLTGEADGRDNQLVVHRVPLGALKPGDLDRVRDCKLRKALQAFTAGREGKEFERAVARFAEVAPPPFRGLRRVRVLEPLSVIPIRDADGRAYKGYKGDSNYRYDVWELPDGRWVAEVVSMFDAHQPGWTSAIRADCPTARKVLRLHRDDVLAIERTGERELVRVVKFRQTGQLTLAAPEEAGDLKKRDAASDQSDPFKYLYAAAGTLRAWKARQVRLDELGRVFDPGPRSRVETA

SEQ ID NO: 2584 - protein, 1120 aa, unidentified
  REGION 1..1120: note = Description of Unknown: Cas Enzyme sequence
MGQDNRPWRLGVDLGANSLGWVAIELDAPVDGKPVSILAAGSRIFSSGANGAGRDAKSGESLAVARRDARAMRRRRDRFQQRQRGLLKYLVADGLFPAEEEERKALAALDPYALRARALDEALTLPELGRALFHLNQRRGFKSNRKADRKADDDAGKIAVGIDRTREAIAEAEEKAGAEPGSWTYGKWLHERRASASDANAIPSVRTRLRPETGEGAKGDGYDFYPGRALIAEEFDAIWQAQAPHHPDVLTDQVYARLHEIVFDQRPLKAPQIGMCTLIAGDRRLPKAHPLFQRRRLLEEINALMIVRPGEVAQRLTREERDRLYLKLKDKAKVTFLSLRKELKLDPDARFNKESENRPDLKGDEVAAVMQAKTRFGTRWLHLSVEEQWAVIEAREQVESDAEDATFREWLAATYDLTPEQARAIANAPRPQGYGRFGQTATERLIDALRDGERDGRVLVYSEAVAEAGLGHHSDHRTGEVFEDGQGRPQLPYYGVALERHIMPGTGDPTDPEEMRIGRLTNPTVHIGLNQLRRVVNRLIRAYGPPAEIAIELARELKLTDDDKQRQNRENNTNRIASERRSEKLIAIGQPDTGGNRALLKLWEELNADNVLDRRCVYSGVRISIDMLFSAAVEVDHILPFSATLDDSNGNKILCTREANRDKRKRSPYQAWGHTDRWDAIAARAAQLPRNKRWRFEPDAMEKFADASGFQARHLVDTQYLARLSREYLATLYPGKGEGSGHVWVSPGRLTEMVRRKLGLNDLLPDHNYAGGADQAKNRRDHRHHAIDAAVVAIVDRGLLNEMSRVSGQLGAEGRERIEVPLPWPSFRDDLRDAINAITVSHRTDHGTVSKAGLAKGKDATAGRLHNDTAYGLTGETDAKGNSIVVRRVPLASFKKLADLDRIRDTDLRAALYRQLEGLEGKAFERALAEFPDRDWHPYGRIRRVRVVEPLAVIPIRDRNGHIYKGYKGDSNYRYDVWELPDGKWVTSWKDREGKAVSSVVSMFDAHQSADQPRPHPAARKVLSLHQNDLLAIERDGEARRLMRVVKFGQNGQITLAEPQQAGDLKRRDAASNDDDPFKYIAPTCGGLKSARARQVRVDELGRVLDPGFPARTARRASRG

SEQ ID NO: 2585 - protein, 1089 aa, unidentified
  REGION 1..1089: note = Description of Unknown: Cas Enzyme sequence
MRWRLGADLGTNSLGWAVIELDENDVPIGIVTAGSRIFSDGRDPKSGVSLAFDRRAARSMRRRRDRFKQRQAALLKHLTEAGFLPTDEAERKALEGLDPFELRAMALREKLPLHDLGRALFHLNQRRGFKSNRKADRGKNDDSGKIRVGVARLHEAMRDAGAETFGDYLHGLRAASTDPNAISSVRTRLRPESGEGARGDGYDFYPDRAMLEEEFRLIWKRQARHHPEALTAENEERFFEIIFHQRPLKEPKIGTCTLVPGEPRLPKAHPLFQRRRLLEEINALRIVTAGANPAPLTLQQRDVLYLKLKDKKAVSFETLRKALKLDPDARFNKEGENRKDLKGDEVAAELGAKTRFGTRWQHFSDDAQWEIVSRIREQESDEDETMLVAWLKETHQVTSEQANAVAGARLPEGFGRFGETATKKLIAALKAEVIVYSEAVAKAGLGHHSDFRNDGGLDELPYYGAVLERHIMPGTGDPADPEEMRVGRLTNPTVHIGLNQLRRVLNRLIKRYGPPEQIAIELARELKLDEERKREINTKNRQNREAAVKRSEKLGEIGIADKGGNRALLKLWEELNPDNVLDRRCVYTGKLISIDMLFSGAVEVDHILPFSATLDDSNGNRLLCMREANREKRKRSPYEAFGHRDDWEEIAARAARLPREKRWRFEPDAMSRFDAQGGFIARQLVDTQYLSRMAREYLSSLYPGSGEGSGHVWVSPGRLTEMLRRSWGLNSALPDHNFDGGADQPKNRKDHRHHAIDAVVIGVTDRRLLMKIAREAGLRGHEAANRMTADLAEPWADFSDEVRDVVRGIVVSHRPDHGTASKAGLPKGRDATAGRLHNETAYGLTSEKDEKGNDLVVHRVPFDSLKKIADIDAVRDLDLRTALHEWTFGLDGKDFEARLRKFPELGSLEFRGIRRLRVIEPLSVIPIRDRNGRAYKGYKGDSNYRYDVWEMKDGKWQAEVVSMFDAHQPGWTSRIRKENPTAKKVLSLHQDDVLAIEQDGGTRKLVRVVKFGQNGQVTLAEPQEAGDLKKRDAASTDIDPFKYFSPTPGGLKRARARQVRVDELGRVSDPGFPARRAARRRSSKRAAAE

SEQ ID NO: 2586 - protein, 1023 aa, unidentified
  REGION 1..1023: note = Description of Unknown: Cas Enzyme sequence
MRRRRDRFKQRQRALLKHLQQDGLFPAEVSARRELEGRDPFALRAHALDAPLTLHEIGRALFHIDQRRGFKSNRKTDRGAEEDAGKIATGIDRLRAAMEDEGARTFGEFLHMRRASANGPNAIPSVRTRLRPETGANARGDGYDFYPDRALLEEEFDAIWLAQAPHHPDVLTADVHDRLFEIVFHQRPLKPPKVGTCTLVPGEARLPKAHPLFQRRRLLEEVNALLVVKAGETSQSLALEQRNTLLLKLKDKAKVSFATLRKALRLDPDARFNKESEHCTDLKGDEVAALLGHKTRFGPRWQHLPLDAQEQIVARVQAEEDESALRTWLATTWNLTSDEAKAVAGVRLPQGYGRFGLTATKRLVEALEAEVILYDKAVLKAGFAHHSDFRSGEVFADAKGNPTLPYYGAVLEQHIMPGTAEPSDPEEMRIGRLTNPTVHIGLNQLRRLVNALVVRFGRPEGIVIELARELKLTDEEKQRRSRENTQNRRDAEERSKKLAELGQADSGANRARLKLWEELNRDNVLDRRCIYTGIQISCAMLFSDKVEVDHILPFDATLDDSNANRILCLREANREKRKRSPFDAWGHTDRWPQIAELASRLPREKRWRFEPDALKKFEGEGFIARHLVDTQYLSRMARQYLTALYPETGEGSGRVWVATGRLTELVRRKLGLNCLLPDHNFGGGADQPKNRLDHRHHAIDAAVIGILDRGMLQRIARVSGQDGEVGRERIVIPDPWPSFRDDLQAAVNAIVVSHRPDHGTASKAGLPKGHDQTAGRLHNDTAYGLTGQIDSKGNAQVVHRVPLGSLKPADLEKVRDKDLANALKTFTLGYEGKDYERRLADFPKKGPEVFRNIRRVRVIEPLAVIPIRDRSGVAYKGYKGDSNYRYDAWELPDGKWVAEVVSMFDAHQPGWTSRIREQHHNPRKVLSLHQGDMLAIQPDGGERCLVRVVKFGQSGQITIAAAHEAGDLKRRDANLDDPFKYSSPTAGGLKKLKARQVRVDESGRVFDPGFPARKQASAVKSGE

SEQ ID NO: 2587 - protein, 1084 aa, unidentified
  REGION 1..1084: note = Description of Unknown: Cas Enzyme sequence
MKWRLGVDLGTNSLGWAIIELDINRSPCHLIAAGSRIFSDGRDAKSGASLAVERRAARAMRRRRDRFKQRQAALLKYLTLAGLFPSNKDERETLALLDPFALRARALHEVLPLHHIGRALFHLNQRRGFKSNRKTDRGKNEEDGKIRIGVSRLHDKMRDAGAETLGEFLHGRRASASDPNAIPNVRTRLRPEDSEGGKSDGYDFYPGRQMLEEEFEAIWAVQSPHHPAALTPENRKRLFEIIFHQRPLKKPKIGKCTLLGDEDRLPKAHPLFQQRRLLEELNALRMVRAGQIAAPLTLEQRDALYLDLKNRRTATFERLREKVLRLDPDDRFNKESENRKDIKGDEVAAELGATARFGNRWGHFDTDTQWDIISRIRDQESDEDEANLLAWLQEVHGLTEERARATAGARLPEGYGRFGITATTELIDVLRAEVIVYSEAVEKAGLGHHSDRRTGEIFTDESGRPALPYYGIALERHIMPGTGETSDPEEMRVGRLTNPTVHVGLNQLRKIVNALIRTYGRPQEIAVELARELKLDEERKKEINTRNRRNREAAEQRSKKLGEIGMADKGGNRALLKLWEELNPENVLDRRCVYTGRQISIDMLFSDAVEVDHILPFSATLDDSNGNKILCMREANREKRKRSPYEAFGHRGDWEDIAARASRLPREKRWRFEPDAMMRFDKQGGFLARQLIDTQHLSRLAREYLSALYPDSGEGSSHVWVSPGRLTEMVRRKLGLNDLLPDHNFGGGDQKKNRLDHRHHAIDAIVIAIVDRPMLQATARASAEAGFEGQERIIVPEPWQDFRDEVRKVINTIVVSHRPDHGTASRKGSKKGPDATAGRLHNDTAYGLTGEKDAKGNDIVVHRVPLAALKKTADIERVRDPELRAALLSWTKGLDGKDFEARLRRFPELGPEQFRNIRRLRVVEPLSVIPIRDKNGRAYKGYKGDSNYRYDMWELKDGRWVPEVVSMFDAHQPGWTSVIRRDNPTARKVLSLHQDDVVAIQQNGQDRKLMRVVKFGQNGQITLAEPHEAGDLKRRDATPNDLDPFKYVAPTAGGLKRVKARQVRIDELGRVFDPGPRNHPEVRT

SEQ ID NO: 2588 - protein, 1081 aa, unidentified
  REGION 1..1081: note = Description of Unknown: Cas Enzyme sequence
MHWRLGVDLGTNSLGWAVIELDEHDAPVGIVNVGSRIYSEGRDPKSGASLAVDRRGARSMRRRRDRFKQRQAALLKHLTLAGLFPAAEEQRETLAGLDPFDMRARALREELPLHQIGRALFHLNQRRGFKSNRKADRGKNEEDGKIRIGVSRLYEKMRDAGAETLGEYLHGRRASSADPNAIKSVRTRLRPETGEGARGDGYDFYPDRHMLEEEFKLIWERQAPHHPLAMTDESRDRLFEVIFNQRPLKKPKIGTCTLVPGEPRLPKAHPLFQRRRLLEELNALRLIRPGESAATLTLQQRDVLYLRLKDRKSATFESLRGRTLKLDPDTRFNKESENRKDIKGDEVAAELGAKARFGPRWRYLSDEARWEIVSRILDQESDEDEAMLIAWLEETHGLSREQALASAGARLPEGYGRFGFTATQRLIEALHADVVVYSDAVTRTGLGHHSDRRTGEILDGLPYYGAVLERHIMPGTGNPGDAEEMRVGRLTNPTVHIGLNQLRRVVNRLIERYGPPTQIAIELARELKLDEARKREINTKNRQNREAAVKRSDKLIEIGIADKGGNRALLKLWEELNPENVLDRRCVYTGMQISIEMLFSGAAEVDHILPFSATLDDSNGNRLLCLREANREKRKRSPYEAFGHRPDWPEIAARAARLPRDKRWRFEPDAMSRFDAQGGFIARQLVDTQYLSRLAREYLSALYPDSGEGSGRVWVSPGRLTEMLRRSWGLNSALPDHNFGGGADQPKNRKDHRHHAIDAVVIGVTDRSLLNRIAREAGARGHEAANRMTADLSEPWQGFSDDVRDSVRGIVVSHRPDHGTAGHGGSTAGRLHNDTAYGLTCEKDAKGNDLVVHRVPLTTLKAADIATVRDRDLRKALLAWTHGLEGKPFEERLRQFPETGPLPFRNIRRLRVIEPLSVIPIRDREGRPYKGYKGDSNYRYDVWEMKDGKWVAEVVSMFDAHQPHWTSAIRRDSPTARKVLSLHQNDVLAIEQDGQGRKLVRVVKFGQNGQITLAEPQEAGDLKRRDAAANDIDPFKYFAPTPGGLKRLKARQVRVDELGRVSDPGFPARKAKRRSTGQPPP

SEQ ID NO: 2589 - protein, 1104 aa, unidentified
  REGION 1..1104: note = Description of Unknown: Cas Enzyme sequence
MGWRLGLDLGANSLGWAALHLDGAGNPNGILAMGSRIFSDGRDPKSGASLAVDRRAARAMRRRRDRFKQRQAALIKYLIRDGLFPADQGERQRLAVEDPYALRARALDEALSPFELGRALFHLNQRRGFQSNRKTDRGQDDEAGKIALGVDRLTRQMRESDARTLGEFLHRRRQAAEDANHIPSVRTRLRPETGEGAKGDGYDFYPSRALIAEEFAEIWAAQAPHHPTVLTREVHDRLYEIIFHQRPLKAPPVGQCTLVPGETRLAKAHPLFQKRRLLEEINALTIVRAGEIAQRLTPEQRDVLFLALKTRAKMSFATLRKQLKLDPADRFNKESENRTELKGDEVAAELGAKKRFGTRWAHLSTEAQWEVVQRLTALESERDEAAFADWLRQTHGLSEDEARAVLGARLPDGHGRFGPTATTTLIDSLLHDRTEDGRVLVYSEAVQRSGLGHHSDFRRDDSDREVSELPYYGVALERHIMPGTAEPTDPDEMRIGRLTNPTVHIGLNQLRHVVNRLIRAYGPPDEIAVELARELKLTDEEKKRRNRENAENRLAAEGRSRKLEEIRQRDSGANRALLKLWEELNPGNVLDRRCIYTGEQISIDMLFSAQVEVDHILPFAETLDDSNGNKLLCLREANREKRRRSPFDAWGLTDRWPGIAERASRLPKAKRWRFEPDAMQRFAQDDGFLARHLVDTQYLGRLAREYLTSLYPGRGEGSNPVWVSPGRLTEMVRRKLGLNDLLPDHNFGGGADQPKNRLDHRHHAIDAVVVAIVDRGMLNAIARASGQEGSEGRERIHVPAPWDGFRDDLRAAVNRIIVSHRPDHGTVSKAGLRPGRDQTAGRLHNDTAYGLTGETDAKGNSIVVRRVPLGAIRKPADIARVRDPLLRTALAEFTQGHDGKAFEARMARFGELGPLLYRGIRRVRVTEPLTIIPIRDRDGRAYKGYKGDSNYRYDVWEMPDGKWLTRWHDPDAREQSSIISMFDAHQSGAPARPHPAAKRVLSLQQNDIIAIEPDGGERRLMRVVKFGQNGQVTLAAPQEAGDLKRRDATANDEDPFKYSAPTAGGLKKLRARQVRIDELGRVLDPGFPARKTVRRTRPRAAPAD

SEQ ID NO: 2590 - protein, 1103 aa, unidentified
  REGION 1..1103: note = Description of Unknown: Cas Enzyme sequence
MDWRLGLDLGANSLGWAALRLDGAGKPDSVLAMGSRIFSDGRDPKSGASLAVDRRAARAMRRRRDRFKQRQAALIKYLIRDGLFPTDQTERQRLAIEDPYALRARALDEKLSLFELGRALFHLNQRRGFQSNRKTDRGQDDEAGKIAVGVDRLVHRMQEADARTLGEFLHQRRQAAQDANHIPSVRTRLRPETGEGAKGDGYDFYPSRKLIAEEFAEIWASQAPHHPQALTPAVHDRLYEIIFHQRPLKSPPVGQCTLIPGETRLPKAHPLFQKRRLLEEVNALMIVRAGEVAQRLTPEQRDTLYLALKTRAKMTFAAMRKQLKLDAADRFNKESENRTELKGDEIAAEMGAKKRFGTRWPHLSVDAQWDVVQRLIALESERDEAAFQDWLRDTHGLSEDEAKAVLGARLPDGHGRFGPTATTTLIDSLLHDRTEDGRVVVYSEAVQRSGLGHHSDFRADDSDKDVDELPYYGVALERHIMPGTAEPTDPEEMRIGRLTNPTVHIGLNQLRHVVNRLIRAYGPPTEIAVELARELKLNEEEKKRRNRENSDNRLAAEGRSRKLEEIRQRDTGANRALLKLWEELNPGNVLDRRCIYTGEQISIDMLFSDRVEVDHILPFAETLDDSNGNKLLCLREANREKRRRSPYEAWGHTDRWPGIAERASRLPKAKRWRFEPDAMQRFAQDGGFLARHLVDTQYLGRLAREYLTWLYPGRGEGTSHVWVSPGRLTEMVRRKLGLNDLLPDHNFGGGADQPKNRLDHRHHAIDAAVVAIVDRGMLNAIARASGQEGSEGRERIHIPAPWDGFRDDLRVAVNRIVVSHRPDHGTVSKAGLRPGRDQTAGRLHNDTAYGLTGETDAKGNGIVVRRVPLSSIKKPADISRVRDPLLRAALAEFTQGQDGKAFEARMARFGELGPLLYRGIRRVRVTEPLTVIPIRDREGRAYKGYKGDSNYRYDVWEMPDGKWLTRWHDPDGNERSSIVSMFDAHQPGAPARPHPAARRVLSLQQNDIIAIEADGGERRLMRVVKFGQNGQVTLAAPQESGDLKRRDATSNDEDPFKYSAPTAGGLKKLRARQVRIDELGRVLDPGFPARKAVRPTRPRPAAG

SEQ ID NO: 2591 - protein, 1102 aa, unidentified
  REGION 1..1102: note = Description of Unknown: Cas Enzyme sequence
MAEQKKPVWRLGADLGANSLGWAAIELSAAVNGKPLSILAAGSRIFSDGRDPKSGASLAVDRRDARAMRRRRDRFQQRQKALIKYLIADGLFPADEAARKAMAAIDPYAVRARALDEALSLPELGRALFHLNQRRGFKSNRKADRKADDDAGKIAIGIDRTRDAIAEDEAAAGAEPGSWTFGKWLHERRTKGQSVRTRLRPESGEAAKGDGYDFYPGRALMEEEFDAIWAAQAPHHPDVLTNDVHDRLHEIIFYQRPLKAPQVGMCTLIPGDRRLPKAHPLFQRRRLLEELNALMIVRPGEVAQRLTREERDILFLKLKDKNKVSFASLRKALKLDPDARFNKESENRTDLKGDEVAAVMGSKTRFGNRWVHLSVEAQWDVLARLDDVESEAEDAAFRAWLSETYALTPEEARAVANAPLPPGYGRFGETATCKLIEALRDGKKDGRVLVYSEAVTDAGLGHHSDRRTGEVFEDAKGRPQLPYYGVALERHIMPGTGDPSDPEEMRVGRLTNPTVHIGLNQLRRIVNSLIRAYGPPAEIAIELARELKLTDDDKKRINRENNENRLNAQRRSEKLLAIGQADTGANRALLKLWEELNPANVLDRRCIYSGQQISIDMLFSAAVEVDHILPFSATLDDSNGNKIVCLREANREKRKRSPYEAWGHNARWDEIAARAAQLPRNKRWRFEPDAMDKFSDEGGFQARHLVDTQYLARLSREYLATLYPEKGEGSGHIWVSPGRLTDMVRRKLGLNDLLPDHNFGGGADQAKNRLDHRHHAIDAVVVAIVDRGMLNAIARASGQEGAEGRERIIIPEPWDGFRDALRETVNRITVSHRTDHGTASKAGLPKGKDATAGRLHNDTAYGLTGETDAKGNSIVVRRVPLSSFKKLADLDRIRDADLRAALYRHLDGREGKAFEQAIAAFPDLEWHPFRGVRRVRVTEPLTVIPIKDRNGRIYKGYKGDSNYRYDVWELPDGKWVAEVVSTFDAHQQGWASLVRFHNPTARKVLSLHQGDVLAMERQGENRKLMIVTQFWQNGQIRLVEHNEAGKLEERNKSQDDPYKNYTPTCGGLKKIKARQVRIDELGRVLDPGFPARTARRKTRKQA

SEQ ID NO: 2592 - protein, 1073 aa, unidentified
  REGION 1..1073: note = Description of Unknown: Cas Enzyme sequence
LAAGSRIFSDGRDPKSGASLAVDRRDARSMSRRRDRFKQRQRALIKYLVRDGLFPADEAERKALAALDPIELRARALDEALPLAHLGRALFHLNQRRGFKSNRKADRKDDAESGKIAIGIERLRDAMQEAGARTYGEWLHLRRKSAVNANAIPSVRTRMRPESGEGAKGDGYDFYPARALLEEEFDAIWEAQSPHHPDVLTAEVHDRLFEIIFHQRPLKAPKIGKCMLVDGEDRLPKMHPLFQRRRLLEEVNALMIVRPGEKARRLTPEERDLLVLKLKDRAKVGFDSLRKVLKADSDSRFNKESENRTHLAGDEVAAIMGAKTRFGTRWAHLPAEEQWDVIQRLNAVESDADHRAFLDWLAATYGLEEEQARAVANAHLPQGYGRFGLTATTRLIEALTSGRTPEGRTEKAAPIEPGRVIVYSEAVEHAGLGHHSDRRTGEVFEDKQGRPQLPYYGVALERHIMPGTGNASDPEEMRIGRLTNPTVHIGLNQLRRVVNRLIRAYGPPAEIAIELARELKLNDEQKKDLNRKNAENRAAAERRGKKLEELGQPNTGANRALLKLWEELDENAIGRQCVYSGQVISAAMLFDGRAEVDHILPFSATLDDSNANKIICVREANRDKGNRSPCDAWGHLDRWPEVAARAARLPKNKRWRFEPDAMERFREEGGFLARHLVDTQYLGRLAHEYLAALYPDRGEGSRPIWVSPGRLTEMARRKLGLNDLLPDHNFGGGADQPKNRLDHRHHAIDAAVVAIIDRSMLQRIARASGMEGADGREKIEIPPPWEGFRDDLRKVVNAIVVSHRADHGTVSKAGLDKGKDQTAGRLHNDTAYGLTGEVDDKGNSIVVRRTPLSGLKKLEHIEQIRDTDLKAALYRQVEGLEGKAFEKAIAEFPKLHWHPYGGIRRVRRVEPLSVIPIRDREGRAYKGYKGDSNYRYDVWELPDGKWVSEVVSMYDAHQPGWTSKVRASCPTARKVLSLHQNDLAAATPPDGERLLLRVVKFGQEGRLYLAPPEEGGSLKGRDADKNDPFRYISLFPAKQKAWRLRKIRIDELGRVLDPGFPARTTRRKTRKAA

SEQ ID NO: 2593 - protein, 1106 aa, unidentified
  REGION 1..1106: note = Description of Unknown: Cas Enzyme sequence
MTWRLGLDLGTNSLGWAALRLDEADQPCGLIAAGSRIFSDGRDPKSGASLAVDRRDARAMRRRRDRFQQRQRALLDYLVKDGLFPTDPAERKALAALDPYALRARALDEPLSLAEIGRAIFHLNQRRGFQSNRKADRGKDEDAGKIAIGIDRLRDAIDAAGARTFGEFLHLRRAGAESANAIPSVRTRLRPETGEGAKGDGYDFYPGRDLIKAEFDAIWEAQAPHHPTALTGDVYGHLYEIVFHQRPLRTPKVGKCSLPPHMEERLPKAHPLFQRRRLLEELNALMIVRPGETAERLTPEQRDLLLLKLKDKRKVSFESLRKTLKLDPAARFNKESEHRTELKGDEVAAEMSTKARFATLWCHLSIDRQWEVIRRLQALESKEDEARFCAWLAEAHALSEEQAKAVMGARLPHGYGRFGPTATAALIEALTTGRTPQGRGPAAPPIAPDRVVVYSEAAALAGYHHSDHRTGEIFEDGDGRPALPYYAVPLERHIMPGTADPDERDEALRLGRLTNPTVHIGLNQLRRVVNRLIRAYGPPAEIALELARDLKLSDDEKKRRNQENSRNRLDAEKRSEKLEAIGQRDSGANRALLKLWEELNPGNVLDRRCVYTGTQISMEMLFSGAVEVDHILPFDATLDDSNANKILCLREANREKRKRSPFEAWGHTDRWEEIAERASRLPRGKRWRFEPDAMQRFAEEGGFLARHLVDTQYLGRLARDYLAALYPGTGEGSSPVWVSPGRLTEMVRRKLGLNTLLPDHNFGGGADQPKNRLDHRHHAIDAAVIAILDRGMLNRIARESGQGASDADLLRIIVPEPWPGFRDDLKRTVEAIVVAHRPDHGTVSKAGLKRGRDQTAARLHNDTAYGLTGETDEKGNGLVVHRVPLASLKKAADIDKVRDLALRTALADFTAGSEGKAFEARIAKFPELGPLDYRGIRRVRIIEPLSVIPIRDVTGRAYKGYKGDSNYRYDVWELPDGKWQASVISMFDAHRTGESVRPHPAARKVLSLHRDDILAIERAGAPRELVRVVKFSEKQFAVAAPQESGALKARDADKGDPFKYIYPSPNTLKAWNARQVRVDELGRVLDPGFPARKSQRTTKSRRIAAE

SEQ ID NO: 2594 - protein, 1099 aa, unidentified
  REGION 1..1099: note = Description of Unknown: Cas Enzyme sequence
MTQHKIWRLGADLGTNSLGWAAIELSAPINGEPVSILAAGSRIFSDGRDPKSGASLAVDRRDARAMRRRRDRFQQRQRALIKYLIADGLFPADEAARKAMAAIDPYAARARALDEVLTLPELGRALFHLNQRRGFKSNRKADRGADDDAGKIATGIDRTCDAIRDDEAAAGAEPGSWTYGKWLYERRLAGKSVRTRLRPESDEGAKGDGYDFYPGRKLMEEEFDAIWQAQAPHHPTVLTDEVHDRLHEIIFYQRPLKAPRIGMCTLIAGDERLPKAHPLFQRRRLLEELNALMIVRPGEVAQRLTREERDILFLKLKDKGKVSFASLRKTLKLDPDARFNKESENRTDLKGDEVAAAMGAKTRFSNRWAHLSVEEQWDVIARLSEVESEAEDSAFRQWLTELYDLTPQQARAVLNAPLPQGYGRFGETATRRLIDALRDGEKDGRVIVYSEAVVLADLGHHSDRRTGEIFTDEEGRQQLPYYGVALERHIMPGTGNPSDPEEMRVGRLTNPTVHIGLNQLRRIVNRLIRAYGPPAEIAIELARELKLTDEDKKRINRENNDNRLNAERRSEKLIAIGQADTGANRALLKLWEELNPANVLDRRCIYSGQQISIDMLFSAAVEVDHILPFTATLDDSNGNKIVCLRETNREKRKRSPYEAWGHTGRWDDIAARAAQLPRNKRWRFEPDAMEKFRDESGFQARHLVDTQYLARLSREYLATLYPEKGEGSGHIWVSPGRLTEMVRRKLGLNDLLPDHNFGGGADQAKNRLDHRHHAIDAVVVAIVDRRMLNEIARVSGQEGAEGRERIIIPDPWDGFRDDLRTAVNAITVSHRTDHGTASKAGLPKGQDATAGRLHNDTAYGFTGETDAKGNSIVVRRVPLSSFKKLADLERVRDPDLKAALYQHLDGLEGKAFEKAIGEFGDREWHAYRNVRRVRVVEPLTVIPIRDRNGRIYKGYKGDSNYRYDVWELPDGKWVNEVVSMFDAHQPGWLSGIRAANPTARKILSLHRDDVLAIERNGGDRELVRVVKFSEKQFAVAPPNEGGALKGRDADKEDPFKYSYPSPNTLKAWHARQVRIDEIGRVLDPGFPPRKARRKTRKPG

SEQ ID NO: 2595 - protein, 1107 aa, unidentified
  REGION 1..1107: note = Description of Unknown: Cas Enzyme sequence
MVEKKNRIWRLGADLGANSLGWAAIELDAPVNGKPISILAAGARIFSDGRDPKSGASLAVDRRDARAMRRRRDRFQQRQKALIKYLITDGLFPADEAARKAMAAIDPYAVRARALDEALTLPELGRALFHLNQRRGFKSNRKTDRKADDDAGKIAVGVDRTREAIARAEQEAGAEPGSWTYGKWLHERRASATHANAIPSVRTRLRPETGEDAKGDGYDFYPGRALMEEEFDAIWEAQAPHHPDVLTHEVHDRLHEIIFYQRPLKAPQIGMCTLIAGDPRLPKAHPLFQRRRLLEELNALMIARPGEVAQRLTREERDTLFLKLKDKSKVSFASLRKTLKLDPDVRFNKESENRTDLKGDEVAAAMGARTRFGNRWVHLSIEEQWDVIARLEEVESDAEDAAFRAWLAQTYELTPEQARAVANAPLPPGYGRFGEVATRRLIDTLRDGEKDGRVLVYSEAVTEAGLGHHSDRRTGEIFEDAEGRPQLPYYGVVLERHILPGTGDPSHSDEMRVGRLTNPTVHIGLNQLRRVVNRLIRAYGPPAEIAIELARELKLTDDDKKRINKENNDNRLAAEKRSEKLLSIGKPDTGAHRALLKLWEELNPANVLDRRCIYTGTQISIDMLFSAAVEVDHILPFTATLDDSNGNKILCMREANREKRKRSPYEAWGHTARWEEIAARAAQLPKPKRWRFEPDAMEKFKDESGFQARHLIDTQYLARLSREYLETLYPEKGEGSGHIWVSPGRLTEMVRRKLGLNDLLPDHNFGGGADQAKNRLDHRHHAIDAAVVAIVDRMMLNEIARASGQKGMDGRERIEIPSPWTGFRNDLREVVNAITVSHRTDHGTVSKAGLPKGKDATAGRLHNDTAYGFTGETDAKGNSIVVHRVPLSSFKKLADLDRIRDADLKAALYQHLDGLEGKAFEKAVTDFPNLEWHPFPGIRHVRVTEALSVIPISDQNGHIYKGYKGDSNYRYDVWELPGGKWVNEVVSMFDAHKLGWQSAIRTANPTARKALSLHRDDVLAIERDGGARELVRVVKFSEKQFVVAAPNEGGALKARDADKSDPFKYSYPSPNTLKAWRARQVRIDEIGRVLDPGFPARTARRKTRKPI

SEQ ID NO: 2596 - protein, 1115 aa, unidentified
  REGION 1..1115: note = Description of Unknown: Cas Enzyme sequence
MAWLLSLDLGAGSIGWCALALDAEGRRIGIIDAGVRLFGDGRAPSRGDQQGTPLAVERRAARAMRRRRDRFKQRQRALLKHLEKDGLFPTSAEDRRALEILDPFELRARALETPLTLHELGRALFHINQRRGFKSNRKTDRGADDDTGKIAVGIDRLRARMDEEGARTFGAFLHMRRASAASPNAIPSVRTRLRPEEGENARGDGYDYYPGRDLLEEEFDAIWDAQAPHHPEALTPQVHDRLFEIVFHQRPLREPKVGTCTLVPGETRLPKAHPLFQRRRLLEEVNNLRIVRAGENPEPLTLEQRNILLLKLKDKAEVSFESLRKALKLDPDARFNKESEHRSKLKGDEVAALLGHKNRFGTRWQHLSTDAQWEVAARIEAEEDEAALRAWLESAWDLSPEQAKATAAARLPQGHGRFGLTATTRLIAALDAEVITYDKAVVKAGLGHHSDFRTGEVFTDKKGIPALPYYGVVLEQHIMPGTAEPSDPDDMRIGRLTNPTVHIGLNQLKLLVNALIRRFGRPEGIVIELARELKLTDEEKQRRSRENTRNRRDAEERSKKLIELKQPDTGANRARLKLWEELNRDNALDRRCVYSGTQISIEMLFSDKVEVDHILPFAATLDDSNANRILCLREANRVKRKRSPFEAWGETARWPQIAELANRLPREKRWRFEPDAMAKFEGEGFIARHLVDTQYLSRMARQYLSALYPETGEGSGRVWVATGRLTELVRRKLGLNSLLPDHNFGGGADQAKNRLDHRHHAIDAAVIGVLDAGMLQRIAHVSGQEGEEGRERIIIPDPWPTFRDDLQAAVNAIVVSHRPDHGTASKAGLPKGRDQTAGRLHNDTAYGLTKEKDAKGNTLVVHRVPLDALKKPSDIDKVRDTELAAALKTFTIGYEGKDFEKRLGDFPRLGPEPFRNIRRVRVIEPLSVIPIRNREGAAYKGYKGDSNYRYDAWELPDGKWVAEVVSMFEAHQPGWTSRIRQQHHNPRKVLSLHQGDILAVEGADGESRLVRVVKFGQNGQITLAPPHEGGDLKRRDADQDDPFKYSAPTAGGLKKLKARQVRVDEAGRVFDPGFPARKPDASARKAAKKAAKKAAEKTARNAAENAAGTLAHTPE

SEQ ID NO: 2597 - protein, 1090 aa, unidentified
  REGION 1..1090: note = Description of Unknown: Cas Enzyme sequence
VQSKTSFAFDIGTNSIGWCVFELDRLNDPVGILASGARIFSDGREPKSGTSLAEGRRLARGMARRRDRYKRRRKAVIRTLIEYGLMPDDPAARRALVAETNDKRSGQVASDVYALRARALDEKLPLHHIGRALFHLNQRRGFKSNRKTDKRDNDQGKIAEGISRLKAEIGNAGARTFGEYLHRRRLAGRWVRVRPSRMPGKDDKPEDGYGFYPERSLLRDEFDAIWMAQAVHYPDMLTQERRQHLETVIFYQRPLKPVQVGHCSFNPAEKRLPRAHPLFQEFRLYKEVNELAIVDRAQHAEKLTIEQRDALVTQLKAQREASFSALRKTARAPTGTRFNKETESRSKMKGDEVAAELSAKTRFGQPWFSLPLDERWAIVDMLRTIEDPLELTAWLEQNYTLLPERIDAILAARLPEGYGRLGETALTERLAELKADVIPEAEAAKRVGYDHALLTRGGGHDELPKYQEVIARRIPPGTEAPDDPYDVRKGRITNPTVHIGLNQLRRVLNALICRYGKPEQIAIELARELKLNEEQKREKNIEIARNTRAAEQRSAKLVDLGVPDTGYNRVLLKLWEELDLRAPENRVCIYCGEAIGIGTLFSSAVDIDHILPWSKTLDDSQANRIVCHVACNRQKANHAPADVPQWQTRYDDILERASRLPLNKRWRFGRDATKKFADEETFLARQLTDTQYLSRLAHEYMAALYPDEEPDAWGELTRKNHVRVITGRMTEMLRRQWGLNSILADHNQKNRNDHRHHAIDAAVVGVTTRALLQRIATAAGSREALALEETIGRIDPPWSTFREDLGAAIDRIVVSHKPDHGTLPRPGKMGQTVGQLHNDTAYGLTDEIDERGNPIVVRRKPFLSLTDKDIPNIRDVELRTRLRAATSGNKDFATALLTFKQNDLKFSGIRHVRVTEGLKVIPIRDAAGHAYKGYKGDANYRYDVWEMPDGKWIAKVVTLFDAHQSGFDWSSLRPHPAARRVLFLQQGDMVAYDHPRDGETIGIVVKFGQNGQITLVPHTASGDLKRRDALPNTEEEAIARNIRDRNGDPVFDPFKYFAPTAGGLKKINLRKLHVDEIGIVRHLKRRGGEG

SEQ ID NO: 2598 - protein, 1080 aa, unidentified
  REGION 1..1080: note = Description of Unknown: Cas Enzyme sequence
MGNTQFSFDLGTNSIGWAVFGLDEHGNPYRLIDSGVRIFSDGREPKSGTSLAEGRRVARGMARRRDRYKRRRKAVLRTLAEYGLMPDDPKARRDLIGETRDNKAGQVPTDVYALRAQALEEKLPLYHLGRALFHLNQRRGFKSNRKTDKRENDQGKINTAIADLQDRLKGRTLGQYLYEQRGGDPANRGWVRVRNVQKTEGEKLIEAYGFYPQRAMLEDEFNRIWEAQADHYPEVLTEERRDHLFRVMFYQRPLKPAKVGKCSIKTDEERLPKAHPLFQQFRLYKEVNELTVDDGLGRKAKGYKLNLEQRDHLITLLKGQKESNFSRLRKAIKLPAGHRFMKESEARTKLSGDEVAAALSHKSRFGQAWFDMDMDTQWRMIEKLRETQDPLVLNAWLEEKFGFGPNRRDAIAGAKLPEGYGRLGETALRTLLDELKDNVLSEAEARERAFGNATESSLGLDELPSYQEVLERRIPPGTGDSEDPYDVRMGRITNPTVHIALNQLKRVTNALLRKHGKPDQIALELARDLKLSDEQKKEVNRTIARNTREAERRGEELIDTFKVENNGYNRALLKFWEELGDQPINRICIYCGEAIGMTTLFSGAVDIDHILPWSKTLDDSQANRILCHVHCNRQKRNRAPFEVPEWQGRYEEIVERANRLKPNKRWRFARDAMERFEGENDFLARQLTDTQYLSRMAHEYLASLYPDEEPDEWGVFQRRNHVRVVPGRLTEMLRRAWGLNSIISDHNRKNRDDHRHHAIDAIVVGVTTRSMLNQISHEAARGEEMGEEDVIRRFPPPWPDFRDHAKAVVDRIVVSHKPDHGTLPTPDKPGSTAGQLHNETAYGFTGEEQKGVPVVVTRKRFVELTEQDIPSIADPVLRDELYGEIRGLSGKALTEALMRFAQNSKTFKGIRRVRVHQTLNVIPIRDETGRPYKAYKGDANYRYDVWELPNGKWAEEIVSMFEAHKPDWQSTVRRENPTARKVLSLKQNDLVAYEHPEDGYTVARVVKFSKGMVAFAAHREGGALKSRDADKDDPFKYFYKSAGAMRDVKLRQIRVDEIGQVFDPGPQDRESRKARKQADG

SEQ ID NO: 2599 - protein, 1084 aa, unidentified
  REGION 1..1084: note = Description of Unknown: Cas Enzyme sequence
MQFDNICYAFDLGTNSIGWAVLGLDAHSQPNRIINSGVRIFTDGREPKSGTSLAEGRRVARGMSRRRDRYKRRRKAVIRTLVEYGLMPDTPAARRTLVAETNDKRGGVPADVYALRSRALDEKLPLHHLGRALFHLNQRRGFKSNRKTDNRDNEKGKIASAISALEMAMDTAGARTLGEYLCKLRGDDPADRGWVRVRMQTQKTDAGKDVAAYGFYPQRTMLEKEFNSIWDAQAAHYPDVLTPERREHLFRVTFYQRPLKRPIIGKCSFNSAEERLAKAHPLFQAFRLYKEVNELALVSPDLLGRKLTLDERDALINHLQSVRDAAFTALRKTIKAPVGTRFNKESDSRGKMKGDEVAAEMAHKTRFGQAWFGKSVAERWEIIDKLRDIDDPLVLDAWLEEKFGVAPEQRDAIAAARLPEGYGRLGVTALTSMLDELKSAVISEAEAARNAGYDHALARKGDGLDDLPYYQEVLDRRIPPGTGEPNDPYDIRKGRITNPTVHIALNQLKRVTNALIRKYGKPEQIAIELARDLKLNDKQKDEVNRNIAKNTRDAERRSEELRNTFKVDDNGYNRALLKFWEELGDQPLSRACVYCGQAIGMQTLFSSEVDIDHILPWSKTLDDSQANRILCHVHCNRQKGNRAPFEVLEWQDHYDEIVERANRLKSNKSWRFAGNAMERFEGESDFLARQLTDTQYLSRMAHEYLASLYPDEEPDEWGVFQRRNHVRVVPGRLTEMLRRTWGLNAIISDHNAKNRNDHRHHAIDAIVVGVTTRHLLQQISTEAARGLAQGTKDALRKFELPWPGFREDVRAAIDRIIVSHRHDHGTLPNADKPGSTAGQLHNDTAYGLTGEERNGVPVVVRRKAFLSLTEKDIPNVRDEQLRHHLEVETYGLKGREFSDALMRIQRSDPRYAGIRRVRVTEVVSVIPIRDRNGRVYKAYKGDANYRYDVWELPNGKWLHEVVTMFDAHRADWTSAIHHANPAARKVLSLKQNDMVAYEQPNDGKTIGRVVKFSQSGQVTFAAHQEGGALKSRDADTDDAFKYFYKSAGAMKAIKLRQVRIDEIGQVFDPGPQDGESRAALKDKD

SEQ ID NO: 2600 - protein, 1113 aa, unidentified
  REGION 1..1113: note = Description of Unknown: Cas Enzyme sequence
MRKKLFSFDMGTNSIGWCVFNLGPSNETIAIVDAGVRIFSDGREPKSGNSLAEGRRMVRGMARRRDRYKRRRKAVLRTLTEYGLMPSDPGARAALVAETNDARRDRPANDVYALRARGLDERLPLHHLGRALFQLQQRRGFKSNRKADRRSNDNEKGAIAIGEDRLRTAMHEAGARTLGEFLAGRRGTDPLGRGGVRVRIDAAASSEGEGRREKPGYDFYPVRAMLEDEFDQIWARQAKFWPEVLTDDRRRHLFRVMFYQRPLKPPVVGKCSFNPSEMRLAKAHPLFQTFRLYKEVNELELVMPDQSQRKLTKDERDALVIHLRGVRSAGFPALRKTLKLSERGTRFNKEHEGREKLLGDEIHAAMSDKALFGNRWAAMPMDRQWEIVERLREENDPLALHRWLVEQAGLSDEAAEKAADAKLPEGYGRLGRTALATMLEELKADVLTEAEAARRAGYDHALARHGEAVERLPKYQEILERRIPPGTGDLDDEYDIQKGRITNPTVHIALNQLQVVTNRLIARHGRPERIHIELARELNQSEDQKREATARNARNRRDAERRSAILTEFGQPDNGFNRQLLKQWEELNPGNPLDRRCIYSGTVITPTMLFSGAVDIDHILPWSRTLDDGATNRILCTREANREKRNFAPAEVPSWGDRYDDILERAQRLPPNKRWRFALDAMERFEKDRDFLDRQLTDTQYLARLAHDYLGALFPDEEADGDGVVKKRNHVVVVTGRMTEMLRRKWGLNGILPDHNFADPTKTKNRKDHRHHAIDAAVIGVTSRSLLKRVADAARDGETQGAEDAIRTLAPLWPSFRDDLKVAVDRIVVSHKPDHGTLPKPGETGRTAGQLHNDTAYGLTGEVDARGNPIVVRRKPFLSLQPKDLHSVRDLRLRAALENATHGVGGRDFTAALMKFRQAAGHHYRGIRRVRMVEGLSVISIRDKDGRAYKGYKGDANFRYDVWELPDGRWIADVITMFDAHRPDIDWQKRRPHPAARKVLSLKQNDMVAYDDPRGGPTIGIVVKFGQNGQITLVAHNEAGELKNRDALPNSAEEALARGAEPDQGGQVAFDPFKYYSPTAGGLRKIGLRQVRVDEAGRIFDPGSRDRNKKSAK

SEQ ID NO: 2601 - protein, 1108 aa, unidentified
  REGION 1..1108: note = Description of Unknown: Cas Enzyme sequence
MHNTLFSFDMGTNSIGWCIFALNAKSEPYRIVDAGVRIFSDGREPKSGNSLAEGRRIARGMSRRRERYKRRRKAVLRTLSEYGLMPVDTAARHALVSETRDRGRTIDPIAQADVYNLRSRALDAELPPFHVGRALFHLNQRRGFKSNRKTDKRSNEKGAIELGAERLHLAIKEARARTLGEFLAGRRGYDPVQLGQVRVRAGSVDGEDTVPASAKQGYDFYPQRKMLEDEFNAIWHAQARFQPHIYTEERRAHLFRVTFFQRELKPQKPGKCSFNSLENRLPRAHPLFQTFRLYKEVNELELVLPDLSQRKLSPDERDNLIRKLRSTRKVTYGALRQVLKLGSDIRFNKETESRKDMAGDEVSAALSAKDAFANAWSSLSLDAQWEVVSRLREEQDSAKLHRWLVETHALSEGAAEVVASIDLPEGYGRLGPSALSSLLDHLVDGTDTDENGRQVVISEAKAAERAGYDHALARQGEGLDRLPKYQEVLERRIPPGSGESGDPYDVRMGRITNPTVHIGLNQLRRLVNRLIARHGKPNRIALELARELNQSDEQKKKINTLIARNTRDAERRSQKLREEIRVADNGYNRMLLRLWEDLNKENPLDRRCVYSGTVITVEMLFSGAVDIDHILPWSRSLDDSQGNRILCTREANRQKGNCIPSEVPQWMDRYDDILERAARLPENKRWRFARDAMEQFEKNRDFLDRQLTDTQYLARLAHDYLGALYGDEEPDGDGVLKRRNHVIVVTGQMTEMLRRKWGLNNLLHDHNYGQTAKGKNRKDHRHHAIDAAVIGVSTRSLLQKIATAAARNEENGAEDALRHIDPPWPSFREELKAVAGRIIVSHKPDRGTLPANGSTGPTVSRLHNDTAYGLTGQTDENGNMVVVRRKPFLSLTDKDIPSIRDGDLKAALDPFVAGLSGAAFTQALMKFQKAEGPFHRIRRVRLVDGLNVIAIRDKEGRPYKGYMGGSNYRYDVWELSDGQWDAEVVSMFDAHQPGWKPAMREKHHNARKVLSLRQNDMVAYQEGDTRSIARVRKFGQNKQIWFDGHLESGNLSERHKDVDDPFRDFSKMPNGLKQIGLRQIRVDETGRVFDPGPQDAQSRAAKRSRPHP

SEQ ID NO: 2602 - protein, 1091 aa, unidentified
  REGION 1..1091: note = Description of Unknown: Cas Enzyme sequence
MIQKRLFSFDIGTNSIGGAVFKLDSRCIPEELEYSFVRIFSDGREPKSGTSLAEGRRIARGMARRRDRYKRRRKAVIRTLIEYGLMPDTPAARRALVAETNDRAAGAVAADVYALRARALDERLPLHHVGRALFHLNQRRGFKSNRKTDKRDNDQGKIATGISRLKSEIGAAGTRTFGEYLHRRRLDGKWVRVRPSRMPGKDDKLEEGYGFYPERSLLREEFNVIWRAQAAYHPDELTEERREHLETVIFHQRPLKPVQVGNCSFNPAEKRLPRAHPLFQEFRLYKEVNELALVDRAQQPSKLTLDQRDALVNQLKAQREAAFTALRKTAGAPTGTRFNKETESRGKMKGDEVAAELSTNTRFGQSWFSLPLGERWTIIDMLRTLEDPLELTAWLEQNHALAPDRIDAILAARLPEGYGRLGETALTEILAELKADVIPEAEAAHRAGYDHALLTRGDGHDQLPKYQEVIARRIPPGTEAPEDPYDIRKGRITNPTVHIGLNQLRRVLNALIARYGKPEQIAIELARELKLNEEQKREKNIEIARNTRDAEQRSAKLIELGHVDSGYNRVLLKLWEDLDRAAPENRVCVYCGKPIGIGTLFSSEVDIDHILPWSRTLDDSQANRIVCHVACNRQKADHAPADVPQWQARYDEILERANRLPLNKRWRFGRDAMKKFADEETFLARQLTDTQYLSRLAHEYMAALYPDEEPDAKGEPARRNHVRVITGRMTEMLRRQWGLNSILADHNQKNRNDHRHHAIDAAVVGVTTRALLQRIASVAGGREARALEETIGKIDPPWPNFRDDLKASIERITVSHKADHGTLPRPGEMGRTSGQLHNDTAYGLTDEVDERHNPIVVRRKPFLSLTEKDIPAIRDSELRERLQNAISGRKDFAAAMLDFSQKDQKFGGIRHVRVTESLKVIAIRDAAGRAYKGYKGDANYRYDVWEMPDGKWIAKVITLFEAHQPHFDWSSVRPHPAARRVLFLQQGDMVAYDHPKDGPTIGIVVKFGQNGQVTLVAHTESGDLKRRDALPTTEEEAIARNIRDRKGEPAFDAFKYFAPTAGGLKKINLRKLRVDEIGTIRTLKRRGEAQA

SEQ ID NO: 2603 - protein, 1427 aa, unidentified
  REGION 1..1427: note = Description of Unknown: Cas Enzyme sequence
MNIKKNILGLDLGTNSIGFARVKEDTENGGSSIEQIGVRVINLSTEEQSNFEKGKAIATNAERTLKRSMRRSLNRYKLRRDNLIELLLEHNIINKDSLLTEEGTGTTYSTYALRAKAASTEIPFESFARVLLAINKKRGYKSSRKVNNKDDGQIVDGMLIAKKLYEEHLSPGQLSYQLLLKGNKNLPDFYRSDLKEEFSKVWSFQEPYHPEILTPDFKKAIDGKPPRFTAAAFWINHSFNCAENKGSREEKKLQAYQWRSDALTKELSKEALAYVLTEINKDLCNASGYLGAISDRSKELYFTHQTVGQYLYKQLQQNPHVRTKGQVFYRQDYLDEFEQIWETQSKFHPELIPALKSEIRDMIIFYQRKLKSQKGLVSFCEFESKEIEIEDNHKQNKRRIGLRVAPKSSPIFQEFKIWQILGNLSFKNKATKEEFKLDLDCKKILFEELNLKGNITPDKALKLIGYKSKEWEANYSSLEGNHTNRIIFNAFIKILDVEGYNEALGKNEDGETTDIASLNKPASEIIGIISTLFEHLGINTNILRFNAQLNGKDFESQDAYQLWHLLYSYTEDRRKYSKEDILLYGTENIGLKKKLCEKFGFKPEHSKILGNISFVTDYGNLSTKAIRNIYPHILELSYDKACTLANYKHSANSLTVKENAERILKPRLELLKKNELRSPVVEKILNQMVNLVNCIIDEENKALTENGLEPNFHFDEIRIELARELKKNAAERQEMTSQIKDSKQLHEKITQILQSEFGIPQPTRKDIIRYKLYEELKNNGYHDLYSNTYIPREILFGKEIDVDHIIPQMSLFDDSFSNKTIIFRKDNQEKGNKTAFDYISQKYGNEGVTEFIQRITSLYEKGAKTKEEGLSKAKFKKLQITESEIGDGFIERDLRETQYIAKKAKNILLTICRHVVPTTGEITARLRQDWGLVNVMQEINLPKFRTLGLTEMVSKKDGGKKERITDWSKRNDHRHHAMDALTIAFTKHSHIQYLNHLNARKNENNKFHTAIIGIEQKETENLLDELGNKKRIFKKPMPNFRELAKQHLETVLISHNLKNKVVTKNKNKIITKTGTGVRIELTPRGQLHKETIYGKYYITLSQEEKVGAKFDEASIQMVTKPLYKKLLLERLRANNNDPKKAFTGKNALSKTPIYLDASKQSTLPEKVKITWMEEDYSIRKDITPDNFKDIKSIEKIIDDSIKKIITKRLEVFDYNPKSAFSNLDENPIWLNEKKGIAIKRVTISGIKNAIPLHFKKDNNGKNILDKNNQPTPIDFVSTGNNHHIAIYQDEEGNYHERVVSFFDAVQLISNGLPVIDKEFNSSMGWKFQFTMKQNELFVFPNEKSGFIPKEIDLFSSKNKVAISENLFRVQKISTKNYFFRHHLETTVEEKKELKGITYKSQLGLQSIKGIVKIRLNHIGRIVEVGEY

SEQ ID NO: 2604 - protein, 1502 aa, unidentified
  REGION 1..1502: note = Description of Unknown: Cas Enzyme sequence
MKKILGLDLGTNSIGWALVEQDFEAKIGKILGDGVRIIPMSQEVLDNFGGGTPSKSQTADRTGFRGTRRLRERHLLRRERLHRVLNILGFLPKHYTGQIDFKKRLGQFLDETEPKIAWKEIWNEQKNKNDFEFIFQKSFYEMVDDFKQIDIEIKIPYDWTIYYLRKKALSRKIDKEELAWIILNFNQKRGYYQLRGEEEEENPNKLVEFHSLKIIDVVADEKPNSKGDTWYSLHLENGWIYRRSSKISLFDWKDKVRDFIVTTDLNDDGTIKIDKDGYEKRSFRAPSEDDWTLLKKKTEANIEHSQKNVGTYIYETLLENPSQKIRGKLVRTIERKFYKEELIAILKKQIELQPELFTEDLYNDCIRELYRNNEAHQLILSKQNFVYLFVNDIIFYQRPLKSQKSSIGNCMLEYRKYKDKNGNEVKEYLKAIPKSHPLYQEFRLWQWLFNFKIYKRDDDTDVTEQFITNITDKEKLFDFLNNRKEIDQKTLLKQFKLKENTHRWNFVEDKVYPCNETGIQIKTRLKKVENVPTDFLTSEIEQKLWHIIYSVTDKNEFEKGLKTFAIKYNLDENSFVENFKKFPPFKSEYGSFSEKAIKKLLPLMRLGKYWNLELINAKIKDKISKIITGEYDETIKNRVRDKTIDLKSENDFQGLQLWLTQYIVYDRHSESANADKWNSVADLEKYLEEFKQHSLRNPIVEQVITETLRVVRDIWKKYGDFSEIHIELGREMKHTAEERKRITNIVTENENTNLRIKALIMELEGYPDVENVRPYSPIQQEKLKIYEEYAVSNIEENDTEKEFIQKINKVAQPSKSELQRYKLWLEQKYCSPYTGQTIPLGKLFTEEYQVEHIIPQSRYFDDSLSNKVICEAAVNQLKDRQLGLEFIKNHHGEKIDCGPGKKIEIYSEEAYRYFVKEHYTKNYAKRNKLLLEEIPEKMIERQMNDTRYISKFVSQLLSNIVREDKNDDGVNSKNLIAGNGKITTILKQDWGLNEVWNGLILPRFKRMNKLTDTEDFTSKNQEGHIIPSIPLKLSKGFQKKRIDHRHHAMDALVIACATRDYINLLNNLSAKSENLRYDLQYKLRNTEKKTYFDKRENKQVTRDVFTEFKKPWNNFTIDVQNELEKIVASFKQKLRVLNKTTNKHYAYDNGKKVLKKQEKGDNRAIRKPLHKDTIFAKVYLLNETREITLQKALEKVKELKDINIIVERMLRKKIAEYFIENDIDINSALKDEYLKSHPKIKIFEIQTAVRKSLDISFTEKIIKESVTDTGIQKILLNHLLIEKNNPEVAFSPEGIEKMNKNIIELNDKKYHQPIYKVRKYESLGNKFPVGIAGNKRDKYVEAEKGTNLFFAIYVDKDGNRSYETIQLNKIIDKLKQKLPAVPEVNENGCKLLFYLNPNDLVYVPKNDEVENKKFEIDRNRIYRFTDSSGSTANFVPANVAKVIFNYNKEKQKKLKIDYKIQNEIGVGSQGSKNENAVTGEQIKSVCLKLKVDRLGNVKLDNE

SEQ ID NO: 2605 - protein, 1371 aa, unidentified
  REGION 1..1371: note = Description of Unknown: Cas Enzyme sequence
MKCITKAAEMRKTVDIIVIFVRRILGWNERDRKICDYICYFTILSYMKKILGLDLGTSSIGWALVNEAENDEESSSIVLLGVRIINYDNFVSTKTGKESKEPEKDFAGGKGISPNAGRTLKRSMRRNLQRYKLRRENLIEILKEYKFISNESILSENGNRTTFETYRLRAKAAKEEISLEQFARVLLMINKKRGYKSSRKAKNTEEGTLIDGIEIAEELYDRNLTPGEYCLELLRKNTKALLPDFYRSDLQTEFNRIWEKQKEFYPDILIVQLKENLQGKNEKQTWAICREPFGIVGAKRNGDKGEQEKENYEWRAKALNEKIDLEYLAIVLQKINSQINGSSGYLGKISDRSKELYFNKQTVGQYLMAILDKNSNTSLRNMIFYRQDYLDEFETLWSKQAEFHIELTETLKKEIRDVVIFYQRKLKSQKNLISFCEFENRKIEVEIDGKKKIKIIGNRVIPRSSPLFQEFKIWQILNNIEVTDKNSGEITLLSKEEKEKLFAELQKAESLSTKKALEILFEKRAKNYSIENYKEKIEGNKTRAKICEILNKTLADEKLNELWHLLYSWESENSNLAEKLEKKYVYPSDIAKKLSNITFLDDYGNLSARAIKKILPHLKNGKQYNEACELAGYAFSKSSLTKEQIENKILKNRLEILPKNSLRNPVVEKILNQMVNVINSIIDIYGKPDEIRIELARELKKGAKEREEMAASIAYATKENERIKKLLQSAPFNIANTSKNDIIRYKLYEELASNSYRTLYSNTYIPQESLFTKDFDIEHIIPQSRLFDDSFSNKTLEKRQENIEKGNSTAYDWMAKKGEKELADYEIKIKNLFDQEKISRAKYNNLKRREKDIPDDFIDRDIRDTQYIAKKAREMLQELVRVVVPTTGSVTAHLREDWQLVNVMQELNFPKYERLGLVEEIENKDGQKIKRIKEWTKRNDHRHHAMDALTVAFTKYAHIQFFNHINSHYDSTSEIYGIKQKYFTNDNKALPPIPLKNFRVEAKKQLEKILVSIKAKNKVVTTNINKVNNQKTLTPRGQLHNETIYGSQKQNVVKEEAINAKFNEAKILTVTKLAYREALLKRLRENENDPKKAFTGKNSLAKNPIYLDNMHTKQMPEKVKTVTFEIVYTIRKPIDKDLNVEKVVDVKVREILKDRLNKYNNDPKEAFVNIKENPIWLNEKKRISIKYVTIFGVSNVEALHDKHDKDGNKQPVGFVSTSNNHHVAIYRDEDGNLQENVVSFYDTVKRANAGLPVIDKEYKQSEGWQFLFTMKQNEYFVFSNEKTGFDPKKVDLMNPENYHLISPNLFRVQKIASKNYMFRHHLETKVSFETKEMEKQLRGIAWELYQSTEKLKYIVKIRVNHIGQIIQVGEY

SEQ ID NO: 2606 - protein, 1417 aa, unidentified
  REGION 1..1417: note = Description of Unknown: Cas Enzyme sequence
MSKILGLDLGTNSAGWAIRNTEVTDNQIIDYGVLTFSKGVASEKGIEFPKVQKRTESRSKRRNYQAEKYRKWELLEFLIKKGMCPLNEVELKKWKGFKKGEKREYPQSVNFLNWLRFDFNGDGKPDFHLFNSDKHESYYVFRALAISPAHKAVYERNPEILGRVLYQLVQRRGFKGRDGEEANTIIKGSKDGVVKGRETIESYLENYKTLGAALYYYQKEQGGRIRQRYNLRRDFELELKTIADTHGLSKKDYQKIWKAIIWQRPLRTQKGLVGKCIYERNKNRVQVSHPLYEEYRTWVLINNLKIEQPKGEDKATYLQNNIYPLFYKVSNDFELSSITKQLQKDGAKMEANFNHKTKVISAKLLRSFQDILGEDWKEKYAWNEIHNRESTPQKKTSISYNFEDVWHVLNTFDGSENLKFFALEKLKLDEVKADKFSKLKLNKGYATLSLSAIKKLLPYLQRGFLYSQAVYLANLHKVLGAKQITDEIIEYFAYEIENIINSNGHEKTLNNIVNSLIQDELIEKKRYSIEVDRALDDSEKRLVEAKVIEVFGEKSWNELDEDEKQKSLNYVKQQFKSFLKKSVHSRHNVFVKQPRLHDQVFAYLQETYQVPNERKKWLWHPSEQEAYTPASDYQYFRLKNKDVYISENSCDAFVKKNPEAKFQGKSIKLLESPEPISKGFKNPMALKSLHKLKHLINDLLKAEKIDDDTRIVIEIARELNDANKRKAIENWNKEREKENDKFRKEISEINKEIEASYDENDKTLLKKLRLWHEQNGLCLYTGKNIKKSDVFNGELYDLEHTIPASISFDSELKNLTLASKDFNQRIKGKKFPTQLQNYNESATINGEMYQPILGIIETIFGKIKVEEKKKKGKLVKVITSDKIEKLEKQFKEEKNKASWAPTKSLKDYYIQNYHKLKMDLDYWRGKLHTFTLEEYKAGWRNSQLRDTQIVTKYALPYLKTVFKKVSVEKANVVNAFKEIYEVKLWDEKKDRKVHSHHAIDAATLTLIPPYYDRDKMLLKYNLEKDNQTGKIYHEKPKGWKQFSALFIKKIEADVLINNLEDNKTIIPTFKKVRKRGKIDYIRYRDNEGKWRYSLDSQGHKLPKVAKGDTIRGQLHGESLYGAIKQAKRDENGKILFDGAGKMLVEETPILVIRKELVFKKDANSPGFKSLDEVEKVIVDQALFQMIKKQVGQLYDSDFKTAMNEGVYMLNKKGKQVNKIRHIRCKETLKYDTAVKVHNHQSAFKSEKDYKQFTLAKNGENTLCLYYQNNEGKIIHILPIGEVAGLNYKNDQQFFEEPHFQTVEGKKKSQIPLYAVLRSGQKVLFYENSKEELKDLTQADLSKRLYKVYKFESDGRMRFRHHLASGIDTELKKDNKEFSSFEIKESPVFMRLTQKAWNFAIDGVDFEMKIDGTIKFNY

SEQ ID NO: 2607 - protein, 1435 aa, unidentified
  REGION 1..1435: note = Description of Unknown: Cas Enzyme sequence
MKKILGLDLGTTSIGWAYVNEAEKETEKSEINQLGVRVNPLSTEEQTDFEKGKSISINADRTLKRGARRNLDRFQLRRKCLIDLLVKANIITKDTVLAENGKNTTFETWFLRAKAAQEKIEKEDLARVFLAINKKRGYKSSRKTKSVEDGQEMGQAIDGMEIAMLLHNQNLTPGEYCKQLLEKGIKKLPDFYRSDLIAEIENIWEFQKQFYPEILTDEFKKEIIGKGQTQTSAIFNAKYKFYPAQNKLKGIEKNKLSYKWRTEGLKMQLDKEEVAYVIAHINNDLNKSSGYLGAISDRSKELYFNKQTVGQYLYTKLSQNPHDKLKNIVFYRKDYLDEFEKIWNTQAPHYPELTEELKNDIRDVAIFYQRPLKSQKSLISFCEFESEEIVKEIDGKIKKVTIGAKVCPKSSHLFQEFKIWQILNNINFKHKSVKIKKEDKEEFILDLDTKELLFNELNLKGNLTVSKLFKLIGVNSKDWEINYKEIEGNHTNKKLYQAYLKIVDELGYDVKQLLKVKLDKDEVNLDDLDVSALAIKNMVKEIFDAHGINSEILDFNPLLEPKILIKQKSYELWHLLYSYQEDDSESGNEKLYGLLNKKFGFTKAQGIILANINFADDYSSLSTKAISKIFPFIKEHRFSEACDLAGYKHSKASLNKEELKNRELKPKLELLKKNSLRNPVVEKILNQMVNVVNTLIEQETEKQKSKGITTPFKFDEIRIELARELKKTAKERAEMTTNINKSKTDYLKITEILNKEFGIKNPNKNAILKYRLYDELKNNGYKDLYTNTYIPKDKIFSNEIDIEHIIPQSRLFDDSFSNKTLSYRNENLKKGNRTAYDYILEEYGQEKLELFIARVENLYQLGIKNKEEGISKAKYKKLFMQAKDIGDGFIDRDLRDSQYIAKKAKEMLFQITPSVLTTTGSITDKLREDWGLINVMKELNLEKYRALGMVERIERIDGGTKEVIKDWTKRNDHRHHAMDALTVAFTQHNHIQYLNYLNARKNENHKLHKNIIGIEVAITELKEEGNSKKRIFKSPIDNFRVVAKEHLEGVLISHKAKNKVVTNNKNVFKIKNSVKTQVAKTPRGQLHKETVYGKYHYQESKLEKVSAKFDLETIKKVANPTYRTLLINRLQEFGNDPKIAFAGKNVLSKNPIYLDEAKTKTLPDSILLTWLEEDFSIRKDITPENFKDEKSIEKVIDLKVKDVLLKRFVEFGKDSKKAFSDLDKNPIWLNHEKGISIKRVKISGVKNAEPLHYKKDHLGEFILDEKQQKIPVDFISTGNNHHVAIYKDEKGDLQENVVSFYEAVTRVNQGLPVIDKDLNKTLDWEFLFTMKQNEFFVFPNEKTGFDPSGVDLLDPDNYKLISPNLFRVQKISVVKYGNSTIRDFMFRNHLESLLLEDKELKNTSYIQIKSLAPLEKIIKVRLNHLGQIVQIGEYN

SEQ ID NO: 2608 - protein, 1372 aa, unidentified
  REGION 1..1372: note = Description of Unknown: Cas Enzyme sequence
MKKVLGLDLGTTSIGWALINEAENKNEESAIIKLGVRVNPLSTDEQQDFEKGKSITTNANRTLKRHARRNLDRFKLRRKVLIENLIKANIINNQTLLSEDGKDSTFTSYEIRAKSTFEKISLEEFARVLLMINKKRGYKSSRKTDAQEDGEAIDAMGIAKLINKEKITPGEYIYSLLKNGAKVLPDFYRSDLEAEFLAIWDFQKQFHPNILTNELLASLEGKNKIEFEKEFKKAGIEKAETPKGKAPERKLTEYEWRAKTVIEEIDLRELVYVLSKIHTEINSASGYLAAISDRSKELYFNNLTVGQYLYSKLNKNLHNPLKNQVFYRKDYEDEFEVIWNKQAEFYPLLNDDLKKKIKDITIFYQRPLKSQKGLLSFCEFESKQIEKIVNGEPKMQTIGMRVIPKSSPLFQEFKIWQIIENLKVNGKKDVLEDDQKKTLFHELNFTGELTAKELAELLYENPKDVKLNYEKIEGNRTSLALIEAYNKIYEIEKGEKLNFKKLDADTLQKEFHTFFDEMGYNADLLYFDSSVEGKELFQQAQYQLWHLLYSYEGDNSKTGNQSLINKITEKFGFPEQYAKIIAAVKFQDDYGNLSAKAVRKLLPFLAEGNDYTNACICAGYEKHSKASLNRDEIANKILKDRLKILNKNSLRNPVVEKILNQMINVINAVCNEYGKPDEIRIEMARELKQSAKEREETTKAINKATADYEKYRKIIKEEFGLQRVSKNDLIRYRLYLELESNGYKGLYSNEYIPKEKLFSKEVDIEHIIPQARLFDDSFSNKTLEYRKYNLEKSNETAYDYMVNKGNNELDQYEARVKSMKNMSPAKRKKLLISSDNIPDGFINRDLRDSQYIAKKAKQLLEEVFRNVTTTTGSVTNVLRKDWGLENVMQELNWDKYKTLGLVEYFEDKDGKTIGRIKDWTKRNDHRHHAMDALTVAFTRHNHIQFLNYKNARRDETHKQSTVIHAIENKETYRDQKKKLRFNPPIPLDNFRAEAKAQLEAVLVSQKAKNKVTTKNINKIKQKNGVLKVKAETPRGQLHKETIYGSSKQYVSKEEKVNASFDQAKINTIAKLKYKNALLERLSAFDNDPKKAFTGTNSLAKNPIYLNEMQTHKVPEKVKTVEMETIFTIRKDIAPDLKIDKVVDVKVRQILQDRFNEFDGDAKKAFVNLEENPIWLNKEKGIAIKSVTITGVSNAIALHFKKDKEGKDILDQNANKIPVDFVSTGNNHHVAIYRDEKGNLQEEVVSFFEAVERRNQGLSVIKKEHEQGWELLFTMKQNEFFVFPNEVDDFNPVEADLLDKKNYSKISPNLFRVQKFGSLLSGFWFRHHLETSVQVNSKLKNITYKVVQSTKNLEGLYKVRLNHLGKIVHVGEY

SEQ ID NO: 2609 - protein, 1535 aa, unidentified
  REGION 1..1535: note = Description of Unknown: Cas Enzyme sequence
MKKILGLDLGTNSIGWALVEQDFEAKLGKILGSGSRIIPMGTDKQDYEKGAGITKSATRREKRTARKMNKRYKLRRNKLLFILHALGMLPDQFQFKVLSEDILLDKHIQGIPVPEKLQELELLPVQRKREYSNDCKRKDRQYKENGEKIKDEPFSIINCELRVNALKTKIDLKDLGKIFFQFNQLRGYSGGTNDDDKKRIQKKDENDGDAKKNTYEVITQKFEILSVRKSDETFIVKRGENKGEKQNYSIVKIKLDDEEKEGKTKLQNLQEGQEEELEIRIKRNKKGEETSVEFALPQKTNWRKNMEANEKILKEENLFISELHLKDLIQNKWMKIRNRVFLRNRYKEEFDKVWDTQAKYYSILNDCPKETLEKIANYIFPGKSESQQQLKKQSIEKGLKYVIKEQIIYYQRPLKPQEELISNCRFEKEEKVIATSHPLFQEFRSWKQINNLYVTSKQEIYNEKKKKSVFQYTDRYLTGEQKQNIYDKLQVQKYVSFNDVRKIIGIKDDKIEYLNGLNIKAKLIGCDTFISIRKHFGEHFENFIAKEPKIVEKIWEVIFDVRNHEGSEYETTSKRVSSIIEILQNYTDQETATDLSLKLAQNIRFPRKYASLSAKAIQNILPLMKLNPENISEQVKSKFENIKQLIETGEITDNVDYKLEDYVIDFVKNNPNALENGGLMEYLAISLIYSKHTAETVEAQIKNYHDIKYEKRNLRNPIVEQLISETMQVIKAIWKQYKFNPEDLEIRVELARDLKNSSKERDKIYKGQLKNQKINENIKKRLEELKQEFSPRNIDLYKLWSKQCIEEYPKQSKEPTREEIEKMRHWEEQKCISPYTGKPIPLSKLFTKAYDIDHIIPKSRYYDDSFSNKVVCETDINEEKSNRTAWEYITQQNSKFGIFDVESFVNHINKNFFGKKKKNLLAEKIPLNPVERQLKDTQYISVAIKNELAKIVGSQNVKTSTGEVTAFLRSRWGLKKLFMKLTENRFKQMELWDLDENGNPKTKWIEDYFDKEKNKHVYEIKNWSKRYDQRHHAIDALVVALTEQSHIQRLNNLNKYIQEELEKRKDEFKIEKKESESILDAFFNLDDKRRDEILRIMESSRKFEMPFPDLIKQVREHLESMVVSHKLKDKLGIKIDEKTKKKQIKIRGALHEETYYGKLNGKDTKTIEIGKLSIKDISKIVDDVLQEEIENHRKSYESMREAFTGEGLKVFNEHRLRKIKLSKLKVKNVSNIEDENIKKDIQMHIEQYKSIKKAFNKEGLDKFNSAREIKIDTVSLLIINPIPVYKVKAWYNTEEKSKNSLQQLYGNDSKQSVITGDNYMFLVMEREGKRIFDIASLYHSVCIAKNALKENVQDIKNYIAEEIRTSYGERNKIKGKPQKNPDKVSFTLQQNELVYLPTNSDDSVLKMSNREFEEWVQDKENKKVFCKRVYKVVKFTGKYCFFIPNNYANTISVAKDLTDEENENLKKIYGEKNVPKHEKNYEEFGSFKNSTKTEVGENFVKELVMKKEFNGDKPIKIQDTCVKIEVDWLGNVKKV

SEQ ID NO: 2610 - protein, 1203 aa, unidentified
  REGION 1..1203: note = Description of Unknown: Cas Enzyme sequence
GDPEGLVKAAVEKTKEERAKHNARTFGELMAILAASRRVPVLDEKEKPKRDVADKVVTFSKRIRNELGKFEFHADREMLRDEFDCLWKTQSAFDSELSGMLTNELRRQLDDPEGDEIWRNRGLLFGQRRTYWRTGTLGRCDLEPTDRCAPIADRHASYFRVLETANNIRIRGPHDDDFRPLTAAERLQVITKLRKQKTGSVEAVQVALEIDKKSLKKRDESDRNYALNLQRDEDREINTDWFHRAIVIEGIGESAWNAWSEAQREGLNRALLRFDPSVETDVERVVALAGKFGLDEAACQRLVAGWKTRPKLEKRVSLSRRALANLIPYMEKASAGGHWPTQIEARAAFAADPAACDRTTGKPATETQRRRYAVGSAGSNRRDRYYMRKHGIMPPAPTLANPVVRKAIHEVRRHVIAHLSAQGGRIPDRIVIEFAREASKSAKVNNQILATNRQREKIRRHIRDEIVRAAFGARYDYLSHNQLRAAEDRVILCLSQRGVCAFSLDKMVIDDQGPCAYSGRAITLRQAALGDNLEVDHIIPYSRCGDNSLANRVLCYRDSNRNKGNQTPREWWGEQFDSRIVNMKFLDGYKPDRKTDYFSPRDYARKWANLTRKDVPAEWKGSQLTDTAYAARQVQDYLQRALWPDEPTHLEGGARRVFVTKGVYTSLLRRDWQLYQRVWCESGPSREQQDQASAKDRGDHREHAIDAVAIALTDSARIQQLARIVKLQEEARIKAKAQGAAPERLKRPPLETPWGSIKSFRRQVLSLIYPSFDDAGEPASAGRAIVVSHRAAGRKLTGAFHEETLFGSIPNDRTLFTGHKAVAELTPNHLRLPVPEKESDAIARLTTRYQAQGLDKKAAKRRAEEVVRSPQFVPMLVDQPPAKSGIVRDVGLRRVLRAAIEKRLRECNIDKTADTFSDKDLKRILKEGHLTMPSGVPIKRVVLLRTISDPVLIRRRQWDESAKQWTSDASPRSIRAYIGGNNHHIEIREDQKGNWHGVIVPTYQAAVRARIDKRDPIDRADDPDRGGQFVMSLAEGETVYMRHKETNEPGYFIVFKLDKPNTIQFKPHWDARRAMGEKDEDGRVIPDSEREEMPVTAAQLKALAPPGKKTPIKVMVDPLGRVYPVEPSRVGAIDVSAIDPRIVAIAREASAARKSLVAESGKSKRRRHGSWSWMRARLEREGLAHLGAQLSAAVRALDTGGDQ

SEQ ID NO: 2611 - protein, 1144 aa, unidentified
  REGION 1..1144: note = Description of Unknown: Cas Enzyme sequence
MKYRLGLDMGATSIGWSVFDIESQTLINAGVRIFDDGRDNKSKASLCVKRRTARSARRLTNRKHIQMQNLLKVLTDCGLFPSDTFSRQELKKLNPYQLRKQALDKQLQPFEIGRCFLQLAERKGFRSNRKDNREEGGKLKQGYTELKEKIKEEKARTYGEFLYNQNLKNQTIRLKNTFDSAGKFLGGLFPFREIYQEEFKTIWEKQKSYYPTILTETSQQKIKDALFFQRPLKEAEEGECIFEAGEKRIAKAHPLFQEFRIWQTILNLEFSPSNSAKYLPLALQYNNELVELLCNPQNIAVTAQGVISYKNIKAALKLDKNGIFNYERSDNVTPGLEKGLLVNTTQNAINKSRYLSAFWNTMSDSQKEQLINVITRPHSYITFSNHKISIEDEDQIISKYLQQTFHLSQEAAEELLYDIDLEDGFGSLSEKAIRKILPFIKQGMRYPDACQEAGYHHSDKEYTHLTQLPYYGKLLGQSCLGKKLNPQNDEEKYGKINNATVHVALNQVRHLVNEIMQDYGQPYDIAIEYARELGASMEERKKLSDTRDKNELENQKILKELNEKIGHRDYTKRDILKYKIWQRLPFYNKNKLVRECPFSGDPISLADLMNGQKFQIEHLLPFSRSLDDSLNNKVIATVDANRYKKERTPFEAFGESKDGYDWNAILHRAKQLPAEQQWRFAPDAMKKFEEQSGPIARSLNDTSYMTRILQDYLQPIVREDGKKRVQAVAGRLTSMVRKAWDLDDYKNKEDEEQYRALHNHHAIDAFVVSAIERGQIAQVAQQLKEVKPEAARQFHDELIKLRDKNVSKEEKDKIKKKIHDFISDNEQKIIRHYFPIPETIRIHEIKKRIADIHISHKPSLKDITDTHSTIGQLHEDRAYGLHDFVDDTSLKADFTSRKDHHKEHTEKEIVDYIPMFYHKADKEAYYNAFKQWFMLDKKASTMDAKTKEEKAAKALIAKQEQAAIDDLRSAARQAFKWYVGGNNFCAEVYQINSQNKINGCLTKDQGDWKTEIVSNYNATIRHGRGENIAYWHYKYPNAKRIMTLRRNDMVLGTFTREQASQSTFPKGLTEYVQNIFNQDTCLDQVDVLLRVKKISSDGRIALTPHNIAKEDHDTKSWLANADALKTYNARKVFVTSMGKIRHAK

SEQ ID NO: 2612 - protein, 1051 aa, unidentified
  REGION 1..1051: note = Description of Unknown: Cas Enzyme sequence
VPSEQIPYRLSLDLGTNSIGWCMLKLLPEGTPEGILGMGVRIFSDGRDAKSGTSLAEDRRLAKQARKRRDRFLKRRKELLEALIQNGFMPSNERERKQLAALDPYGLRAKALDSRLEPFELGRALFHLNQRRGFKSNRKTDNDQESGKIKAAITRLTASLKQSGMRTLGEYLHNCRQSGRPVRFRPVKKGAGVDYAFYPQRSLAEAEFDAIIAAQSPFHPQLARIVEGRGGLRDIIFFQRPLKPVTPGLCTLMPRYPRAPRALPVAQRFRILQDLNHLRVLDTGNLTERPLTVEERDSLLAILETGKDLGFDAIRAKLKLPPSVAFNLDTDTKDGIKGDATAKILSGKKYFGKAWACLPRELREEIVDHLLMAEDEEELVAALVSDCSLDPSKAAAVAQAALPRGYARFCRETLAALCEQLEKDVIPYSDAVARAGFKSHSDLSTGEVFDRLPYYGVALPRCLKPGSGKHSDPQEVRLGRIPNPTVHIALNQLRKVVNALIKDHGKPAQIIVEVARDLKNGPAAMQKIRKRQKEAKDANDRRRAQLEECGAKPTADAMLRLRLWEDLGHDAAARRCPYTGEVIGVSMLLSDAVEIDHILPFSRSLDDSPANKTVCLRRANRYKLNRAPHEAFGDSRDGYSWEGIAECASRLPENKRWRFAPDAMERLEREADFLDRQLVDTQYIARIAGEYLTCVCDKRKIWVTPGRLTRLLAHAWGFPKKNRNDHRHHALDAALIGVCDRSLLKKAADHNAREVANGLERFLADFEQPWPGFREEALAAHDRIVVSHRADHGLGGRLHNATAYGIVNPTPKAMNNTQHRVSADSLSKPGDLVKIKGRGIRARLLAACSGRPFAECLALVQECEGLSESKAAARLTDSLNDLPDKMFKQKAQQFFQAKGIRRIRLVETWDIIPIRNAQGYAYKGFKGDANAYYPIYLQEDATWSGEILSTFDANNPETKTPPATGQLITKLFKGDMIEIVQDEKAIIAYIVKLSAKQIALAEHFEANTDKRYKAKEFTYIFKSSPEALRKCQAKPLYVSPTGEVTYLRRGA

SEQ ID NO: 2613 - protein, 1163 aa, unidentified
  REGION 1..1163: note = Description of Unknown: Cas Enzyme sequence
MIILGLDIGSNSVGSAWVDTDNQTVELAVSVFPAGVEETPSGRGAPLNQARREARGQRRLLARRSLRKRRLRRELAEWGWMPTEPAAMTAWLQMNPWRLRRKALAERLTAEEFGRVLLHIAQRRGASWFEEDEEAPKPKAGKNKPKRLAKTANRELRQRMKEAGAATVGAMMADLLDERAASAGVGNKRYPVAIRNRNDAEGRPVYEWVADRELLRDEFRRIWDEQSRHDGPLARQLTQHPERRAILWDPRGSDLWKEQGLLFAQRNTYWDTGTLGRCDLEPTDQVCPKADMYAQEFLVLETVNNIRVTAEGQSSRPLSAEERAAVIQALRTRKDPTAATVRAALGISRKEVRRLFTLNLEADSSRKLNADWFRREIIGAVGSDRWEAFSQADKDAVNKAVLKFDPRDEADAARLGQGCRAWWGLSEHQAAAFVKAWRSRPPEGQRVKLSRRAIKNLLPYMRQGATVTEARKWFAEDAASPATPQQRARYSLGVKPPSKAARRFLTKHPDLVPPAPAMANPVVRKAIHEVRRHLTAWLRKFGRRPDRVIVELARDAKHSAVVANRIHKENQLRRERRRQVEEQFAPYLEGMTLTQRARALDRILLCEDQRQACAYTGERITEPTAARGDGVEIDHIVPRSRGGGNGLHNRVLCCAGANRGKANLTPKQWLSEEAFGAMEQRLGHWKADKQLLRKWHALHRDAPSQEDFVQSQLSDTAYASRQVARWLEAALFADRPGRQVFATTGAYTAMLRGLWGLHFDQGRPEPAAKSRADHRHHAIDAVVAAFSGPERIGELAGTFQQRELAHAAGRPVPRLQMPVPWGAHEAFRRQVIDAVQPLLVCHRPQRRRVAGALHKETLYGPIPDPEGRLTTRFRQRIPLGALSPRHLRVPQRWDELAARLAQARTKAAAGDIRRRMLALKDPPPGKPGLVRDRWFRHELREWLRAHGLDPDAFAPPQLRDLIRAGKNTLPSGVPVRRLTLVRVLNNPVLIPRKSPDPLTGRMEPDPHPRSLRVYDSQNNHHIEIRRDAKGAWTGQVITNFQAARRVRPPKASGRSPVPVVNREDTPEGTFVMSLSIGETVRMRDPKTRHLEYFVVFKIDFPRGPIHFVRHWDAGAAAEDERHPARQALRVSVAQLQALGLDDGTPPTKVRVGPLGSAVPLVGD

SEQ ID NO: 2614 - protein, 1141 aa, unidentified
  REGION 1..1141: note = Description of Unknown: Cas Enzyme sequence
MGRLVMSKILGLDIGTNSVGSAWVDTDTKTITLGVSVFPAGVEESQTERGAPRNQKRRQARSQRRTVQRRARRKKRMRRFLLERGWMPSDPAGQKTWLELNPWTLRREGLHRKLTALEFGRVLLHMAQRRGALGVEAGEDDKEEGKIKESITALREAMGDSRAETYGAFMADLFDAETALITGTRAQTIRKPIRNRSDATGNPVYRFCPDRDLIREEFDKLWKAQRSHGGELAAQLTDDLRRQLDEPSSNRGSWRHQGILFGQRQTYWDAGTLGHCSLEPTDLGCPLPDMYAQEFRVLETVNNIRITPLGGWTRRLDPEERGKVIAALRRQKTGSIATVRKALGLNKPQSRDRFMLSLEGDPKRKLNTDWFYREIVRGVFGQEAWAALTQATRESVNRAILKFDPHDSNHRQRLAAGCHDWWNLDAQQTERFLRAWAGRPRVEQRLKLSRRAIRNLLPYLRRGLNPMEAQKEFAEDPASGASDLQRLRYAPGGGFPPRSLRRFLEKHPDSLPPAPMLTNPVVRKAIHEVRRHIQAHIRKAGCKPDRVVVELAREARLPGVVRNRQLADNRKREAERKAVADQHGLNQLTRTQRERAIDRVLLCRQQKNLCAYSTPDATITERIAAEGKNVEIDHIIPRSRGGHNGLTNKVLCFTAANRGKGDQTPAEWLDAESFAELERRLRHWQKDQPVKWKNLHRHAPIIEDFTSSQLTDTAYASREVARWLSDALYGNRQDGRRRVFCTRGSYTALLRGDWGLSRAKNRADHRHHALDALVVALTPNHLQDLARAMRVVERARAEGNPPPRRQPVPPPWGDRNSFRAQVIDQADKLVVAHRPERRRLAGPLHKDTLYGPIAGHPTQFTQRIPLGKLKAKHLRVPEGWEDLRVRLQQAASPAAKRELRRAMLQLRDVPPGKSGVVRDRWFREELRAALRALGLDPDRLTPAQSKRLAAEQGLSLPSGVPVRRLTLLKTFRNVVRMPSRGQAKPSRARPERVYDSQSNHHVEIREDAEGKWRCQVVTTFQAAQRVRPPKCSGREPLPAVDRSDNEHGRFVMSLCIGETVYMKHPQTGQPGFFTVYKLDERSLHFTPHYDAGRDRATDNAPAREKVELSVSQLKRLNAPPHATPKKVWVGPLGDTKFLDRD

SEQ ID NO: 2615 - protein, 1042 aa, unidentified
  REGION 1..1042: note = Description of Unknown: Cas Enzyme sequence
MNRILGLDIGTASIGWTVLDDSGKSGTIIVSGVRIFPEGVDRDQQGGEQSKTQTRRESRGARRQIARRARRKRFLIRYLQSVGLLPTDGTELEEVIEMNPYPLRARALDEQLSAYEIGRVLIHLNQRRGFLSNRKTDKAKPSETKGMLAEISALAGRIDGTGCQTLGEYLHKIGTGEIESSGDEPKGIRNRHTRRDMYEHEFETIFDRQRAHHPELLSDDVHDRIHRRIFFQRKMYWPKSVIGVCDLERRLKRCPVADRDAQRFRIVQEVNNLKIVDRSTGEERRLSPEERIITIDYLSKAKTRSFDQIRKKLKFTEEVRFNFEKDDGGGRDKLQGHVTDATLSGKNVLGKGYWDIDDRIKDRIVKILIEEDREDVAISALINKCGLDHEQAECASGAHLPDSYANHSKYVIKKLLPYLEEGKFYMGNDASDSALHAAGYLRPDEQVIDQQTLLPESPDLPNPIVRQALVEVRKTVNAIIREHCKDRTQKNERPFDRIHVELARETKNSFEKRKEIRFENVKRRKLRESAGDEIAGAGDKVTRSKINKYLLWQEQNRTCVYSGKAISFEQMLSDATDVDHILPRWRSLDDSMGNKVVVFRNENAAKGDKTPYEWLADSDPEKYDEACFRAWKLGNHKYRRFKQQELELDQFVARQLVDTQYISRCVTQYLKCLGAKMVMPRGSMTAELRRRWELNNILSDDGEKTRADHRHHAVDAITIALITQARIQRFAKSRGDGQLCPWPDLRQQAEQSVMDIKISHRVLRRLSGALHEDTFYGPTQKYKGTDPERCLPPGSIGHGINRMHAKDWTEDSGTFVRRKVIAEVKNAKHLAKVRDKGIREILANHLRGIDVDPFGKAAYPKGCFEGDNAPTMPSGVPIKRVRLLENKSTLRQVSDRRDFHYTQPGNNHHITYRETADKKGKPTWVGEVTTMWDAAVRGRTKINGKSLPLVDQSDTETGKFVMSLSIGELFEIDDPKGELGRILCVVRKIDQTGRLHYKLHIDARTSGELSPLNLYVSPKQMHENKTRKVTVTPVGQIRWAND

SEQ ID NO: 2616 - protein, 1203 aa, unidentified
  REGION 1..1203: note = Description of Unknown: Cas Enzyme sequence
MAAVLGLDVGSNSIGSAWIDLETREIQLGVSVFPAGIEDSDNKRGAPLNLARRMARSQRRSLHRRAQRKRQMLEFLLSAGLLPEDSAARQQLFDESPWALRRDGLKRELSPFEFGRVLVHLNQRRGAFGLESDGDEEAGKVKEAIAHLQQELQGRTVGEFFADLIDSQRVPIESDKVDSLPEPIRNKGGVFRFHADRSLIRDEFQRLWQAQSQFDGPLKKLMTDELRQQLDNEQGDDTWRQRGFLFGQRRTYWSTDTLSRCELEPTDLQCSKADMVAQEFFLLDYVNNLRIDDGTSNGQWQKLSEAQREAVLASLRSQKTAKVKTTLRKALKIDAASRKKAKLPDNVRLNVDVDEERAPPTDWFYREIIHPFGEEEWFAQPVEFREHVNRSLLRFDPKDEADEQKLRQGAARWWKLADDQIDALIAGWQQRPRKDDRASLSRRAMLNLLPYLRQGLNVSEARKAFSTAPDSGATDEQRRRYSMQAMRASAADRHYLEKHQGQLPPAPMLANPVVRKAIHEVRRHVNAHIRRAGCRPDYIVIELARDAVTSEKRANEMLARNRKREAIRKKIIEQFDLGRLSKSQEARAVDRVLLCRQQRGACAYTGRSITEQMAAAGDGLETDHIVPRSRSQDNSLANKVLVFRDANRNKGDRTVKEWLAHDEAGFGTVEVALRHLQSESPDEYFTKAECRRKWDNLHKDALSIEQFANSQLTDTAYIARQVAGYLKNALYADDPIEEGKPRERRVFTTKGQYTAILRREWGLVESQLDREFAHVPVDPQEPAHGESGLARRTKKDRRDHLHHAIDALCIAFTTGDLIQDLAHIARAQEEARAQTGHWPRAAHLPAPEPWEDTGHFRREVMDAVKRIVVCHRPVKRKLVGAFHEETLFGSVVEKDGPHRTENIDNLFTNRISADALTSNHLRMPDEWDALHQQLAQPGLTGAMQREIRKKLAALKDPSPAKSGIVRDRELRHQIRQALVRLGFDPDNFDPKKLKPLIDAQQLRLPSGVPIKRVVLLRANNAPVRIARKQFNPETRRYEPDLDPQTGEPNRRTQRVYVGGNNHHMEIREAANGRWNGEVITTFEAAKRVRPAKSSGRLRASAVDRSDTDKGRFVMSLAEGEVLYCRRKDRPELAPNYYVVCKLNRNAGSQDQIVLAPHWDARRASDQDRWTVTPSDLRACGAEPGKPPIKVAINPLGVVTPRSD

SEQ ID NO: 2617 - protein, 1404 aa, unidentified
  REGION 1..1404: note = Description of Unknown: Cas Enzyme sequence
MKKTLGIDLGSNSAGWAIRNSDIDGNQIEDFGVITFEKGVASEKGNEFPKVQKRTESRGKRRNYQAEKYRKFEILQFLIERKMCPLSIEDFNNWKIYRKGKKREYPQSEEFLNWIRFDFDGDGLPDFHLFGKDKNESYYVFRAFAANPDYKDVFVNNPQILGRVFYQLVQRRGFKGRDEEEAKTMLTGSDKNGTKGRNDIEEYIEKYKTLGAALYYYQKDFGGRIRQRYNLRKDYEVELKAICDLYGISKDDYSKLWKAVIWQRPLRTQKGLIGNCIYEKGKKRVAVSHPLYEEYRTWVFINNLNIIPPADENKQDYIQKKIYPLFYKLKPDFELSDIDKQLKKDGAKRTSKHHEKTKVLSAKLLKQFQDIFGENWKELLKWDISGDRSSQPPKKPEIEYTFEDIWHILMTFDGQENLKNFALEKLKLDEDKATKFSKIKLQQGFATLSLSAIKKILPYLQKGFLYSHAVYMANLYKMLGENAISETLINHFSEEIFKILNQDSTNRKNAAIVNNLISEMLNDENRYYITNNRDLDDNEKKTVLKSIIDNYGQESWDKLEEEAKANVIKYVSTKYLEFLKKSFFDKKNLFVQPERIDEKIFGFLKDNYHVSEDKKKYLWHPSEQENYAKAEDYLEYSIGKKKYYVKEKNKNGFLSRNPEAEFEGRQIKLLGNPEPLSKGFKNPMALKSLHKLKNLVNYLLQIGKIDEDTRIVIEIARELNDKNKRKAIELWQKEREKENDAYRKELADYKEQFPQIKLIDENTLIRKIRLWHEQNKVCIYTGKTIPFSDLIVGNKYDFEHTIPVSISFDNELKNLTIADSGYNRLQKGKKFPTQLINYDSEQIINGETYNPIIRTIEFIFGERTVEYKEEKGKPKKIVKWKKIDDLEKQFDEWKKKASYASTKEIKDNCIIKYHIIKMDLDYLKSKLATFTVTEYKAGWRNNQLRDTQIITKYALPYFKTLFKRVSVEKGSVTDIFKKVYKVQSRDSKKDRSVHSHHAQDAAILTLIPNAFHRERIIKAYEEEIDKRTGKTYHELPMDWDGFSENYILELKDKVLINNLTDNRTITQTYKTVRKRGKILYDIDENGNNKKRVSSGDTIRGQLHGETFYGAIKQPLRDDENKILFDENKKMILEEKIHLVVRKPLVYKDKADSPGFKTLEEIEKVIVDKDLFKMIKKQVEESDLKTALTDGVYMFDKKGNKINKIRTIRCFENGLKYATAIKVHNHHFVSDKEYKKTTLATNGENTYCLFYKNDIGKAMKILSIVDLAELKLKNIQSLHNEPEFSSFESGKGKNKIQLPLYSVLKNGDKVLFYKDTIHELKDLDKEELSNRMFKIYQFEKDGRIKFRHHLAAGIDTELKKENPEYSSVNFDEKQVFLRLRQGQWNFAIENTDFDMALDGSINWNF

SEQ ID NO: 2618 - protein, 1428 aa, unidentified
  REGION 1..1428: note = Description of Unknown: Cas Enzyme sequence
MKSILGLDLGTNSIGWALVQQDFENKQGEILGMGSRIIPMSQDILGEFGKGNSVSQTAERTGYRGVRRLRERFLLRRERLHRVLNVLSFLPEHYASQIDFENRFGKFKEETEPKLVYDGSRFIFESSFQEMLSDFKKYQPQLLEHNKKIPYDWTIYYLRKKALTQKIEKGELAWILLNFNQKRGYYQLRGEEEEENPNKLVEFYSLKIVDVLADEPQRGKPDIWYSLILENGWIYRRSSKIPLFDWKDKTRDFIVTSDLNDDRTIKTDKEGNEKRSFRAPGENDWTLVKKKTEQEIDQSHKTVGTYIYDALLQNPRQKINGKLVRTIERKFYKAELKQILEKQKEFHAELQNTDLYNDCIRELYRNNEAHQLTLSKKDFVHLFLDDIIFYQRPLRSQKSSVSNCTLEFRKYKDENGVEQTQYLKTIPKSNPYYQEFRIWQWMFNLNIYKKDDDTNVTEEFLTNTEDFETLFDFLNSRKEVDQKALLKHFKLNEKAHRWNFVEDKKYPCNETKTMISTRLEKVENCPVDFFTREIEQSIWHIIYSVNDKTEYEKALKSFARKNNLDENSFFEAFKKFPPFKSEYGSFSEKAIKKLLLLMRLGKYWNWESMDRQSRERIGKIITGEFDENIKDKVRQKSLHLTQENHFQGLPLWLAQYVVYGRHSEASVLGKWNSSDDLEDFLKEFRQHSLRNPIVEQVITETLRVVKEIWLKYGNGTKDFFSEIHIELGREMKNTADDRKRLASMVTENENTNLRIKSLLAEMVNDNDVENVRPFSPMQQEILKIYEEGVLNSEIEIEDEYLKISKTAQPSSSDLKRYKLWLEQKYRSPYTGEIIPLNKLFTPEYEIEHIIPQSRYFDDSFSNKIICESAVNKLKDNYVGLGFIKQFHGATVECGFGKTVRIFEVEAYEDFVKKHYAKNRTKRTKLLLEEVPEKMIERQLNDTRHISKYISGVLSNIVRVEDGTDEGVNSKNIVPGNGRITNQLKQDWGLNDVWNELILPRFERMNQLTNSNNFTAWNENHQKFLPTVPIELSKGFSKKRIDHRHHAMDALVIACATKDHINLLNNQSAKSDSKRYDLKRKLMKFVKVVYNHPQTGKKTEKEVPKQFLKPWNNFTIDAKSKLEKIIVSFKQSLRVINKATNHYEKWVEKDGVKTKELVKQEGTNWAIRKPMHKETVSGKVDLPWVKVPKGKILTATRKSLDTSFDVKIISSITDTGIQKILKNYLEFKGSSEAAFSPEGIEDLNKNIENFNNGKPHQPINKVRIFELGSKFPVGQTGNKKDKFVEAAKGTNLFFAVYTDDKGKRSYETIPLNEVIERQKQGLDTVSFKNKVDFLLSPNDLVYIPSGDEFETIHNTDFKNLTKETTGNIYKVVSFSGYQIFFVRQDIATSIVNKAEFSTLNKMERAIDGLMIKENCIKLKIDRLGNISKA

SEQ ID NO: 2619 - protein, 1077 aa, unidentified
  REGION 1..1077: note = Description of Unknown: Cas Enzyme sequence
MGIRFAFDLGTNSLGFAVWRTGLDPSGTYGVDAPRELLWSGVRLFKDGRNPKDQQSLATMRRIPKQARKRRDRFVLRRADLMAVLVAAGLMPSEASERKALEGLDPYALRAAALDRALAPHEIGRAVFHLNQRRGFKSNRKTDKTDKEKGKIAVASAKLREALREQNCRTFGEFLWMRHRGHRHDPRRVRDPGRQPTRIRLEGAGAKALYEFYPTRDMIRDEFDAIWQAQSAHHPLLLTQASRDAIAKVLFRQRDLKPPKIGKCTFVPGEERLPKALPSVEARETYERLAHLKISEGARRDRGLTPSERDALASVLLSEGKMTYAKMRKALKLGGGARINFEQAGESEMKGSLTGKLLSKANHFGPRWLTLSWPQRDAFVTKLLDEEDPETLVARLMREDGLSADAARECATIPLADGYSRLGATATAAILEALKNERTADGGLVPYAEAVRRAGQDRDPPWHHSDERDGEILARLPYYGQVLQRHVLPGSMDDKDRKDEAAFWGRLMNPTVHIGLNQLRRVVNALIVRFGAPGQIVVELARELKQNAEQKERAQKQNRENRAANEKRAAKLAELSVPDTGENRARLKLYEEQQRAGDGVALCPFSGRAIGAAQVFTSDIEIEHILPRSRTLDDSAANKVLCFREMNRIKRGKSPFEAFGDKPEWEDIVGRAEKLPNNKRWRFKPDAMKRFEENGGFLARQLNETKYLSRLAKTYLGKICDPDQIYVTPGTLTGLLRGKWGLNGLLGDDNRKNRTDHRHHAIDAIVIGAMTRGLLQSLARDAGRAEQSEFDAALGKIPQPFENFRDAVRESMEKLVVSNKPEHGKGGALHEDTAYGLIADSAEAEAIGNLVRRKPVVDLTPGEIDTVRDRVLRTRLQAVAAPFRDAKGKVKDEKSLRTALSAFAATPLPDGKTIRRVRVGKEDESAVALRDRRTGRPYKAVTPGENHHIDIVQMRDGSWKGFAATMFEVNRADWRPIWEREKLGGKLAMRLHKGDAVEVDDDDGVRRVKTVVRIEPSAGRVRLAAHNEGGDLQKRHDDHDDSFRWDLATISRLRDRQCIAVRIDETGTAKPKASNAV

SEQ ID NO: 2620 - protein, 1542 aa, unidentified
  REGION 1..1542: note = Description of Unknown: Cas Enzyme sequence
MYTTMKRILGLDLGTNSIGWAMIESNIYDDSEPAKLQGRILRLGSRIIPMEGDALSKFESGTPESKAAARRLARGARRLNHRYKLRRTRLIRAFKILGWLSPDFPEDFKKNPNHTIKSYLPYSDDLRREVADYFEITGQLNTQGEQYEIPEDWIIYYLKAKALREQISLTELARVLYHYNQRRGFRSSRKDQIQTESDQESDSVKYPITEKWIEIVHIQDIEDLGPAQGKNKDQNFFRLHCRAGELSFEVIQRRRQAPDWQGKDLELTISRKTTKSGEVSYTVAEVDPADWQNRKEALEKDVNRTSLHLSEYYLQQLRQDRNYRIRERIVDRSFYQKEMDAIWQCQEQYYKDIFADRTNIDAIADAFYVHNRQKNKEIRSRDLYHIFRNDIIYYQRGLKSQKGLLANCRYESRTYLDKDGVQCSAGIKVAPKSHPLFQEFRIWQIIHNLRIHDKEKQAGSRQQNSSNDSGEHLTTEAKERLFELFDQSAELTSDAILQHLGFKKNRLEADGKTYPVRLNYPEDTSFPGNQTKTLFRKVFRKHSFQQQGEVLLADPHRLHQLWHVLYSLPEKKDIESALSNTKYFDFPQPLIKHLASLPAFKSEYAAYSVRALNNLLPLMRAGSYWSEEGLRPKAKGQKGYSLQPAIDLRNRIELFIDSEDGTSISDVARGHVQKENLHSLTDFQGLSVTTACYVAYGRHSEPANEHKYDSVADLRIRELVPYNSMRNPVVEKLVREALNLVRDIWQDPALGRPDYIHVELGRELRKNNKQRQEDSTHNMKNRLERARIEALLRELRCPQANPDSPADQDRFRLWKENGGRQAEEQFESIFKTNKAEFVSNADIEKYKLWAEQGYRSPYTGKPIKLSDLFTEKYQIDHILPRSRFYDDSVGNKVIVEAKINAIKGNRTAIQFIEDMQGRDGEARVLDMETYLKNVDAIFSKKKRRYLKLSEIPEDFVERQLNDTRYLARTVAQFLRPVAKGDETNDGIVYTNGAITTDLKYKWGLHKLWKELVRPRFERLQRLTGEQLIIDSSDKRKDIHFAKDYKRIDHRHQALDGLIVACTTRRHIQYLNSLSSFSNDPADNERYTYWKKWKYLLKKEKELRGETIGMTEFAPPWGTENDGIFFKNVREHLERVAVSYKPSSRLVSPTTNRYWRWKQVDGQWKKVLELQSAPVSDDKYWVAVRQSLFGQPLGRIYLPEYKKNVDLSKAVKAQSEFIRSGNIWKSEDWRIAKTSLRRTISSIIVRYNHDLKAVLTYLRSNPVFDEGTGQVLDKLDMMQFRKYASKRVAIDDSFTVDKIENLPNAHHANNWLPKLLREHLANYDNDPKKAFKGEGLEQLLRLSPFPINKISRKEGGYKIELDNKLLDGDKGVNQYFVIEIVQEENKKTGELQVVRKYSTPPFLEVIPRLAKKLPVHDQNPDAGYIILSPGDTVYVPTADEDVTQIDWTDKKKIVERLYIMKSSNKGQCFFAPAHIARPIIDTKELGSNNKSERPWGNSDKGFDEERMIKACCIKVHIDRLGNVRPVNVLRSNMVDKTEETVDI

SEQ ID NO: 2621 - protein, 1050 aa, unidentified
  REGION 1..1050: note = Description of Unknown: Cas Enzyme sequence
MGYILGLDLGSNSIGWAAIDLEGGQFHGAGVRIFPEGVDRDTTGTEKSKNLQRRTARGHRRQIARRARRKALLRQAIQECGWWDENSQEQLVGVDPYFLRAKGLDEQLTLPELARVFMHLNQRRGFLSNRKADRGRAKENSETLQEISQLQDDIVKSGARTLGEYFHHLREQDPEQGRSLRVRGRHTHRLMFLQEFEQIWEKQQEFYPDILTEELRFGRHGRQNYPKEPIPRKRAGGVTFLQEFGFHGLLFFQRSLYWPKSVIGRCELEPREKRCERADRAAQKFRLLNEVNNLRVIPQSGEPRDLNPEEREKLITYLSSVKEAPFDAIRKQLKLLEGDGFNLEAGKRTKLDGMPIDTALSSNKWFGKKAWQKKSEEEKDAIVRSLIDDEEPEILRKAATEWGVSEEVAHELANIDLTAVVRGYASYSRAAILKLLPHLEAGYRMMSRDGVPSALAQAGYLRPDQKKGAKGKEIPLPSEKIVNPLVKQALYEVRKVVHAVIKEWGMPKAIHVELAREVQGTATKRQEQIEKMRRQEARRQEAAEFARERGVAPTRNAIERYLLWREQGEDCAYSYPPRTISPNQLFSSEVDVDHILPYSRSLDDSLMNKVLVFRSENHNKTNQTVWEWVGTSNPEKYESILQRARNLPVDIRNRKRSKLQTKDVVLEQFLNRQLTDTAYITTQVVDLLKHLEGVDVVPVKGQCTAELRHMWGLNAVLRDDGLNLKKNRDDHRHHAVDAIVIALTGRSTLQSLARVRGTKEQLLPPWTNFRNDVETVIDGIKVSHKAVRDISGALHEETIYGPTSKPHRANAEQAERPHASGWVEEEGVFVFRKPIEALTLSMVNDIRDPQVKAVIIERLAEFGLDSSQKKPIPKEVWKTPLFLARKSGRISSNPSPIRRVRVIKRDLTIQTIRGGSACVKPGNTHHIAIFELPAKEGKKPKRELVAVTMLEATQRARRKEPLVSRIHPTIPEAKFVFSLSWGEIVSANIRGREDLYVFRTAASTQGQIYFVSHTDARPSKDATKFAVKANTLDAQKVVVDPLGRIRNAND

SEQ ID NO: 2622 - protein, 1350 aa, unidentified
  REGION 1..1350: note = Description of Unknown: Cas Enzyme sequence
VTTILGLDIGSNSVGSAWVDTENRSIRVGVSVFPSGVEEKDDGRGAPKNQKRREKRSLRRSFARKSARKRKLRGLLKEQGLFPSAPHQIDELMRTDAWQLRAEGLSRDLTPFEFGRVLLHMCQRRGALGLKLRESEEHDATGKSIAEADEDGKVKEAIDATRKAIQLHNVATFGELMATLAKLRRTPVMNLDGKPKLNASGLPITFSHKIRNELGNFEFHADRQMLRDEFNKLWETQIRLQSELSSILTEDLKLKLDNPTGDAVWRHRGLLFGQRRTYWKTGTLGRCKLEPTDECVSIADRHASLYRVLETVNNIRIRGPQEHDFRPLYPDERQKVIDRLRVQKSGTVATVRDALGIGTKLLKKAGIPPESYSLNLERDEDREINTDWFYKAIVLEGIGETAWEAWDENKREGMNRAILRFDPSEEIDTQKFASVAQKLGVDSDKLDGLLAQWRTRPKLEKRLKLSRRAVLNLLPYMDRPDSNGHWPTQIEARMRFANDANATDRTSKGQITLQQRERYSLGSNRLNKRDRHYLKKHPETVLPPAPMLTNPVVRKAIHEVRRHVIAHIRAAGRKPDRIVIEFARETTKTAKQNDQILARNRFREKYRREIRENIIRAAFGSMYDSLSTNQLRAAEDRIILCEQQEKRCAYSGTTITPMQAALGHGLEIDHIIPYSRCGNNSLNNRVLCYRESNRNKLNQTPREWWKGDFDEHIQPMRFMDGVDKKQIHPYFSKRDYAKKWENLSAENVLSEWKGNQLSDTAYAAKEVEVYLQQSLWPDEPSFLAGDTARRIYVTKGAYTSQLRRDWQLYRKRSVDSDNRFIRDQLTAKDRGDHREHAIDAVAIAFTDGSRINTLAAMMTHQQNEWIRAKNQGSKPERIKRKPIDPPWGDILSFRRQVLSLIYDDFDDDQENGHPRSDNHAIVVSHRPVGRKLAGRFHEDSLFGSVPHDKKLYTGAVRVADLTPNHLRMPVPEKQEEAISRLADRYLKSKTVSNPRDAKKIAKEFVASKAYVPRLVDPPPGKTGLIRDVGLRMQVRTTIEDRLRRFGIDRTADTFTSADLKKILNPIDPDTGRPQFSPLTMKSGIPIKRMVLLRAMNDPVIVARRRWNEQTRKWEIDQSKKASRAYVGGNNHHIEIRSNEKGEWSGEILSMYEAARRARVQKTDPVDRTSNPTRGGAFVMSLAEGETVYMRHKQTGVPGYFVVVKLVKPATIEFKAHWDARRATGEKNEQGELITDSARVSIPVSAAQLAGLAAPGEVTPIKVVVNPLGQIQRVEPLPSREDRLAEVDPRILLIAREAVAARRSKNELSGSSRKRKHGSWSWMRARLKREKLEHLAAQVSVAVRLLDRENN

SEQ ID NO: 2623 - protein, 1075 aa, unidentified
  REGION 1..1075: note = Description of Unknown: Cas Enzyme sequence
MKPYLLSLDLGTSSIGYVAFNIDDKSNPISVLDLGGRIFPDGRNPKTKEPLAVSRRLARGIRRNRDRGQNRVRRLVKELIESGLLPEDETLRREVFKICPYSARNEAANATVEPYTLGRALFHLGRRRGFKSNRLSGDSEETEFKAKIANLRELLGKNTTLGQYLFKRHSKNIELLNDKKPREQQTIRFKGGETEFYPDRAMYEHEFDAIRLIQANALLSDAQWDMIKETILFQYPLKPVPKGKCRFYPEETRAHLDLPITHQFRIYQEVNSLRYTSQGQEFPLDERQRLALYKLLDEGKTLGFKALVKKKDVNNSPYFPSDAEFNLDVASRKGKLLGNAVMCDLRKADHLGKLADTLPTNELNSLISFLIEPTEEVDGKIVLLDDDAVETWLADQLPALSSQQVKCLCNYRFKRGAAAVSLKFIYNIVPVLKSEGCVYSDAVALLKDDNGNPLHHSNFEMGEVVNELPYYGVVMPESVWGDHPESDMNKSENERDNDAYLYGKIANPTVHVALNQLRVVVNTLIKKIGNAPSRIHVELTRDLKNSKDARADIEKSQARNAKNNARIIKELNGLNIPNPSRKDIEKYKLWEELGGQGIRQSIFSGRSISASQAMGPDVEVEHIIPFSRCYDDGFNNKTLAFQSENHDKLNKTPFEAFGHDREHYAEIISRALACFGQSSKFDRFKEGSFDSFYGEGKGDLIARQLNDTKYISTKAKQYLSCLCTSHNVQPVNGQMTAMLRSVWDLNTYKNRDEGNYREDHRHHIVDAFVVGLTSPKLVRQLNTVSSHSDNNVDNLYRLLKKRAPDITEIKNQLVEKLDNVVVSYKSDHTQTGSMFNDTAYGFGVDGEGEKTCITRKSIESLSYDEVFDIRDGRLRDELISFLTGGKSIEINYAQRRVMTTELKSYFLKDSGSEDKAEFINQKKAFSERCDVEKARINIKNQSVKPITSAPYKGYAKNSYAFCEVWMIPTGIDPKTKKKTFKYEGDFVAYADVNLHKKDSGRNKPHPAAKKLMRLYKNDCIRLETDGQASEIFKVSGFSATRNQIDIAPQLSTNSVQAFKSINVVFNEQHISKVRT

SEQ ID NO: 2624 - protein, 1064 aa, unidentified
  REGION 1..1064: note = Description of Unknown: Cas Enzyme sequence
MNTTIIFPEDENEQTVLGLDMGSNSIGWFLQTVSANGMPKKIIAAGSRIFDNSRDPKTRVPLSVQKRLANASSTRRDRQIMRTKHLCKLLKEFKLLPPAEVKADVSNRNPYKLRAKAAEEKIDLYGIGRAILHINKRRGFLSNRKADKRANDEEAHGMKLGISNLRTHLADKTLGQYLYERQKSGKGTRMRAKAIKNKNHYEMYADRDMYVDEFQKIWRTQQKYHKNLDDEMGKKIEDALFFQRPLKTPERGFCQFEKGEKRAYKAYPISQKFRILQEVNALEVVNNGVIEVVLTPEDKKKLSEILLKNTSPHIKKGMLSFAEMKKILNIKRVHFFNFEAENRKGFYADSTYAVFASPDCFGDRWEKLDDDLRENIVDLIIQNKEKEFKRIANEQFGFDDEKCEKILDAAMSLEDGTTSLSAKAMHKISKFLEDGELYHSACNMAGYDFNAGYDGELYEKLPYYGEILRTATIGGNTNFDPHENPEKYYGKITNPTVHVALNQLRKLVNKIFEVYGAPDKIVIETARDLPLGEKGLGEINKRNLENKKENEKIGEVLQKLKVANNAKNRMKYRLWCDLNKDETKRCCPFCGKTIPPHKIFSPEFEIEHLLPFSITFDDSRGNKVLSCASCNRIFKGKHSPYEAFANNPSYNWNEIVARVSEMSWARQWRFKPDALKIFEDQFGDFIARMLNDTRYMSKVAREYLTAVLPKEKIITVPGTITGKLRARWGLNRILDTAAENDDESVKNRDDLRHHAVDAFVISSINRKLIALISRTARLAEEAGLENVLKALPSPFEKISYEQLKETIDNIKVSHKLDRGDVKAAIARGATVGKLHKDTAYGKIGKEEDGKLTLVKRVPLMNIEAKRDAIGQIANPQIRDALLEEFDKLAGLSESQIKNRWNEILMQFAEIKHVRRVRIHLKNRESHKLIKIADKSGNIYKYMDNDESYCIDIYKPSKSDKWNFEVINMYDAHKNEIPQWRKNDARAKLVMRLYKRDTIAYEENGEYKIARVTGIATHGQISLLGLQISRVEGNPPKKMPNVLQKLNARKIYIDEIGRVYDPKKK

SEQ ID NO: 2625 - protein, 984 aa, unidentified
  REGION 1..984: note = Description of Unknown: Cas Enzyme sequence
MDGAVLGIDLGTNSIGWALIDENAGKIVAAGVRVFPEGVDRDQQGGELSKNETRRTKRGSRRQTARRARRKRRLRELLISEGLFPEDSTLQDGLFQLDPYELRAKAIQEEITLYEVGRVLLHLNQRRGFKSNRKSDREREKETSKMLEEISQLQAEIGANGHRTLGEHFHELRKNPHESVRGKHTRREMYENELAAIWSKQKEYHLDVLTDQLYQRVRDVLFYQRPLHPVRRLIGHCELEPKHPRCPRADRAAQRFRLLQEVNNLRMLDMTTGEDRPLTDQERQEIIAYLSKSRTFDQIRKKLGLFESCKFNFERGERDKMLGMETDAALANRNLFGKRWYDLPEPMKDRIVDALLHEEDEERLISTAVKEWEVDREVAELLSGVNLPKGYMSYSREAIEKLLPHLVKGLPLMSTDDSPSALMEAGYLRPDQRKLKTRKYLPKPPDLLNPIVMQALHEVRRLVNAIIREYGKPGRIHIELAREVKGSLQRRRETTIRNREREQERERAAAEIQEMGYNKSREAIDRYLLWKEQEQMCVYSGRSISLAQLFGGEVEIDHILPRGRSLDNSFANRVLSFRFANAEKGDRTPYEWLAESDPDRYDEVMQRVRRLPYGKRRKFAQKNVELDGFIERQLRDTADISQMVAKYVRCLGSDVICTKGQVTAELRQLWGLNTVLNPVWEGHKYRDDHRHHAIDAIVVALTSRSRLQRLARSRKRSATPDERQYPPPWEGFRNEVDEVINGIYVSHRVQRKVKGPLHEETIYGPTPDAGKFVYRKRLEDLTPKMVSQIRDPAIREIVVQRLREHGIEPGKGGKIPKSVWEEPLTMPSGVPIKKVRLIKMDKSIQPIRGGTACVKSGSNHHICVFEYDEGQSVRKDAVFVSMLEAAQRARDKEPVVRRTHPGIPEARFCFSLGANEMLLMEHEGKEDLYRYETAASTTQQMWFRHHTFAGKSADKRGQITKRPSTLNARKVIIDRLGRLRWAND

SEQ ID NO: 2626 - protein, 1047 aa, unidentified
  REGION 1..1047: note = Description of Unknown: Cas Enzyme sequence
MKWRLGLDMGTNSLGWSVFELSQSGEITGLHNSGVRILPDGREPSKNGRVGDSLAVERRSARGMRRNRDRRIGRKKELMDILVEYGIMPSDKGERKSLEKENPYKLRTEALESKLAPYELGRALFNLGLRRGFKSNRKAGGGEDGDFYKKISALREELGNRTLGQYLWQKLQDGQPVRFRGADGDFYPNRKMYEDEFDKIRKVQNNVLSDNQWDKIKDIIFFQRKLRPQEIGKCQFYVDHDRAHAGLPIAGKYRIVQEINNLAWLDETLTSHFLTEDPRHILFEKLHEQKTLSWGGMRKLKYADGSPVFPKGSKFNYEDSTGRKKGFDGNKTHIDMSARLGKKWQEMGENRQNDLVQILYDAEDEAEIINRAKEWNLNTEEAKAIAAYALPSRTMSVSRKFMEDIVPVMMDTGEKYDKAITYLKNEYGQPFHHSMMEDGVLSEDGLLPYYGEALTGSTMGAHPEANDDNPEYKYGKIGNPTVHMVLNQLRRVVNALIEEYGPPEQIHLELSRDLKKARSDRDEISRAIAANERENKRRAKICAECGIAEPTGLDLKKIKLWEELGAEQFARRCVFSGKLISAAMLFNGDAEIEHILPRGRTLDNSTANLTVSLRQANRIKGNSTPFEAKERFAAQSWQWEDICRRADSFPKSKRWRFTEDAMEIFEKNGSFIDRQLTDNAYIARVSKRYLGKICDPNKIVCVNGQMTAMLRGKWGLNSILSDHNKKTREDHRHHAIDAMVVGLTDRSMIQKISTARGTDDRVRVEIPDLPAGLYDQIRESIDNIVISFKPDHGKQGGFFSDTAYGFVSPDARDKEKPDYKLVTTKPLENLTKKEVTAIRDKKIRDAVIDFVEMELGTSLAQSDDKKLKEALYNFGHEIWPAENTKKKKGENSPVKRPPLKKVRLLVANQSVKQIPSAPYKGYAVPSYPCCDIYRVPKGKPGKWKKGEYEWKGVFRSYIEMNDPPENPEDLKPHPAAKHIMRVFKDDMVEIEENGQKSYMRVVGFSTTNNRLFLRPHTAANTDRKPYAINTLQDKMRRVRVSPHGKIA

SEQ ID NO: 2627 - protein, 1051 aa, unidentified
  REGION 1..1051: note = Description of Unknown: Cas Enzyme sequence
MAWRLALDMGTNSLGWAAFSLGPTGDVQGLKDAGVRIFPDGREPSSNGRVGDSLAVERRAARGARRNRDRRLIRKQQLIERLVDLSLMPKNKEDRKALEVLNPYELRAAGINRELTPYELGRALFHINQRRGFLSNRKSDGDDKEAGIIKPKITELRAALNGQTLGQWLSGQLTSDKSVRFRGEEGDLYADRGMYLQEFDAIRKKQEAHHTLSGNDWDDLRNGNKRQKFDGIFFQRKLKPVERGRCEFFVNEYRAHKDLPISQHFRILQEVANLQYYGDNLKKFELSGVQRNKLIECLNTQKTMSFGAVRKLKNPDGSPMFPRGCLFNLETGPRDKLNGNTTAIDMRKPEMVGTDWGGLSADDQNDLVEMLHDAEDDETLICTLKKRFALSDSQAKSISKFKLSSATGHLSRKFMMRCVDIMEKSGKRYDEAVGEVWDNDGVLMHHSHRTVDQLLERLPYYGEVLKGSVIGGKPLDFDATEYPEQHYGKINNPTVHVALNQLRKLINRLIDRFGPPSEIHVELVRELKKTAKARNDISKENAKFAKANDQRSKLFSDLNGGQEPSGLDLKKIRLWEELGVDQLTRHCPFSGRIISAAMLFNGEAEIEHILPFSRTLDNSTANLTVAIRQMNRLKGNETPYEAFADGRHADNGAVWSEIASRAKSLQKNKRWRFDADAMDRFEKNGGFIARQLTDSAYISKITKRYLCQICDQNKIATIPGGLTAMMRGKWHLNDLLGDHNRKERNDHRHHIIDAFVVGLTDRRTLQQVSSQTARGADDRIHIALPDIFPLRNQIRDRLQCVIVSYKADHGANGKMFNETAYGLVDEDKQDPDLRGYTLVTRKKIETLSAKEVGAIRNRGWRTLAQDHINAVRAKGLRLDKAGLAKTLTNFGKKHNIKTIRILVSNQSAKPIPSAPYKAYAPDSFVCVDIWQVPKGKPGKWKAGEHEWHGAFWSYAQCKGKVPDKNNGLISGAPVHPAAKFITRLFKNDVVELVNSGQPQVMKVAGFSTTNNKIDLRPQYQTEGKHSYVSINILRKSFRKKLRISEDGYVIG

SEQ ID NO: 2628 - protein, 1060 aa, unidentified
  REGION 1..1060: note = Description of Unknown: Cas Enzyme sequence
MKNYKLGLDIGASSIGWSLLEIDKNENSIDIINMGSRIFSDGRDPVSKTPLSVEKRMAHGASVRRDRLLMRKETLFNLLQKSGLMPKDIVDAKRQEVLNPYRLRANAIKTKISLYELGRALFHLNQRRGFKSNRKADKSADKDEKSAMKNSIDKLRNELNGRTLGEYLFERQKNKLGTRMRAQLIKNKNAYEMYADRAMYEDEFNRIWNFQMQFHNELNSDLKEKIHHTIFHQKPLKTPELGFCQFERTEHRAYAAYPISQTFRIWQEVNNLEVDTFSEDELLLQSSDRIKLVEALLSGEKSDRNGILTFANIKKILGLKPYIKFNLESGIRKGLQIDSTAKVFADKKAFGNLWKDLGVEKQNALIDVIIRAENDDKIYTYIKEHFDLSEDSINYIIENSLDIASGTVSLSVKAMQKIFPFLREGAQYYSACGFAGYNFNANYGGELLDTLPYYGKVLHGAVLGAGKSKNEKEEPELFYGKINNPTVHVTLNQLRRVVNAVISRYGKPSKIVVELARDLPLGETGLNDLKKEQKKNQKENEDISEELKKIGIANNAKNRMKYKIWVDLNKDPLKRCCPFCGETISKEKLFTPHFEVEHLLPYSITFDDGRANKVISCRTCNRDKANRTPYEAFGTDKEKWAEITSKVSEYHSSKQKKFAPDALEQFRKDGRDLIARMLNDTKYISKVAREYLSCIVANENVYTVTGRITGLVRRKWGLNSILTENLDNATREIKNREDHRHHAIDAFVIACVGKGLIQKISQCAKICEDAGLDKLITDLPPPFPDFSYDKFKSHVDKIVVSHRPDRGDIANAMRKGKTLGKLHEETAYGPIGKIEGENTITIAKRIKLESLKFSEDNINQIADSKIREDLLKEFSAISKLGLNKKDAENSWLEILKTYGEKKSIYRIRIHLKNRAISTLIPIKDKSGKIYKFMDNAENFCMDIYQASNSKKWEFEVINMYDAHQKNFVRNWRKNDAKAKLVMRLFKSDIIAFEDNNETLLYRVISLWTTGVIVLNPLNKITLSKPVYKTVSPLQKLNARKIYINEIGQIFDPGKPKHKTE

SEQ ID NO: 2629 - protein, 1089 aa, unidentified
  REGION 1..1089: note = Description of Unknown: Cas Enzyme sequence
MNTAYRLGLDIGTNSLGWAIWSLDGESPKEILDMGVRIFPNGREPSGEGMGASLAVNRREARSRRRRRDRILQRKRVLVNELVRQGLWPDRAEKRSAYSSWDPYELRAKALEKELEPAELGRILLHLAQRRGFKSNRIIDSESDEKGITGFKERIEELKKELEPNELEPNGFETLGKYLNSMKKIGVRFHEDFGFFPDRQLYIDEFEYIHKRQKEYFPELRWDRFYKILFSQRKLKPQEKGKCRFTEEERAHKCLPSTHRFRILQELANIRIIDSNNREKIPLSSEVFDLAFEKLERENTLDFSALRTMLKVDDCEFNLEDKKRKGLSGNETSFCLRKKDHFGDLWDDFDEKKQDEIVNAIMETEEDSKLREKLNKYGLKSSQVDKIVKLAFPRGTAPYSACFHRKCSKIMRENRVGFAKALETLGCDHRLLEEGSKLPYYGEALPESCIKRDNPNQNASEAKFGKIGNPTVHIALNQLRRVVNSLIKRHGKPKEIVLEMSRELKHGRKENEKIISQQAKNQENNKRLDKKLKEDHNLIGEEDREKLRYYEELEFGNSAASCPYCGKVITEEELFNSDIHVEHILPLSRTLDDGRNNKTIAHKPCNDSKKEQSPHEAFAHSPKGFNWQEICSRISNLPSKKKWRFNEDAMERFKSENDGFIQRQLTDNAYIAKAARRYLTSICPTNKVRGVAFRQTAELRRQWGLDCILSKKGNEKNRSDHRHHAVDAAVIGLIDQSMIQSIAEAASRNEGNLRRGGFEAPPFPGGEKGRERVVEVVKSIVPSIKPNHGHEGKLFKETAYGKIRKALLLDTAKLKEDMVARIFPADVREKFEDMMREEGFQKARKAFLKNNPKVKVMRDLWVTSKPITSIKSGDLKEPTYGNNTKGPSDFALRGRLKEYIEKKAPKKLPEVLESYGEEFGIKHIRYIPKNQEIEEIESSTWKGYEKADCVYVDIWKIPDSKKKGSYRYEGVFVSRLEAIQIEQKGHAPKRPHPAGSRLMRLYKDDTIRVERKEDHWIYRIAGFATTQNKIDIQPIFAGDEGWFEKTNLKSLNVKYPPPRGRQNFKSINALWHEYERIGRVTVRCDGSFR

SEQ ID NO: 2630 - protein, 1104 aa, unidentified
  REGION 1..1104: note = Description of Unknown: Cas Enzyme sequence
MKNFYRLGLDIGTNSLGWALWELGPDGPTQVIDMGVRVFSDGRETGKEIGESLAVQRRTARGMRRRRDRLLQRKKALVNFLVREKLWPKDSASRTEICKLNPYSLRAKAVSERLTGEELGRVLLHLCQRRGFKSNRKDASKDDESGKNKKRIVALDEALSVDDSETLGEFLNARKKTGARFRGETEHYPDRRHYIEEFDFIAQNQQKYFPDLDWAQLKDIIFFQRPLKPQQKGKCRIFEDQDRAYKCLPSSHRFRILQELTNLKIINQRGESVSLSKEEFHQIYDKLERQKTLSFNALRRILGIAARFNMESERREKLKGNETSCTLRSPEFFGALWDTMNHKDQDAVVDAIMDAEDDETIVDYLENLPVSLTPDQKEAVSKLNFSRAMGQYCAKHHRKCNQVMYRDFVDYSEAMEVLGYDHRVKEGSGKADWLPYYGEVIPESCMRHLSVKQNKEEAAYGKIGNPTVHVALNQLRKTINALIGKHGKPTEIVVEMGRELKQGRKKTNGIIKTQTMNQKNNEKLEAELKENQFNIVIPKRMDIEKLQYFKELCQKNVAAHCPYCGRTISGEELFSSSIEVEHILPFNRTMDDSRSNKTIAHRKCNRVKGNHTPFEAFGSNPEGYNWEDIQARVATLPNNKRRRFDKDAMVRYEKEEGGFLQRQLTDNAYIATVARKYLTAICPANKVWAVTGQHTAALRGRWKLNAILSKDKRGKNRFDHRHHAIDAAVIALTDRSLLKKIADYNKYKGDLAGFEYRVPDFPGGEEGYARLKSMVKDILPSVKPDHGIQGRFFKETAYGRVKKALLYDTAILDEEQVKDIVPFKIRAQFEDLVAHDGFEKARKKLREEHPQVRVLTTLWATRKPLIDLKRGDLNPPEKNGKNTKGPVDFGFRARLLEYLRTHSEKESEDKAYLERYGREHGIRHVRYIPKNQEITPIRSTQGEEKDDRKGKGYELGGFAYVEIWQLPKGHRTVYKGTFISYLEANRIAQGLATQRRPHPAAKKVMRLYKQDCLSFLEDGERKYYRVNSFSSLRNKIDIQPIWKSIDTRSRSIEKSDDDWFDSVNHDSVPGRYQKTQKQNFKSINVLMRKDGIRKISVYYTGEIR

SEQ ID NO: 2631 - protein, 995 aa, unidentified
  REGION 1..995: note = Description of Unknown: Cas Enzyme sequence
MSDYTLGIDLGPNSIGWALVDEKAGCLLNAGVRVFPEGVDRDQQGGELSKNETRRTARGTRRQIARRARRKKRLLKQLVEAGLFPSDPGEQEKLFSADPYQLRLRALTERLSIHEFGRVLIHLNQRRGFLLNRKSDRVKKKETSDMLKEISELANRIESGGHQTLGEYLAVFQEESRQSSARGLPEKIRGKHTRRDMYEREFALLWQRQQQYHPDLLTDDLRQKIHDTIFHQRPLHPVAKLVGRCELERGERRCPRADRQAQRFRLFQEVNNLRLLDMTTGEERPLEERERRTLLEYLATGKEKSFDDIREKLGFFESCKFNFEDAKRTKLQGMQTDAILANKNLFGKHWYDFPEPRKNEIVETLLEEQDPKALIEKAVGEWCVTPEVAEKLADVDLPAGYMNFSRKAIEKLLPHLERGLPLMAGDNSPSAMTEAGYLRPDQRRSKPLGFLPRPPQDIPNPIVRQALHEVRGLVNAIIREYGKPARIQIELAREVKGSLRSREEILKTNRERERERKEAAQKIEEEGHKPTRDAIERYRLWEEQTHICIYSGRTISLAQVLGGEVDVDHILPYARSLDNSYANKVLCFRSANAEKKDRTPYEWLAESDAARYDEILQRAQKLPYNKRRKFSRKDVELDHFIARQLVDTAYISRKVAEYVRCLGADVVCTKGQLTAELRHFWGLDNILNPAWEGYEKCRDDHRHHAVDAIVIALTDRSRLQQLAAVRRYTRDPLQRMLPPPWDNFRDDVEKAVNAINVSHRVRRKVSGALHEETIYGPTKQEGVFVYRKPVESLTTSMIEDIRDPSIREIIVRRLREHGIDPSAKQKISAAVWKEPLTMPSGVPIKKVRLLRKDKTVQRIRNGDAAAYIKPGSNHHVCIFEMPDGKRDAIFTTMLEAARRTRDGEPIIRREHPTCPEAKFLRSLSANEMVIIENGGKKELCRFETAAATSRQMWFRHHTFSGKSSDKRGQISRMPNSFEGRKVTVDRLGRIRWAND

SEQ ID NO: 2632 - protein, 992 aa, unidentified
  REGION 1..992: note = Description of Unknown: Cas Enzyme sequence
MKAHSTLGIDLGSNSIGWALLDEKDGRVIATGVRVFPEGVDRDQQGGELSKNETRRTKRGVRRQIARRSGRKRKLRDVLIQSGLFPCETDSPQSVLQSNPYELRKRGLDEQLKPEEFGRGLIHLNQRRGFRSNRKSDQAKKNEKSKTLQAISELESRIAESGCRTLGEYLYSITLQGNGPAFEKIRAKHTRREMYEKEFELLWNAQQKYNPQLYNNELRERIHDLIFFQRSMYWLKSTIGKCELEKGQLRCPRADRLAQRFRLWQEINNLRYIDPRTNEEQGLTDEERRELFDQLSNKREGTFVQIRKWLHLYENCSFNYERGERQKLKGLETEYLLSKKEHFGKNWFLFLSDKKDEIIAALLDEKIDDEKIRRKAVTDWGVDEETVERLLDINFPKGYMNYSRKAIEKLLPFMEQGLPLMAKDEEQSALREAGYLRPDQREKPICHFLPKPPDLPNPIVRQALHEAQKLINAIIREYGKPDAIHIELPRDVKRSFRERKEINKDQKKREKKREEAKTEIERYGVRATHETIQRYLLWEEQKRECIYSGNPISIAQLLGGETDVDHILPYSRSLDNSMMNKVVCFRPVNAEKGNKTPREWLEATDPERYDEILQRAKRLPWGKQRKFLQKTVELEDFISRQLNDTAYVSREVTKYVRNLNVDVICSKGQITADLRQLWGLNTVLRDDGRGLKNREDHRHHAVDAIVIALTSRSRLQQLARSRTYHWERPEFPEPWEDFRAEVERKINAIYVSHRVQRKIRGAFHEETIYGPTSTPGEFVYRKPLEQLTPNMINDIRDETIRKLVREHIEKHGVDLANTGSIPASVWKEPLVMPSSGVPIRKVRLIKRDNTIQPIRDQTACVKPGSIHHLCLFEIPSSDGSIKRDAVFVSMIEAAKRAKNHEPIIQRNHPRNPEAKFLFSLSTNEMVLITDKEKEELIRFETAASTSQQMKFRHHTFAGKSSDRRAIITKYPNTLVGKKVSIDLLGRLRWAND

SEQ ID NO: 2633 - protein, 1054 aa, unidentified
  REGION 1..1054: note = Description of Unknown: Cas Enzyme sequence
MFEYTLGLDLGETSLGWAVIKTLDGEPIEMIDAGVRIFPAIVKREGTRQPENKNEERREKRSARRVKARRVNRKKRITEYLIKAGLLPKNETARSTLFNDKHLPPYDLRARALDEKLKPHEIGRVLYLLCQRRGFKSNRKSERKENDKGKVKAGIDEIQQAMENSGSRTLGEYFATLEKDDTKLCTGQLRIRDHYTDRRMIEDEFNAVWQAQAKHYPKLLTDALKENVYNAIFFQRDFAISEERRAKLPSRANAHRAPQLADCYLIPGEKRCARGAWIAQQFRLMKEVNNLRVFIDNQYRELTAAERKKLVQQMSRQGQMGFGKMRKLLTLPADALFNLEKGKWKTLDGNTVEKALLDAFGAKQWDALSEQQRLECRHVLIEEEDPEAFTVQAQQWELPAEMIDKLMSFSPPAGYLRMSVKAMEALLPYLVKGLDDIRAINQAKKDGKLPHQPQDDALDKLGNPPDLPNPNVMRCLYETKKVVNVLIREYGKPNKIHVELARELKQSEHQRLETINLIRENEAKRKTAKQWYEEMGRTNVSGKDILKYRLWQEQKSICPYSGQTIEASHLLAGDNLLQIDHILPRSKSYDDSYLNKVLCFTLYNRQKGNQTPYDWKGGPDSPGFQEMMTRVERLDLPLKKRERFMQPEINTDECLQRQLQDTRYASLEVAHHLACLYPPEERVGEKRIQATPGRATAILRRLWGLNTILSEDDNKNRTDHRHHAIDAVAIACTTRKHLHNLSNFYRRDHGEVTVFDPPWETFRDDVDRIFCKQQRTWKLGDREITTEGLLISHRVQRKLAGALHEETSYGPTPDPKVFAYRVKVPTLSGAKIMKIRDPRIRQIVIDHVKAQGFDPEEVGSKTFPTKVWQTLPQLPVSDKARRKAEAEGKPLPANIPICKVRIETTLDKPLMLHDQDGKPYRAVITGNNHHIEILETTDAKGNKKWIGKIVTMLEACNRARMTNQPIVQRDHGENNKFVMSLSIGETVFISRVNSALMPYRVQKIISNGQVYFRANREAGIVINKNLFSKYASTLKDIIIKAKVDPIGRLGTCND

SEQ ID NO: 2634 - protein, 1147 aa, unidentified
  REGION 1..1147: note = Description of Unknown: Cas Enzyme sequence
MKTLGLDLGPNSIGWAVVEDNSDGSGRLIDAGVRVFPEGVDAFDTGKESSRNEQRRTARMMRRQIRRRARRRKVVEAALVEARLLPDNEAGRKAILATDPYPLRARGVTEKLDPFEIGRVFYHLNQRRGFLSLKKVSKEKVEKELKAIEKRKAKAAESGKPEEAGKKEDDSKMLAQIALLAQTIGDRTLGKTLHAQQTEGAARTTHGTIIPHRIRSQHTSRRMIEEEFLRIWDFQSVHHPQLLSDRSCFGARGRLGARATRDAEPIRFPIGKHVGPTAKAERLIEIARGLLARDGIHGLIFFQRPVYWLSSTIGKCEYEPKEQRCPRADRRAQRYRLLCDLNNMRYDRPGDYGEKALDAEQRADVMRLLESQKEVQFSRIRKILGPFEDIQINLEQMVSRRGKKAKKGVDASTTPKREKMKGHETDAEMRSVYPKWDAFDDAVKTQIVTVLVGTRTRNEKGQRSIEERLCAIPGVDSAIAEKLASADLPDKYLSVSLKFIEKVLPYLEAGTRLSAKDKGEIGAMERAGYESGFKGLKEPLAVLPAPNSRMAISLKYITNPVVKAAMWQIWTVVNTILREHFKDGSKPDRIHVEMIRSMKKTTEMRRIDAGEKKTLDKQNEAIRSEIRALGAVPTNDAVKKYKLWLEQGMRCAYTGDPIARHQLFHEDGLVQVDHILPQSRTADDAMSNLVVCFTTANQEKRNRLPSDWLGAEALKDLESRCKHLPWPKRQKLKKKEIDDDFVETQLTDTSYIAKATVGYLHTIVGRHGKVVGLKGQYTSELAHQWGLNTILFQMPGSPAFRTQTSPADHKKMPKNRDDHRHHAIDAIVIALSRQDRLNALLQDKYAVIHRNKEGKLVETYKFESAVDAPWGMEPDAFRALVFEKLKAMNVSHRVRRGVSGGLHEETNYGAVYERTKGDRREKRRDGEFVVRKSVEALSMSEVGNIRDETIKNIVIRRLGEHKIAFGRGADKVPPKKMQEAMKDLKMPSGVPIRKVRIRVMDSTIQSIREKTGEVAYVSLGANHHVCVFEWTERGKVKRGGVYVRRLDAAKRILNRDPIVQRTHPDRPDARFVMSLCTGDTILITDAQGKETAHIVTTLVYGKTQKRIHAASAYDARKDRVSPSITGQLLSIRKVTVDPLGRIRWAND

SEQ ID NO: 2635 - protein, 1032 aa, unidentified
  REGION 1..1032: note = Description of Unknown: Cas Enzyme sequence
MSLTLGLDIGSKSIGWALVDEEKKCIVRIGTRVFPEGVGRTQQGTEESKNVSRRGARSMRRQIARRALRKKKLDLLLTQHGILPEIGPKKILLFQQDPYFLRKKGLDNPLTLWEFGRVLVHICQRRGFKSNRKENTKVQKENSEMLAAISNLENDIQNSGSRTLGEYLANQLISNPLDPIRGVHTRRNMLESEFDLLWNKQAPFHPELSPIIREEIRNRVIFFQRAMYWQESTIGRCELEPSHPRAPLKDRAAQRCRMLQEINNLRVIQPDGEIRTLSIKERDLILEYLGGSDKRDFDAIRNKLKLPEHKFNLENGERKSLQGMPIDVEMSSKSFFGKSWRDKSEIEKTEIVRELIRYDLLIAKKEVGDEKQKAILKEKKILREKDLLAKAAQIWNLPKENFVSLTCFDSGSGRASYSTKALDKLLPWLETGLSMIGEDGKDSAFFKAGYLRPDQKVIGQKENLPLPPKEINNPIVRQALHEVRKLVNAIIKDHGKPDAIHVELARQTKGNQFQREAIIRVNRENEAERAKAAKEIEISGIKPGRGNIELFRLWKEQGERCIYSGKPISQVQLLGGEVNIDHVWPYALSLDDSRLNKVVCFRNENSAKKAMTPREWLEKTFPEKWEQVLQRVRELPIGIAAKKMERFMAEGVKLDDFIAKELTDTSYITRQVASYLRCLGIDIVCSKGRTTGELRHQWGLNTILNPNKENQKSREDHRHHAVDALVIALTTRSRLQKLAKRRWDTEIERPWEHFRTEAEKKITAIWVSHRPKRRVRGQLHEETIYGASAKMFPNGDIRPWSKGWIEKEGVFVYRKPLETLTLNMVENIRDIRLKEIVEERLKAHGIDLNGKGKIDKRVWEKPLYLYPRNGDSEKGALIKTVRLLKTEGSVVPMRRGNQKVFVKPGKTHHICIFEIVDEKGKKKRVLETITLLEAYRRKKNREPIFQMASKEHPSARFIMSLCPGDLVLIESGTTPELFRYNTSASTQGQIYFFKHSEARKSTEAEKFTKYASNLIAKKVTVDILGNLRSAGD

SEQ ID NO: 2636 - protein, 1103 aa, unidentified
  REGION 1..1103: note = Description of Unknown: Cas Enzyme sequence
MPVTLGLDLGPNSVGWALVDEKGKRLIDCGVRVFPEGVDNFETKKEKPRNESRRVARGMRRQIARRARRKRRLRNALISARLYPPDPAAQLALDSLDPYELRARAIQEALTPHEVGRVLLHINQHRGFLSNRKKERKSNEVKGMLAEMSELQQDMDSTNAQTLGVYLHRKARALDHSARSENDHVRHRHIRRDMLEKEFDLIWNEQAKHHTDLLTDQLRYGSTGRQKQPNTPTIAGNDGQILALFGIEGLIFFQRPMYWPRSVVGKCELERKLKRCPRADRRAQRYRMLQEVNNLRYVNPATNEEDPLSDTHRTLLLDKLSRSREMDFDKIRKALGLLESVQFNLEGGKRKKLQGMVTDSFLAAKGAIGPEWHDWKEDRKDAIVELLALSTDDDATHEKLVRDCGLTPQQADAALDVELPAGYMSVSLVAIKKLLPHLEDGLKLMGNDASDSAMHAAGYMRRDELRRRVFDALPDPARARDARIGDIPNPVVKRAIVELRKVVNGIIREYGKPDAVHVELTRQVRQGPKARSEYSTRIRETEAERDQAADEIRKLKDEHPGSGIAVNRDSILRYLLWKQQNCACIYCGNKISQAQLFGGDIDADHILPYSRSLDDSQMNKVVCHRKCNAGKDNQTPYEWLAASKPQRFQEACQHALSLVRKGTFPYKKYRRIIQKELELDDFIARQLTATGYITSATVEYLKCLFEKDHAILGLKGELTAELRRQWGLDDVLSSLPDSPAWHEQNKLRSGEKNRADHRHHAIDAIVVALTDRPRLQELSRVRKGSAAANSSKLGFPWTAFCDEVSKKVSEIKVSHRTERKVAGALHEDTAYGPTKQAGVFAIRKPLETLSPNEIPQIRDAGIRMIVESRLRQHGIETGRGKKDKEDRNAAKKLKLALSNLRMASGVPIRKVRILRNEQTIRPIRRDDPSRSYVKPGSTHHLAFFEWQEKGKRRREAVFVTMLESMDRIKTQQQEFCRLKNEHRDRTGKEITKRDSAHKEYQKRAASTAPLILRRPIAGHESIPKDAKFLFSLSRGETVLANWKGTQRLLVFKTAASTQGQIYFALHTDARKSADQTKYVATANTLDARKVLVDPLGRIRWAND

SEQ ID NO: 2637 - protein, 1236 aa, unidentified
  REGION 1..1236: note = Description of Unknown: Cas Enzyme sequence
MSTILGLDIGSNSIGSAWVDTENHTIRLGASIFPAGVDETDLKRGAPINQARRQARSMRRSIARRAERKSRLRRVLTNAGLLPTDPKELQTLFDANPWLLRRDALERELRPHEFGRALVHLNQRRGALGVETDPDDSDEGKVKEAIDRLRAQLDGRTIGQFMADEMEMRRIAVKGRNADYVQKPIRNRRDSFEFHADRALVREEFARIWEKQRTYNGALAQLLTDDLRLEMDAPGGDKTWRQKGVIFGQRRTYWNTGTLGRCDLEPTDHRCTIHDMHAQNFRVVETVNNIRIQRRDQRDEHSLTAEQRDQVIAALRHTKTAKITTVQKALGIDKAALKKKDLPANYCTLNLEHDEEREINTDRFYREIVHGVFGEENWVAMTPRQRESINKALLKFDKDTDGHFDRLMHGAQAWWGLDEAAARKLVQAWAARGRADKRLGMSRQAITNILPYMEKYDAKNDRWPTQIEAKHMFAEDSDNLATPEQRIRYAHTLTDSLRDTILRQVGGEVDEYERLLRLRGSSRRERCYLAKHPEELLPPAPTLANPVVRKAIHEVRRHVISYLREFGAPPDRVMIELARQARQSERVRDATLKRNRNREAIRKKITSEFDLAELTRNQQRKAHERVILCRQQGGVCAYTGDPITERQAANGQTDDGRRLEIDHIVPYSRCGDDGLNNRVLCYVEQNRGKGSKTPREWWGEQFNDKIRPLAFMDGFKPDRTDYFTKKDYARKWKNLTREIRPEDEWKNSQLTDTAYAARQVAAYLRDALFDGRQERDRGVFETNGRYTAILRRDWGLVGEKGKSRDDHRHHAVDAVVIALTHPRDLLPKLARCEHEREEYHERTGHWPKRTPLPPPWPPTSEDADDEQREKAVAEFRAPIMRERENLIVSHRPVKRRLTGAFHEETLYGSVHGSDEHYTNRIGVDRLTPKHLRMPRPETEKEAIERLSKRFERRKLEKTDARKKARTFVKTPAFTSRIVDPPPAKSGLVRDRDLRRRLRACIVAWLSKQGIDRDADSFTAADAKKMAESGAFRLPSGVPVKSVILLRTMNDPVVIPRKTWDADARKMAPEMDPDDPTKPHPISRRVYVGGNNHHVEIREDAKGKWTGEVVPAYDAARRVRIEKRPAVNRSDNQNERFVMSLAEGETVCMRHPDTGELDYFVVFKLDKPRTVHFQHHCDARIATGRKDTDGTPIPGSKRDDIAVSVSDLPRKCSVDENTPPYKVRVSPLGKVQKLEKD

SEQ ID NO: 2638 - protein, 1180 aa, unidentified
  REGION 1..1180: note = Description of Unknown: Cas Enzyme sequence
EFQTIWDRQRSFSGTLGSQLNKVLLAEFDDPELPKRNDKWRHGGLIFGQRATKWDLGILGRCDLEPADRRCPVADRHAQHFRVIQTVNDMRIERNGRSEPLSRDQRNAVIQLLSGPLFKEKKDGSREAKKSANLGDVKVALLFARNDPGIKINLGSDEDRPPTDWFQREIVLGAIGEEIWNGPLKAMQEEINRTLLRLDPETTGHEARLRSIATQQWNLPDNCVQRLAATWNERPKLDNRLKLSRRAILNLLRYMEEKYQLDGGIWPSVTNARESFARDPNAIDQLSGKPASKEQRARYALGVRSLTKAGRRYIRKHEAEGSATLPPAPFLPNPVVRRAIHEVRRHVLAWMRKFGKRPDRVSIELSREARLPGNKADEIRALNTRRNRIRTFIQEEVIRPVFKEQFTSLTSRQLRAAENRVLLCLQQRYTCAYSGLLPERPEGVCCYTGKTITPRQAALGDGLQMDHIIPVSKTGPTRSLNSLVLCYSGANAGKGNDTPRQWLGAQFEGLSQRFKWWDGYEPPKLKDKADRGDFFTKKDYTRKWKLLNLAEPPKEPWRASQLTDTSYAARQVRAYLAQALFTKDTPEQLGRRFLHPKGAYTAILRRDWQLFQRVLPRDSRGKLLEAEETRAIARKDRFDHRHHAIDAVTIALMNHERLENLAAYAKCVEEAKAEAEAKGLEKPEKWPEREPLDPPWGTVKQFRREVLSRIFAEFDDADTSGRSEPVLVCHRVVKRKLVGHLHKDTHFGPVANDEKGVLTTDGRLATPYVTLRVSARDIKPDHLRLPRIEAEKEAVNRVYQQLRSERLDTKTARATAKDIVADPSFERLRVQPIPGKSGVISKVSLRIALREKLGEFRPYWEAQEKDDKAHWPEQAKKDFGKRIKELVRTGVLVGPNGFPIHRVKIVRTLEDPILIRRRQRDLESGRLIPDRYPQSIRIYEGQNNHHVEIRESAKGEWVGTVVDMFTAARRVRPVKNADGTRPPVSPVADRSDNGDGRFVMSLAEGETVLLRDPRLARDDFFVVAKIDRDPIRVHLFHHVDARSATGRKDEKGKVIPDSKREVLGSKKSPGLPLGALRKLAPSGYPHPVKVEVGPLGDWHAVDERDDRDRLPVPIDPRVVDVAKKGLQLRVTRPACAAMRHRKKLLGSWSWMVQELDRQGLTKPNKQLSAAIRSIRADKSP

SEQ ID NO: 2639 - protein, 1006 aa, unidentified
  REGION 1..1006: note = Description of Unknown: Cas Enzyme sequence
MSDITLGLDLGSNSIGWALVDETGNRLVATGVRVFPEGVDRDQQGGEKSKNEERRIARGMRRQIARRARRKRQLRLCLQGAGLLPPDVTAHAALEALDPYELRRRALEERLEPFEIGRVLIHLNQRRGFLSNRKTDRARKNDNKGMLAEISALAAEIETSGRRSLGDHFASLRAVDPLVRVRGKHTRRVMYECEFKAIWDAQVKHHSALLAEELREMIHRIVFFQRDMYWPKSVVGVCELEPKKKRCPRADRVAQRFRLLQEVNNLRLLDCTTGEERSLTPDERSKLIEVLERKKELSFDDIRKRLNLYEHVRFNFERAERKKLDGMPTDVLLAHKDRFGKRWYELPDEHRNAIVRVLLSDDETVIREKAVNEWSLAPEQADRVLDTDLGEGYASYSREAIEKLLPHLERGLPLMTRDDTSCALREAGYLRPDQCTVNQRNTLPLKLPDVTNPLVRQALHEVRRVVNAIIHEYGIPARIHIEMAREVKGTADQRAQMTKDNRQRAAERDRAAEEIRKLGVGVTRDAIDRYLLWTEQKEMCIYSGRPISLAQLLGGEVDVDHILPRHRSLDNSFMNRVVCFRDENRDKGDRTPYEWLAASNPSKFEAVLQRARHLPYAKLRKFRLQDIALDEFVARQLNDTAYITSKVLEYVRCLGADVVCTKGQLTSDLRRNWGLNTVLRHDNLDIKNRDDHRHHAVDAIVIALMNRSRLHHLSNLYKPQGARSDALDPPWVTFRDDVERAVNGINVSHRARRKVRGALHEETIYGSTHKPGSAETPDRPRSWAKNWIEDAQRFVYRKPLESLTLAMIDDIRDEAIRNIVIDRLKQFGLNPGDKKKIPAEVWKDPLRMPSGVAIKKVRLLKKDRTIQPIREGAAFVKTGSTHHLCLFEFQNKRGNSEHDAVFVSMLEAAKRLRGREPLYQRTHPTRLAATFLMTLAPGDSVLACFEDRERLMILRTAVSTEKKFSFVDHTDSRLDKEIKKYRASDNTFRGRRVTVDVLGRIHNAND

SEQ ID NO: 2640 - protein, 1205 aa, unidentified
  REGION 1..1205: note = Description of Unknown: Cas Enzyme sequence
MITLGLDIGSNSVGSAWIDTDRKGIHLGVSVFPAGVDETEAKRGAPVNQKRRQARSQRRSLARRAERKKRLRKLLTEAGLLPENPAELQPLWDRNPWTLRRDALDRELSPPEMGRVLIHLNQRRGALGVNAESDDPDEGKVKEAIEKLRSRLAGRTVGQFMADEMDARRIPIHGSKADSCQGPIRNRRDSFEFHAERTMIRDEFERIWANQKTFDGPTSRLLTDQLRLRIDDPSGDATWRCKGTIFGQRRTYWDTGTLGRCDLEPTDHCCSIHDMHAQYYRVVETVNNIRIRARGDKDWRSLTAEERDKIFGSLRKHKTGSPKTIRTAIGIDKRRLAKQDLPEDYYELNIERDEDREINTDCFYREIISGVWGPERWAELGESERESVNSALLKFDPDNDNHEQRLRLGAGKWWGLDVEATEKLIKVWRGRGRTDKRLRLSRRAVKNLVPYMERYNDETARWPTQIEARQAFAEDSGNGATLEQRVRYAHTVTERLENLLLRELEGSETACNRLLAIRGARKADRHYLAKHPDLLPPAPMLANPVVRKAIHEVRRHVMAHIRAADRPPDRVMIELARQARQSERVRNATLTRNRNREKVRKQITSDFGLASKSQNQQRRAQDRVILCRQQRNVCAYTGKVITDRQAALGENLEIDHIVPYSRCGDNSMNNRVLCYIEQNRGKGSQTLREWWGEEFDERIRPLAFMQGYKPGKSESNEYFTSKDYARKWENLTRNVRPEDEWKNSQLTDTAYAATQVMAYLRDALFAGDRTRGHGVFETNGRYTAMLRRDWQLLADGEQKDRGDHRHHAIDAAVIALTDPYRLLPELARQAAMDEEYHERTGHWPGRTPVPPPAPWTSVEELRKTLMSTHYSMLVSHRPVKRRIVGAFHEETLFGPVLTNSEQFTNRIGVADIKPVHLRQPRFETDTEMTQRLTKRYLKQGMSEKDAIRKAHGVVRDESLLRKTIDPPPGKSGIVRDRDLRRRLRTSISDRLVELGIERDADSFTKDDMKKLIGAGGLTLPSGVPIKSVILLRTMKDPVVMERRIWDPVRSRMVHDADRRTRRVYVGGTNHHIEIREDDKGGWHGKVVPMFDAAQLVRMERRPAVDRRDDLNGRFIMSLAEGETVHMCHPRTREPGYFVVFKLDKPHTIHFVHHWDARRSKATETMLAREEIAVTAGNLAKCGPRMGVSPYKVVVDPLGRIRPRPD

SEQ ID NO: 2641 - protein, 1258 aa, unidentified
  REGION 1..1258: note = Description of Unknown: Cas Enzyme sequence
MITLGLDIGSNSVGSSWVDLSKREAHLAVSVFPAGVDETEDKRGAPKNQARRQTRSQRRTIERRARRKRLLTIALMERGLLPRDPGALGELYGRDPWQLRRRGLSEPLTPHDFGRLLVHLAQRRGAVGVISDPENADEGKVKEGMDRLEALMRERRAETVGQLMAELIHERRREHNGTAWHEPVRNRQYRMAETQQLFAGRESIRREFHKLVAAQRSFHDSPLSKLLADELVRELDDPRKSDTWRHQGWLFGQRGTYWDTGRLGRCVLEPAERCAPIADRHASYFRVLEIVNNIRIVTPGIGARALTADQRSNVLQLVRGPLGERRYKGALVPKTSVSVGDIREKLGLSRRRRRADAVQLNIEADEERELNTDWFHREVVHGAFGEDTWNSMTEATREAVNRAILKFDPSEPGDAERLLAGAKRWWALDDAAAERLVSAWKQRPRLEKRLNLSRRAVRNLIPYMEQFDEENGRWSTQQEARKAYAKLLRAQFEETGESWVELAARRYETAALGLTAADRYYMRQPKHQLRDEHAAIIHDSDGNPLPVPPPAPMVSNPVVRKAIHEVRRHLVAWMRKFRTRPDRIVIEFARGVKDTAKRRNAQLAANREREKERKLIEENLRAWGIPESNWDRAVLRVRLCKEQAGVCPFSLQGPNASRTITEKMAAEGADVEREHIVPEGLTGKTMAFNNLVLCFREANRGKGMRTPLDWLGPEGVKAMLQRLENAPIKGNRSKWKRLQEPTPDEAEFRNSQLTDTAYAARQVAAYIADALYDGDGLPERGGLRRIFTTKGEFTARLRADWGLHESTIDRESGLEAAPSAEAVRTDPHIEQAFRRARKDAKDRSDHRHHAIDALAIALVGPELLNEVARHAREDREYRERTGHWPRRRAIEQPSAWPTLEAFHEDVLAAVRRLVVSNRPVKRRLAGAFHEAEHYGPIIGPLPAHRRERLDTLYTNKVAIYANSRNYLTPNHLRVPERWDELSSKLEEAAFSDAQKRAIRRELAAMPDPPPAKSGIVRDRALRDRIRKCLRGNGLNPDDFTAAQIKQLATEAKVTMASGVPIKSVVLLRTNTDPVIVPRKQWDPAAGRLLPHMDPDDPSKPHPRTKRVYIGGNNHHVEIREDSRGRWSGRIVSTFEAAQRVRPAANPDGSKRPAQPAVDRASNAAGDFVMSLSEGEMMFARRKDRPDGPADYYVVCKLDKAGNSCRIHFAAHWDARKAAEQDRWAVAPADLKACGPRPQAPPEKVRVGPLGGISVLVRD

SEQ ID NO: 2642 - protein, 1341 aa, unidentified
  REGION 1..1341: note = Description of Unknown: Cas Enzyme sequence
MPAYLGLDIGSNSVGSAWIDQKSGKITVGVSVFPAGVDESDEKRGEPKNAKRRMARRTRITLARRSARKRQLRLTLIANGLLPGDETGFRTLLQETDPWALRRKGLDQALTPHEFGRVLLHLAQRRGALGLKIAEAEDDADADAEDGKVKAAISAIRGKMREVKARTFGEYVAMVRDKRVTALTTPDLRRPGARKGPREFRGAIRNKAASYEHCADRGMIRDEFAKLWHRQKELGGALAALLSDELRSKLDNEVGDSRWKHIGLLFGQLRQSWDLGTLGRCVLEPTERCVPHADRFASRYLVIETVNNLKILEGDKEARPLTAEERAKIKAYLSGPLGKVKSGKYKGQPKRNVTVADLRDAMGWGGIRKTPQMRFNVESDEDINTDWFQREIVHGAVGQASWEMMSERVRDGLNRAILKFDSDEPGDADKLKYGAMTWAGLDEARADALVAAWKTRPRPDAKRLNISRRAVRNLLTLMDRDEPWPDPQRPGQMRWLTQIEARRLIAADDRFLDMTTGTPLSLLARRRYATGAKGATARDRHYMKKHLLMKDGEPVYDSKGLPLREPPPAPKISNPVVRKAIHEVRRHVIEFMTHMGERPDAIFVELAREAKMGKRDSDRLLFRNRLRNRIRNDITREMNLGGASSTQQRAAVDRVILCVQQGGVCPLCANQLVATELTPRIAAAGTDCDFAHIIPRACGGHNGLNNLVLAHRKCNQDMGRRTPRQFWEEVLKVSFEDGMRRVEGIYGNVSRPKPSEVKGATADALWSCYFEGRPGRFGPTFDQLKIDQFKKAVSDTKEMTPRQEAATKYAARQVMAYLADAIYEGDGLPERGGKRMIFASDGMWTSRLRREWGLFFDAHDAKKHGLSADDEHERKEKNRGDHRHHAIDAIVIALCSEEMKKAWTAREKRAENAVRNPADEEQLENYRRTNRIPIPAPYKSREELRDAVKKALFGDGEVERPVAHRPVKRKLTGALHEETLFGPVVDREGKLTENFTAKKSVLALDANHLRMPSAESKDEAIERLATSRRREIGADEKTARKWAKAIVESAGYAPLLIDPPPGKSGIVRDRALRAAIRQCLADGGLDPENFSKNDLKKLIDSGRMRQRSGVPINTVVLLRTMSDPVLIPRKRPEYASGRMATVDDLTSHRAYVGGNNHHIEIRALTGKRGEEKWKGEVVTAFVAARRNLARLRALREAKLPSSRKLAQMAESERAPIKQRIREIEKAHPLVDRTDDDAKGGKFVMSLCEGEMLLMRHKQTKEVNFFVVAKLDKPQGIVLVPHWDARAAGERKDSEGKKVPDSKRDQFTATPNDLRALAPPGHEHAVKVRVSPLGKVTILNRD

SEQ ID NO: 2643 - protein, 1160 aa, unidentified
  REGION 1..1160: note = Description of Unknown: Cas Enzyme sequence
VGWVSRMSPNGPEGGEGGVKMDKASSRFAGGLFSMIHCALPIATSNNTLTVDSLQQKNFADFWRLRSPAKGAKKECPHLAMVAFGCSVEHCLRIFRLVAKSLAGRDWIDTTNIAILAAKSSSFYREAELISLGLDMGPNSIGWALIETEERRIIASGVRVFPEGVDAFDTAKEKSRTQERRVKRGMRRQIARRARRKRELRKLLAAKGLLPADSAQQAAVCSLDPYPLRAKGLDQALAAYEFGRVLLHLAARRGFLSNSKSDKAKAKETSEMLNEISELENEIQSAGHRTLGEHLASLVAKPGERPLIRVRNRHTRREMLRKEFGLLWEAQKAHHPSLLTDNLRKMLDNDEPAGSATWWKGGAIFGQRNLYWPASMIGMCEYEPKERRAPKADRIAQRYRLLSEVNNLKYIDPETGRVCALDSDQRAILLDHLATSKEMTFDQVRKKLNFPQAVRFNLEEGERSKLKGHLVDYLMAKESPFGKGWWDLPESRRDEVVRTIINPRNTDEMIKDVAVRKWGLAPEQADELIAVNLPAGYGSLSRKALEKLVPHMEKGLLLMTDDGTPCALTLAGYLRPDQRAHKQLDALPEPPDLPNPVVRNTLFELRRVVNAIIREYGKPDRIHIELARSIKMGPNDRSEYNKKIREREDERARAADAIRAESPGQKLSRDLIDKYLLWEQQGGKCVYSGRSMSLTQLLAGEVDVDHILPRWRSLDDSFMNRVVCFRDVNHEKGDRTPYEWLNGRPEDYEALKQRIRSLPFRKRARFTQEKIDTDEFAARQLVDTAYITRAAADYLRCLVEKPHHVLGGKGTYTAELRHLWGIETILSELTDSPAWAAQADLRPGEKNRADHRHHAIDAIVVALTDQSRLQKLSRMYKTGEAGAEILPWDNFRNSVVESVKAINVSHRVQRKVTGALHEETIYGPVREKNVRGEIVQRPGEFVVRKPLESLTQAMVEDIRADDPTIKNLVLGRLAEFGVTPGKKSAGGIPKEVWAKPLLMKSGIPVKKVTLVKRDETIRPIREGAYVKPGSTHHLCIFEYTENGKKKRDAVFVTMLEAVDRIRERKPVISRAHPDRPDARFVMSLSRGELISAVFKGKMRIAQFKTAASTTQQMIFTEHTDARRDSGDSRAQKLSATPDSLDKQARKITIDPLGRVRWAND

SEQ ID NO: 2644 - protein, 1065 aa, unidentified
  REGION 1..1065: note = Description of Unknown: Cas Enzyme sequence
MAALTLGLDLGPNSIGWALIDENGQEIVDLGCRVFPEGVDQFDTAKEVSRNEERRIQRGMRRQTQRRSRRKRQVRHALIEAGLFPADADEQEQLLRADPYELRARALAEKLTPQEIGRVFLHLAQRRGFLSNRKKDRGDKEVKGMLAEINELAAEMEGEGDGNAKTLGQLLHEKSRRLDHRDRAENDRIRNRHTNRKMYEEEFEAIWQSQRRLGHADLLTDRLKYGDSGKRKYPCRPPRRRRGKSLLEAYGIHGLIFFQRKMYWPKSAIGLCELEPKQPRCARADRRAQRFRLLQEVNNLRYSDTGAARHEQPLTDEHRTLLLDKLGRSERMTFDQIRKSLGFLESVKFNLEKGKRPSLQGMIVDYRMAKAAGKSWHDRPEDEKNEIVCTLIDNEREDDAVKGLLTGKWGMTEKQAEAALDADFPSGYVHLSLKAINKLLPHLEKGLVYQSVSDPEKSALHAAGYLRRDELRRRIFDKLPDPARTRDCPIGDIPNPVVKRTLVELRKLVNAIIREHGKPATVHVEMGRDVKTRPRKGSEAYRKYQDQLNDMRERERRRDAAAQKLRENGIKPTRDAVLRYLLWEDQHCECIYSGKPISVSQLFGGEIDVDHILPYSRCLDDSQNNKVVCFRRENHDKGNRTPYEWLADSAPERYDGVCQRAGRLVHDGRFSYRKHHRFLQKELELDDFIDRQLNDMRYIARVTGEYLRCLFDAEHKVLGLKGQLTHELRWQWEVETLLGELPDSPAWQEQSKLRPGEKNRADHRHHAIDAVVLALTNRSRLQQLARIRREGGTDQTGEILVDPWPGFREDLKAALQNINVSHRAERKVRGQLHEETLYGKTEQEGHWVARKPVESLSANEIEHIRDKGIRRIIIGRLRELGIEYGRGKRIDAKTWKEAVANLAMPSGVPIKKVRVVKPEKTIQAIRPGTPGEAYVKPGSTHHLCIFEFEDGGKTKREAVFVTMLEAIKRLKHGEAVIQRTHPERPDAEFVMSLSHGEMVEADWKGETKLLVFRTAASTTQQMTFAEHTDARKSTDVKKITCYPSTLRNARKVTVDLLGRVHPASD

SEQ ID NO: 2645 - protein, 1074 aa, unidentified
  REGION 1..1074: note = Description of Unknown: Cas Enzyme sequence
MSKKVLGIDLGPNSVGWALVDDDADSPESNPLIDLGVRVFPEGVDKYGTSKEVSRNESRRVARGMRRQTKRRTRRRDQLQAALIETGLWPEDAEHQEVLLGTDPYELRAKSLHEKLDPHEIGRVLLHLSRRRGFKSNRKKDRGDKEVTGILKEMEDNELEREESGAATIGEWLNEKKQDLDHADRQENDQVRGRHLQRSQDEFDAIWDAQKKHHGKLLSDELRYGDVGEKQDYPLKPQRRKKKKTALQMFGIHGLIFFQRNMYWPKSAVGQCELLPKQKRCDKADRRAQRFRLLQEVNNLRLITPQEERELTPAERSFLLEKLSSKKEMTFVSILNELNKLPDFPSGDVQINLQKGKRKGMQGIEIDALLAHKDVMGPKWYDRPEEEKNEIVRALIDFQFDENAFIREAMGRWGFSMKEAEKLLSVPIPSGHFQLSLEAIERLLPHMEKGLLYMTDDSRPSALKEAGFLRPDEIRKRLFGRLPNEFEWRQSPIADVPNPIVRRTLVELRKVVNAVIRKHGKIDAVHVEMARDMSPQPKKGTPGYKRYVEKITQMREWEAENTQAKEMLIEERIAPSRDNCIRYRLWLQQEKKCIYSGDSISFAQLFGEGEIDVDHILPRSRTLDNSQNNRVVCFRTRADGLGNQEKGNLTPYEWLADSRPDDYEAVCQRARKLPYPKAKRFFQKEVNLDDFVERQLNDTRYITKVAAEFLQCLFNDEQRKSGAVLGIKGQQTAELRWQWGLGEILQSLPDSPAWQAKNDLGGGEKNRADHRHHAIDAVVIALTNRSRLAKLSKLMAKGGAKKHGEILEDPWPTFRNDVVEKIKAVNVSHRVERKVRGALHEETLYGPTKKENEWVSRKPVEGLKANEIERIRDKTIRKIVIKRLQEAGVEFGRGKKPNAKQMQTALTDLRMKSGVPIKKVRITKIDQTIQPIREGKPGETYVKPGSTHHLCIFEWEENDKVKKDAVFVTMLEAMNRLKKGETVIQRVHPTRPEARFIMSLSSREMVEGNWGGEKRLLVYKTAASTTQNMVFVEHTDARKSGEQTKYNVVPSTLDVRDVRKVTVDPLGCVRTAND

SEQ ID NO: 2646 - protein, 1067 aa, unidentified
  REGION 1..1067: note = Description of Unknown: Cas Enzyme sequence
MANLVLGLDLGPNSVGWALLDDSTAGESQLLDVGVRVFPEGVDAFDTAKERSRNEDRRISRGMRRQIRRRARRKRLLQAALIEAELWPADEAQQAGLLAVDPYDLRERGVSDRLEPFEVGRVLLHLNQRRGFLSNKKKDRGDSEVQGMLAEIKHNEELVGLKGYATVGQMLADKKRTQNPADRGEDDEVRNRHLSRKQLVDEFDVIWSKQAEFHAKLLTDKLRNGVVGATMEPRKSIAKHDPRRRVGANGERLSDLEAFGLFGLIFFQRRMYWPKSVVGLCELESKEKRCPKGDRHAERFRVLQEVNNLKFIDPNDNEEHWLTDQQRALLLDYLAQKDKATFVDIRKKLGFLESVKFNLERGKRAAIKGFVIDWMIAKAVGKQWHDRSEDEKDGVVRMLLDNERDDEPILASLTSDYGFSPEEAKGLLEIDLPTGYGNLSLKAIDKLLPHLEQGLAYQSISDPEESALHAAGYLRRDELQRRLFDKLPNLARTRPADCKLGDIPNPVVKRALVELRKVVNSIVAKYGKPDAVHVEMAREVQMGAERRKEVSARMRAREAEREKAAEAIRKMGYAARRDSVTKYMLWQEQGHECIYCGKPISQTQLFGGEVDVDHVLPYSRTLDDGQGNKVVGHVKCNHQKGNRTPYEWLAAGDPDLYAAVCQRAASLLQKGMMPYGKYRKFLQKDLDLDKFIARQLTDTGYITRATVEYLRLLFEKDHEVLGLKGQLTAELRWQWGLDKILEELPDSPAWSEKNDLRPGEKNRADHRHHAIDAIVVALTNRKRLHKLSDLVRRGGAKQHGEILEEPWPDFRESVVERVKNLKVSHRVERKVRGALHEETLYGPTPTEGEWVVRKPVENLSAAEVERIRDGGIKKIVLESLKRKGIDFGRGKKPDAKKMKEALSNLQMPSGVPIKKVRILKQEQTIQPLRDGVEHQAYVKPGSTHHLCIFEFEEKGKKKREAVFVTMLEATKRQKRGEPIISRKHPERPETKFVMSLSSREMVLANWKGEQKLLVFKTAASTQGQLYFAEHTDARRSSEQAKFVATANSLDARKVTVDPLGRIRWAND

SEQ ID NO: 2647 - protein, 1010 aa, unidentified
  REGION 1..1010: note = Description of Unknown: Cas Enzyme sequence
MAGKRTLGLDIGSNSIGWAIIETGGDDGRIVATGVRIFPEGVDRDQQGGELSKNAARRDARGMRRQIARRARRKKRLREALAHVGLYPADRAAQLELERLNPYELRRRALGERLEPFEIGRVLLHLNQRRGFLSNRKADRQKKAEDSKLLAEISELAKDIADAGHATLGEHLAALQDSAPLERVRGKHTRRSMLEEEFEKIWESQRRFHPQLLSEELKHGRRGRQSYPRKPERIGKGGAAAVAEVGLHGLIFFQRPMYWPKSVVGQCEFDPKQKRCRRADRAAQRFRLLQEVNNLRILHTDGEICELSDSQRGALLALLASHEKVEFSKIRTTLGLLDSDAFNLEQGDRGKLLGMKTDAILANAKFYGKKWHALPEDRKTAIVRSLLEDDEPEFKRRAVEEFKIDAAVAERMLEAPLPEGYASLGRETIERLLPFLEKRLPLVARDGSPSAARLAGFLAPWERPLPKGNFLPKPPEITNPLVRQALFEVRKLLNAIVREYGKPDAIHVELTREVKGSAAQRSERTKRMRENERQRDRIAAILEEHGEKPTRSKIEIYRLWEEQRQVCVYSGREISIRQLLGGEVNVDHILPYSRSLDDSLLNLVVCFRDENDAKGNQTPHEWLAATAPEKYEQLLLRASKLLYAKRVRFSQRSCELQEFINRQLSDTAYITNVVLDYLRSLDVDLLGTKGQLTSELRHEWGLNTVLRHDDVNRKNRDDHRHHAVDAVVVALTDRSQLQQLAKRRGADALPAPWPTFRADIEAAVNAINVSHRVRRKVAGALHNETVYGPTETEGVFVHRKPLGELTVAMVPLIRDDVIRMIVVDRLRKFGIVLDGAKREKKTIPKDAWREPLRMPSGTVIKKVRLLEKDKTITPLRGAAQFVKPNANHHLCIFAVTDEKGREKRTAKWVNMMEAARLVRAAEPLIQRTHPDHPSARFLMSISQGEMLLAEFGGAQKLVRFKTGASTSGQLWFLEHTDASRDSKPYSAMVGTLKARKVTVDLLGRIRWAND

SEQ ID NO: 2648 - protein, 1194 aa, unidentified
  REGION 1..1194: note = Description of Unknown: Cas Enzyme sequence
MKSLGIDVGTDSLGLAWVDTDKQEIIADVRIFAPGIDEKKKSKNEGRRRARSLRRLLRRRAARKWRLRCLLQEHGFLPDNPAELARALGACKRDDEANYDPERLNPWVLRSEAMSRRLSTYEVGRVLVHLNQRRGYREGDEERELRQLRDEQAQSDGEGNETAKRQRKKQTQTGESEVDKESGKVKAGLSRLEEDMKQAAAKLGVHPEELTYGQFMADLHLGPTCSICLENGGSYHEPIRNRLDSHRYHAPRELIIREFHAICDAQAGFGHELLASGHFVRDSIEKLIFFQHRTYWKRRTLRRCDLVPTDERVFKADRHAQEFRLLETVNRMKIGTGKSKAPLAISDPRRQQIITFLSTQTRPQLTTLLEELNLKRGSINLEDEKGEKMPLNSDWFSATIIHGVFGHAAWAALSERQQDSVNRALQSFPLERQDSENKLRRLSAHLWKLSETQTAALLDAWRNRPAGRVAFSRRALVELLLPRMRKGMDVESARIDAMRDRKQTVPRRIRRYRKNVTLVARKPLPPPPDLPNPVVRRALHVVRRYVNAYIRKLGMPDQIVVELTRRARQTEKARQEQHAHNQRIAADRERIVEKFELNRLYPDGTRGRIQAIRRFELFEQQRTACPYCGETIHSEHVKRNTDVEIEHIIPRSRGGNDGNDNRLLVHLRCNRNKRDLTIREYLRDRFDELLQHLRHFEKEHPKKWSNLTRSDVPSADDFVQDEFRKSQMPDTGYIAIQTAKYLRESLGVTVLMPPGRYTKTLRVDWGLSPPGKKDRSDHRHHAADAVVIAMTDESRQRLINRRLLEVDQQYERFRTQLRPDPVAEPWPRFAEEARTIVSSLIVSHEENRKIEGEFHKEKPMGKAREFPGLYTARKSISSLNPKMLNPPKENVGKSGEVTYSIQGKGKSLVIRDQSLRDLLHVCLSNADVRADPSDGARALKQLAKKGKLKPEIDYTLQDDRFLEEITRLKPRIEILADQFDSSDIDLLTKRNLLRMPNGYPIKRVTAMRSLPDPLPIPCRDGVTRYFPSESNHHVEIVEIIKPAKGKRPATKAWEARPTIIPIEAARRVRPSKQSTPRIPKRSLIERSRDGERFVMSLCKGDMLHMRIEERLDSPKDYFVVAKITGEKVILVHHADAGIASSTKGDDDLKRDESPPMSAEQLRERDTVRIRVAPLGEIIRPRIRQGRHGNFIRQD

SEQ ID NO: 2649 - protein, 1089 aa, unidentified
  REGION 1..1089: note = Description of Unknown: Cas Enzyme sequence
VLGGIFLKQLRANIVAGTILGLDMGPNSIGWALINEQDEAIVDLGVRIFPEGVENFDTSKEKSRSENRRLARGARRQTTRRGRRKRELRDALITAELFPTDLKEQERLYTTNPYELRTRALDEELRPHEIGRVLLHLNQRRGFLSNRRMDRSDSEAEGMLAEMSELAQQIEASGSRTLGEYLYRKHDHFDHAQRSDDDHVRRRHTRRVMLETEFDAIWESQSKFHSNLLTPELCFGQIGRQDYPVKPRPCPKGLSLLEAFGIHGMIFFQRPMYWPKSVIGLCELEPKQKRCPKADRHFQRCRLLQEVNNLRLADNSARIERKLTDEERLLLLDNLLRKKELKFDKMRELLGQLPDNPAPEQIHFTLERGKRTKMQGMPVDALMAGKKINGAAWHKRPEEEKDTIIRLLIDNERDDDVLAERLTNEFGFTPAQADEALKADFPDGYGNLSLLAIDKLLPHLERGLIYQGKSDQEESALHAAGYLRRDELKRRLFDRLPNPARMNPRNCPLGEIPNPVVRRALVELRKLVNAIIREYGKPDAVHVEMARSIQMGQDARRKYNTFTREREKQRDHAADEIRKIKSTFPAQASLRVNRDSILRYLLWQEQKTDCIYCGKKISQQQLFGGDTDIDHILPRYRSLDDSQSNKVICHRRCNHDKSDKTPYEWLASTDPQRYEQICQRASALVRQRLMPYGKYRKFLQRNLNLDDFVARQLNDTAYISKVTAEYLRCLFEKDHFVLGIKGQQTATLRWQWGLNTILRDDGEDRKSRDDHRHHAVDALVVALTNRSRLHSLAEIRKTDGFDHETGEVFTLPRPWDNFRKDVEQRVANINVSHRVQRNVAGGLHDEMPFGTTDKPGVFVKRKPIIDLSANEIEKKIRDGGIKKTILDHLKSKGIEIENGKKPTAKHLKEALADVRMPSGVPIKKVRLRVPNETVTPIREEKAEDLESPTVIAHVCPGDNHHACIFEWEEKGKPKRDAEYVSRLEASRRIRRDVRESLVRRQHSKRPEARFLMSLSPGDSVLAEIDGTERLMIVSTLVSTQKRIHLVDSRDARRSGAKKDLGTTPNSLIAKYKARKVTVDLLGRIRWAND

SEQ ID NO: 2650 - protein, 1063 aa, unidentified
  REGION 1..1063: note = Description of Unknown: Cas Enzyme sequence
MKKRTLGLDLGPNSIGWALVEEDSKGNSGKLIDMGVRVFTEGLDAFDTAKESSRNEKRRVARGMRRQTARRRKRRKAVSEALTLLGLWPASPDHRNDWMQRNPYELRAKAVSGTKLEPFEIGRVFLHLAKRRGFLSNRKTDAAGKESEGLLHEIQENESKRVESGHPTLGSWLNEKHQSLNHSDRKNDDHVRRRHLSRRQYKHEFDAVWKAQANFHPELLRDEHRWGKLGSIEFPCKPIPRGDSAVSQFELFGIEGLLFFQRKMYWPTEVIGRCELEPKKRRCPIADRRFQRFRIWQELNNLRYVDPDNGNEFPLSLPQRKLLFTKLWETDKLDLAKLRKALGFLESVKFNFERGEKSSLKGNATDVAARKAWGKDWNHLDEEQKDEIIEALTNPNLDDRELIQLATERWKFNNEQISKMMKINLPAGYGSLSLKAIQKLLPHLEKGLTYSLQDENNSAIHAAGYLRRDQIKRRIYDFLPSPQVERKTPIGSIPNPVVKRTLTEVRKLVNAIIREYGKPDEVHIEMARNLKMGSKKRKEITKENADRAKKRDSIAETLSDHGVIKNRENILRYQLWEEQNRQCMYSGKSISVAQLLNDGGGVEIDHILPRSRTLDDSQSNKVLCFRDANQAKGNRTPFEWLASANPQQFDEVIQRANLLLRSGKLPYSKYKKLLQKEVNTDEFVSRQLVDTAYITKVTSEYLRCLFDSDHKILGLKGALTAELRWHWGLETILEQLPDSPAWSTKDQLRPGQKNRADHRHHAIDAVVIALTNRSRLQTLAKAMSDKTNKVQGELLDEPWTGFRETVMDRVSKVWVSHRVERKVSGALHEETQYGKTNQPDRWVTRKAVDSLKANDIPNIRDPFIRDLIIAKLEKFGIEVGRNVEVDPKRLKEVLADLKMPSGVPIRKVRVEKSEKTIRSIRGNKCETFIKPGSTHHLSIFEWEEKGKKKRGAVFLTMLEAAKRSKTGLSVIQRDVPNTTDAIPQSAVFLMSLAQREAILLEDGDSVKLLVFRTAASTQGQIYFSQHSDARRSNEYKKLVFTANTLPGRKVTVDLLGRIRNAGD

SEQ ID NO: 2651 - protein, 1048 aa, unidentified
  REGION 1..1048: note = Description of Unknown: Cas Enzyme sequence
MGRADTPMKYRLGIDLGTGSLGWAVLELNAEGEPIRIERLGSRIFGTGRKPKDNSSLAADRRQARSVRRRHDRYLQRRNRLLAELTAVDLFPIDLAERAALKKLQPFQLRAEGLERALTPHEFGRALYHLQQRRGFKSNRKADKGDNESSAMKDAIRDFDANIPEGETVGSFLWGEIQEGRGARARHRTEGSKNIYDFYIGREMVDAEFAALWEAQRSHHPSLLTAPVRERVHHAIFDQRPLKPVDPGKCLFEEGEKRASDALVSSQLFRLWQEVNSLRVRDLNDSGLTERPLTRIERDKAIDFLRPERKKTLVALRNVLFGRGSDWEFTHEAGERTDFKGDPVSAALADPRAFGDAWWKLSLDVQDEIARRIDNLEGPDSEHALGLWLMTEHSLDEAAAEYVVNKISLPDGHRRLSTLAIKKILPHLQEGWDAANNKALTYDQAVLAVSADAEARGDIGEAHRYRSHSQRHTGELFDALPYYGAVLRHYTQAVARAEDETVQRNTNPDEWEHGRIANPTVHIGLNQVRTVVNALVARYGPPAQIHVEVARELGQSREKRIEASKFRSEGEKRNNALRESLTATFEQPDNFHNRERLRLWEDLGPLNHKCVITGRTIDRTTLFSNEWQVDHILPFSRTLDDSYSNKMLVHFTANQEKGNNSPFEAFGQSGPRWDEILQRAETGFVRNPPKFRRFGEDAMERYENGEQDFIARQLTDTAYLARASKEYLGSLIDPNNVVTLPGRLTAMIRAKWGLNALLGTGNQKDRSDHRHHAIDAAVIAFTDRSTLKRMTDANRRAEDASKADPDGVAKLLKDFDQPWDGFYRDMENKVAGIVISHRPDHGPEGQLHEETAYGVLEGPDKEGRYLTRKREKDAKTGKVSGFEEPKWRPVIPIFRRGDGPDSALPYKAYIGGSNYCIEIVRLSSGKWAGEVISTFQANTREYQDFMKDKVAFHHSSFSGTPLVMRLVADDTIAIEEDGARRIMRLCKMDSDGPMYFAAHNEGNVAARSLDKSTEFSMLKKNANPLRDLQARRVFVDPLGNVLDPGFTP

SEQ ID NO: 2652 - protein, 1093 aa, unidentified
  REGION 1..1093: note = Description of Unknown: Cas Enzyme sequence
MKYKIGLDLGSTSLGWAVVELNEADQITSLVDMGVRIFPDGRDAKSHKPINVIRREHRQMRRRGDRVLLRKKRVLQLIHKYGLDFDISADIKLEDPYVLRARAVSDKLSSAELGRVLFHLALRRGFKSNRKETRGDSGGKLKKATLALHDAIGDKTLGEFQVDSKRYRFADQFDGNKIKDGALYPTRDMYLDEFNRICSVQNMSDDMRQQFEYAIFHQRPLVPPEIGTCMFELDQPRAYKFEPVFQRFRVLQQINQLRIINNGEIKELTAEQREKLQDALLATFCGVKRDKSGRPKITFAEVKKLLGLSRNTKFNLESEKRKDMDVDATAFAFAECELADFWRACTDNVKSQVLAHLNDDELSDSDLVDYLAHEYGISQDKAEKLIQQPFEDGVANLSVCAMQKMLPFLEQGHLYHIAAKEAGYDHADRGIVHLDTLPYYGDVMALRPSLVQDKMGRYRTMNATVHIALNQLRAVVNDLIARFDGEPYAINIEMGRDVSAGADERAEIEKQQAANKRENDRIATELIAMGVRVCRENIQKYKLWENLGKSPLDRRCVYTGEIISKEKLFSPEFEIEHILPFSRTLDDSMANKTISAAVANRFKGNRSPDEAFSDPKSPWKYEDVVARAQNLPEATKWRFNRGAMDAFLQGKECIARAMNDTRFMTRMAVTYLQHVCADKNRVTGMPGRLTASLRDEWHLNWWKNKAEESKYRGNHIHHAIDAFVIACTDENILRKLADAKSDMHTPFPGFDYFDFKMRCENTIISYRQSQKNPKDIHSTVGCLHEDTAYNLECFEDGGCGVNAVMSHREELPTTDKDKKAFAKDFKNVNPKTLQMFLNDAGVANEEPDIAIKFLDWCAMRNIRKVRMYKTGVDVTTYVPVFRTKKQRDVYRAAYLNWYVNTGVASGIVDKKLRAVQQEKEKHLLQEFQDAAKQAYKWYVGGNNFCAEIFEIRDDDTRYPKLRGRWQVEILSNYNAQLNAGAPLWRHKYATAKRIMSLRINDMVMAEFSKDDPKLPKGLVETVAHQCAIEKTDKVNVVFRVKKLNSSGTVYLRPHFIAKEDADTKSWIASATSLQEHKARKVCVSPSGKILGLK

SEQ ID NO: 2653 - protein, 1092 aa, unidentified
  REGION 1..1092: note = Description of Unknown: Cas Enzyme sequence
MAEARLRWRLGLDLGSNSLGWAVVRLDSDGHPCELTNFGPRIFPDGRNPKDGTSLAVQRRVPRGMRRRRDRYLGRRHDLMQALVALGLMPPEEAGRKGLEILDPYALRARALDAALTPHELGRALFHLNQRRGFKSNRKADSKDNEAGVIKEGVGRLAALMQERGARTLGEYLFMRLRKGDMARARPEAGFYTSRAMYEDELDKIRERQQPHHALNDAQWDGLRDIIFYQRPLRPVDPGWCLLEDGERRAPRALPCAQEFRMVQEVANLRITEKPGAPALPLTLEQRDKVLSELRTQKELKLDRLIKLLKLPPEATVNLLDENRDKLKGDETSARLSHKDLFGKVWHRKSFDERTAIVRVLLDTEKPEDVVRIAREQWGLGEEAAQKLANTGLPDGFARLSEKAITKLLPIMEDQGLNYSEAVAEIEEYGHHSDFRPDRALAELPYYGAVLTRQVVGGDPAQPATDEVAHYGRIANPTVHIGLNQVRRVVNDLVKVYGKPEQIVLELARELKMNKEEKDKARRDNRENEMANRRREDDIRAAGGVPTPHIMRKLRLWEEQKYGSVNVCPFTGEPISFEMAVDERTEIEHILPFSKTLDDSMANKVLALRKANREKKDRSPFEAFGHVSGGTYDYDAILLRAAALPSNKRWRFQPDAMDRFKGEFGFLERQLNETKYLSRIARTYLANLYDEKGEGRQRVRAIPGRLTAMLRGRWGLNTLLRGHNVDGGESEEPARKNRDDHRHHAIDAFVIAMTDQRLLQKVAEQNSDADRKRLIDSVPLPWPGFTPDVLRPHLERLVVAHKPDHGSYPWQAKRNGRGHASTSGALHNDTAYGLVAEGRNGTWQVVSRTALGSFATPEKMDAGLATIRDPALRDALIAEWQAFQRKPPAPEVPDDPEAAPKKAKNAAAAFAHRIATEGFVFKGRTVKVRRVRVVEELSVVAIRDRRTGKPYKAYKPDGNAFSDIYELPNGRWTAVTIRRFDANQQDFDPVKFRPHPRARRIMRLHIDDMVAVGEGGDRRILRIVKMSGQTITMADHFEAGALKARDADKSDPFKYFQKSAGELRKIGFRKIGVDPIGRIADPGPRRAAEAGA

SEQ ID NO: 2654 - protein, 1099 aa, unidentified
  REGION 1..1099: note = Description of Unknown: Cas Enzyme sequence
MRYKLGLDLGSTSLGWAVAALNEKDEIVDLVDLGVRIFPDGRDAKTHTPINVNRRDARTARRRGDRVKLRKDMTMKLIEKYGLGFQINEKLENPYKLRAAALGRKLSPDELGRVLFHLALRRGFKSNRKETRGEDGGKLKQATLALQTSIGDKTLGQWQNETGKYRFSNQFDGDKIKDGAFYPTRKMYEDEFKAIFKAQEIDDKTREEFYDAIFFQRPLKPQDVGNCMFEEGEPRAYKFYPAFQKWRALQQLNQLAILENGKNIPLTDEQQNAIRNTLLDTFNYVNKKGKLTFAKIRSQLKIKSKFNLESEKRDSLDADKTGFAMSQIGADDFWRGLKESEQNALLDKINNDQIEDEEIVAELTRANIDQDLAEQIANISLEDGTASVSLKAIDKMLPFLEAGQMYDKAAESAGYHHSNKNVPQYDNLPYYGDLALLRPSLVADKYGRFRVMNATVHIALNQIRAVVNELIGKYGKPAAVNIEMGRDVREGAQGRKEIDIEQAKNKRYNDEIRKELAAIGIANPSREDFQKYKLWEMLAKNPVDRRCVYTGQQISLTDLYTNKFEIEHILPFAQTLDDSIANKTVSAVEANRFKGNRTPFDAFNDPKCPDDWKYEKVWERAQNLPDNAKWRFKETALADYLRDNDCIARALNDTRHMSRLAVWYLQHICKDKNNVAGLPGRMTALFRDMWSLDWWKNKEELEKERYRAHHIHHAIDAFVIACMGRGQLQKLATNADSLERFGKNLKEKRKNLFANIDVPFDGFNHFDFFTTCENTIISYRQSHKNPRADGTIGRLHEDTAYSLVEFTNGTKATFCVSESVPDGKDEKTARKFFSNINKTTLDMFMVDTGVLNDDANMAQKFIEWCNEKGHKKIRMHYKDIDATTYIPIFRNKPDRENYYKAYEELFAEDGVAAGMTDKKAKAAQKAKEHGLLEKYRTAAMRAYKWFVGGNNFCAEIYEIRKDDKKYPKLRGTWQIEVMSNFDAMRARGEPLWRKKYPTAKRIMTLRRDDMVIAEFDRTDEKLPKGIIDAVNAKADWEKRDKVEIIFRVKKLNSSGIVYLRPHFIAKEDADTKSWGASASSLQEHNARKINISPTGKILK

SEQ ID NO: 2655 - protein, 1230 aa, unidentified
  REGION 1..1230: note = Description of Unknown: Cas Enzyme sequence
MKYKLGLDLGSTSLGWAAVELDDNDNIIGLLDLGVRIFPDGRDDQKKEISNAAKRSSAAQMRVQFDRKIERREKLLKILQGNGFLPKDEKELKYLLDPEKGNSGLTDPYYLRDKASREEVSLYELGRVFWHLSKHRGFSGKKDQDIDNHADRDAKNSKDTADATETEKEAKSVNARIDKLRGEILSADYKTLGQYLYARQQEGKKLSFKGLKKEDGSGDQSGFMDGFPSRQLYIEEFNYIWDMQKRFHSELTDELKTQLQDKVIYYQRPLKQKEPGKCKFTGRDRIAKCQPLYQEFRIWQDINNLKIGGGSLSEGQRDAVFNLLNDPAKFGDVADAADKVSFDLIYHVVSGRPDDAEFNPDRPRFNLEEGGRKGLLCNKTNLVMSKLLGAKWNPNADNYKVIEKLTAYYESRSETERFIRQDMGITDDSLMKKLLKLKLPKGYGELSGEAIGKILPLIRQGKRYDEAAAEIFGSHSALRPYLVGGYNPPAQLPPYQILFPESLTNGKIGNVTVHIGLNQIRLIVNELIKKYNGHPSEINIEMARDLKMGQKAYAEYRRKQSQNEDMNMRARLAIKEAKGDADYEPTATDMEKYRVWFNLNPFDAKKRYDYYNDSEMPTIPLVAALTSEYEIDHIIPRALGGDDTWCNKILTKAVSNRAKGDRTPAQYLSERQLARAKFWAEELDKINEARRSKKTKYDASAKKAKKKDKEKEFKFFSLAWRFEPGAEEKCQNRGFKSRDLNDTRYMSKLARDYLSYICSGFTRGAEKGHRTPKVLASNGALTDLFKSVWGVNETLPMDYMYWNIQKWQRDLMAEKIKEKLMAGPDSDKYNMASKGKDESKAAKKLLNDDVESELAKLSDNDFYKISSRKKDRSNHYHHALDAFVIACMNNSMANDINSMANEIELENRRYNLAHDDEAEKETLNQTRKRLIKNNGKFKIPFDGFDMGKLKAKMKNIIISEKQSPDKLKQALESENKPTETFPNGRSLEQISFSGVTKDTAFGLADTFLNNKRELQLKLKHFDGKKNKIEVSSFDSMVPVFNKKHLEYRNLKARYISAYAEYKKNPKNEDNIKTLCESIAKDKVFKWLASEGNYAAEIYETGKNGREKWNVEVMSNWWALQRRGRFFWCDSEPSSKFIMRLRIGDIVRATFKKGDKSILPNMKEWVESQIGDNEDADILFRVKKASGYNVYLTPIHVAQQDGDTKAWQASATTLKAANVRKVTISPLGELK

SEQ ID NO: 2656 - protein, 1054 aa, unidentified
  REGION 1..1054: note = Description of Unknown: Cas Enzyme sequence
MTTRLGLDVGTNSIGWCLYDGDTIRDIGVRIFSDGRDAKTGASLAVDRRAARAMRRRRDRYLGRRSALLRALIDTGLMPADKAAAQRVAALDPYPLRAKGVSEPLAPHELGRVLFHLNQRRGFKSNRKTDRDPNESGKIADGAKALNAALDGRTYGQFLAANDRKRVRMRPEGDGYDFYPERAHLEDEFDRIWARQADSNPALLTDIVRNRLRRIVFFQRELKKPKVGGCTFFNQEERLPKNSQLFQELRLYQEVNHLKIERAGEVARSLTLDERDALILLLKSKRKVSFKTLAKAIKLKDGESFNKDRENRSDLAGDEIFVAFSDKKSFGTRWAHFDDRTKVAIIEMVESEPDPKVLYDWLMVTHGVSEEQAHTIGKIRLPDGHGRLGETASRAILAALKAEVITYDLAVAKAIDRHHSDFRTGEILDRLPYYGELLSREIPPGTLNPDDPDELRWGKITNPTVHIGLNQLRKLVNAVIAKYGRPDEIVVELARELKLNEKQKAERNKELVANTKAAQSRGDKLRELGQLDNGGNRMLLRIWEELNPANPLDRRCPFCGGVIAVHMLFNGEAEVEHIIPYSRSLDDGAANKVIAHRACNREKGNKTPWEKWGETPRWPVITDQVTRLHKSKQWRFGPDAMEKFEKDEGFIARQLTDTQYLARMTRSYLAALYPVGGGVYVIPGRMTAMLRRIWGLNDLLPDHNYVENRHSDAPKNRLDHRHHAIDAAVVGVTDRGLMQRIARAAGLAEDQDLDRLFADLDQPWQGFRDDLRDALQPITISHKPDHGRTRLPRKDHDITSGRLHNDTAYGLTGKINDKGIPIVVRRKMLLGLKPEDIGAVADRELQAALYDATEGLSGKDFESALRRFSSEGSRKRDRNGAPLFRGIRRVRVREPLNIIPIHDASGRAYKGYKGDANARYDVWAMPDGKWVTKWKDRSGKDHSSIVSMFEAHDRTAVSSKPHPAAKRVLSLRQNDLLAIERNGGPREIVRVVKFASKGDLVLALHNEAGALKARDADPGDPFKYINTSASGLKRDKARQIRIDPVGHILDPGWR

SEQ ID NO: 2657 - protein, 1067 aa, unidentified
  REGION 1..1067: note = Description of Unknown: Cas Enzyme sequence
MLRLGLDIGTNSIGWWLYNVAKDQPSLVLDGGVRIFSDGRVAKTGASLAVDRRNARAMRRRRDRYLQRRAMLMKRLAGAGLMPGDPVQAKALEVLDPFALRATGLDNLLPLTHLGRALFHLDQRRGFKSNRKTDGGDNEGGKIKDNSARLDQAMMAAGARTYGEFLHKRRAAAPDPRHVPAVRTRLTLRQNVDGDKPEPGYDFYPDRHHLEEEFQKLWLAQSRHHVELTEELGALLFETIFYQRPLAPVKVGRCLFNAEPRLPKSHPLTQQRVLYETVNNLRIAAPGQAARPLTLEQRDKIIVWLNGKKPAKSHKSKQSMTLAAIAKELKLPRSETFTLATIARDAIECDLVRTCLSHPDCFGPRWTVLPEADQVILIDKLRNENDREKLLAWLRETHNLDAARAGIVADAPLPEGYSRLGETATRAILAALKSDVLTYDKAVAACGLRHSDLRTGEVLDALPYYGKILDRHIIPGSQDPAHDDITRYGRITNPTVHIGLNQLRRLVNRIIQVHGKPDQIVVELARELKQSEDQKLEDSKKNAQNLRAAQLRSEKLGQLGQPDTGANRIILRLWEELNPNDAAHRFCPYTGKQISAGMPFSGECDVDHILPYSRTLDDSTSNRTLCLREANREKRNQSPWEAWGGTAKWAQIEDNLKYLPDAKRWRFAPDAMAKYEGERDFLNRALVDTQYLSRIAREYLDALYDGQDGKRHVWVVPGRLTEMLRRHWGLNSLLTDKDRGAGKSKNRLDHRHHAIDAAVIAATDQGLVQKISTLSGQNRENGLEEFAASVPPPWETFRADIGSQLARIIVSHRADHGRIDPAARAKGRDSTTGQLHNDTAYGLTGETLKGVPLVVTRKPIDSLTPAMLEKIRDPQLVQGLSIATKGKDGKDLSAAVRAFSDRPGPYQGIRRVRVIEPVTVVEIKDQNGKAYKGYKGDSNQCYEVGRLPDGKLKAQVITTFEAHQNTPARRPHPAAKRILRVSQRDMVALKHSDKELICYVQKLDKANGLFLVPHNEANADARDRDKNDPFKFIQISANPLVKSGARRVIVDEMGRVNDPGPSKQAQK

SEQ ID NO: 2658 - protein, 1023 aa, unidentified
  REGION 1..1023: note = Description of Unknown: Cas Enzyme sequence
MKYRLGLDMGTNSIGWAVIGLADGDAPEAERLLDMGVRIFSDGRNPQTGESLAVGRRGPRGMRRNRDRKLLRKQRLMALLIKHGLMPTDAAARKLLENIDPYTIRKEALDKTVPLYHFGRALFHLNERRGFQSNRKAGKNEKEDGAVAKASTELQQNLEQSGARTYGEWLALRHAKREPVRIRGHQEKNKMAYDFYPLRDMLKVEFAALWAKQQACWPKELNETIKDELSRCIFFQRNLKPVIAGKCSLDRTTTRGERALPSLQLCRIYQEVNALRLKNGPFDKGAPLTLEQRDILVAKLREKNLTFDQARVALKLSSDIRFSLESERRKELAGDETAILLAKKTLWGPTWHKLTTLQQDEIVLKLLREEDEDSLLDWLTDKYGLSDEQALDISAVPLKEQRQRISLETARKLLVPLQADVTLYSDAVPLAKLGHHSYSETGEIMDKLPYYGKILEDYLLPDPEEKLQGFGEKGTGRIANPTVHIALNQLRHVVNAIIKKYGRPSEIVVELLRELKQSQEEKSRINKEQSENQKKNDARRKILADLGIHDTYNNRLRVRLWEELGEDPLARCCPYTGAQIPVHELFSGKFELEHILPFSRTLDDSPANKTLSSLAANRSKGNRTPWEAMESGNTSFSQDQLEMAASYLPRNKGWRLGPDAMERYKKQDGADFIARQLTDTAYLARVTRTYLKILLENKNAIWVTPGRLTALLRHGWGLNTLLGDEKKNRTDHRHHAIDAVVIALTDRHTLNMAAKVNARQDDGAVYKLDFPEPFAGLRGQVEEKIAKIVVSHRPDHGLGGALFTETNYGVAEEGILITRKPVSALTLKNIIGQKALEICDKATGSELIALANAAENDDKVFAVSLAQWSLRTGVRRLRVKIKNSAYVEIRDRKTAQPYKALIPAEQHHLDIFVDAAGAWKARYVNLLDAQRNPVEVASNIALRLHKSDLLQIEDSTGARRIMCVKGLNPSLNNITMIEHTQAGKAGDDFKLENWSISKLQSHKAIRLVVDPLGQTIKAAAPRR

SEQ ID NO: 2659 - protein, 1059 aa, unidentified
  REGION 1..1059: note = Description of Unknown: Cas Enzyme sequence
MLRLGLDIGTNSIGWWLYEIAHGQPVAVIDGGVRIFSDGRDAKTGASLAVDRRNARAMRRGRDRYLHRRTMLMKRLAASGLMPQDPEQAKALTQLDPFALRARGLDHALPLDHLGRALFHIDQRRGFKSNRKTDAGDNEGGKIKDGTARLDMAMMAAGARTYGEFLHKRRAAADSPRLIPAVRTRLTLRLDADSGKTEPGYDFYPDRRHLEEEFHKLWRAQEPHHPELTDALRDQLFETIFYQRPLKEAKVGRCLFHPEDRLSKAHPLAQQRVLYETVNNLKITANGRASRPLTLDQRDQIIFALNGKESLKSPGGTKMSLDALAKVLKLKGEKFTLETAARDSIACDPVRAGLAFKDRFGARWSTLTWQQQWDLIQRRQNAQSDQQVQELIQWLIDTHHLTADQAKETANAPLPEGYSRLGLTATIAILDALKSDVLTYDKAVVATGRHHSDGRTGEVLDVLPYYGKVLDRHVIPGTQDPAHDDVTCYGRITNPTVHIGLNQLRRLINKIIEVHGKPDEIVVELARELKQSADQKAEAERTIKKNTDAAIRRGEFLVEELKLPDTGANRAILRIWQEMNPDQTKRFCLYTGTLISPSMLFNGACDIDHILPYSRTLDDSGSNKTLCLKEANRAKRNKSPSEAAHDGMPIWALQGENLKYLPVNKAWRFAPDAMAKFEGERDFLARALVDTQYLSRIAREYLDKLYDGGDGKSHVWVVPGRLTEMLRRHWGLNSLLHDDQRDVTKSKNRMDHRHHALDAAVIGATDRSLIKRMADQAQIDAGRGLDDLASKVQPPFEGFRDAVKGRINAMTVSHRADHGRIDGKSTTGQLHNDTAYGLTGQSQNGVPLVVTRKPFDGLTPAIIDKLRDVALAEALRLATKGKDGKDYQTALRNFKSRPGPYQGIRRVRIIEPVDVIEIKDRNGVAYKGYKGDSNQCYEIWRMPDGAYKHVVISTFDAHKNIDHRPHPAAKRMLRLHKNDMVRLEDSKFGPTCVTVEKFNVNGQVSMVAHNQGNADQRYRKDKEDIYIRMQPASLIKSGARRVIVDEMGSIKDPGPPKTA

SEQ ID NO: 2660 - protein, 980 aa, unidentified
  REGION 1..980: note = Description of Unknown: Cas Enzyme sequence
MPSDPAEAKALERLDPFELRARGLDEPLPPTHLGRALFHLNQRRGFQSNRKTDRGDNENGLIRDATARLDQAMLIAGARTYGEFLHRKRAAAPTPRETPAVRTRLTLKAWDGDKTEAGYDFYPDRRHLSEEFGKLWQAQAAHQPGLLTGALRDALFEIVFHQRPLKEPEVGRCLFTDEPRLPRTHPLVQRRVLYETVNALKIAAPGAPARPLTDKQRDSLIHELDNQKPTKASAAGRSKVSFKKLAKRLKLSAEEGFTLETAVRDAIACDPVRSSLSHPDRFGARWGTLDSDTQWQIIRRIRDVTSDVDHAGLVNWLVAEHGLDRDKAEAVASAPLLEGYSRLGETATHRILASLQAGVVTYDRAVAQCGWHHSNTRTGEVLDELPYYGQILDRHVIPGSQDPAHDDVTRYGRITNPTVHIGLNQLRRLVNRIIAVHGKPDEIVVELARELKQSEEQKREASKRLRETTEAAIRRGEKLREMGVPDTGANRIRLRLWESLGTDVMSRNCPYTGQRISAAMLFDGTCDVDHTLPYSRTLDDGFSNRTLCLKEANRQKGNKTPWEAWGGTASWPAIEENLKNLPPERRWRFAPDAMERFEGERGFLDRALVDTQYLARIARSYLDALFTEGGHVWVVPGRMTEMLRRHWGLNALLPDRDRGAVKAKNRMDHRHHAIDAAVIAATDRALVSRISRASGRDEAVGAEDVARSIDPPWEGFRDDIGAQLGRIVVSHRADHGSTGTGGTTGRLHNDTAYGLTGETRNGVPLVVTRKPLESLQPAQIGKIRDEELRQRLAEATQGREGKEFAAALVAFARQEGPYRNIRRVRLQDAIDVIEIQDAGGRAYKGYKPDSNHLYEVWRMPDGAFVHHVVTTFCANSGRESRPHPAAKRLYRLFKNDMVRLERSKFGSVIVTVEKFDGNGTITLVAHNEANADQRYRKTKEDLFIRLRPRGLVEAGARRLVVDEIGRFRDPGPPACSRGIA

SEQ ID NO: 2661 - protein, 1084 aa, unidentified
  REGION 1..1084: note = Description of Unknown: Cas Enzyme sequence
MRLGLDIGTNSIGWWLYGTEGGRITEVVDGGVRIFSDGRDPQSKASLAVDRRAARSQRRRRDRYLRRKAALMKRMAQVGLMPADPAEAKVLEVLNPYELRASGLDGPLPLTHFGRALFHLNQRRGFKSNRKTDRGDNESGKIKDATARLDQAMMAKGARTYGEFLHMRRAAALDPKSVPSVRTRLTVARRDDAEKEEAGYDFYPDRKHLSEEFDKLWAAQARHAPDVLTEDLRDEIATIIFHQRPLKTPEVGLCLFTGQHGVPERDKRIPSAHPLNQRRILMETVNNLKVAAQGEPSRPLTREERDQIVHALDNKKHTKSLSGMTMKLKALGKVIKLRPEQGFTLETANRDAIACDPVRASLSHPDRFGARWSTLESAGQWDVVQRIRAVQSDAEHADLVGWLMDVHGLDRDHAEETANAPLPEGYGRLGLTATTRILAALEADVLNYSAAVAACGWHHSDGRTGEVLESLPYYGEILERHVIPGTGDPNDDDVKRYGRITNPTVHIGLNQLRRLVNRIITVYGRPDEIVVELARDLKLSEDQKKDVQRDIKKNTEAAIRRGKKLEEMGVPNTGANRMVLRLWEDLGDDVMTRNCPYTGKRISAGMLFDGSCDVDHILPYSRTLDDSFANRTLCLKEANRQKTDKTPWEAWGETEQWEAIAANLKNLPANKAWRFAPDAMERFEGEKDFSARALADTQYLSRIARAYLDALYDGDDGKSHVWVVPGRLTEMLRRHWGLNGVAALTDSDKQTVKAKNRTDHRHHAIDAAVVAATDRGLIKRIADMAKRDEFNGAEEVARSIPPPWEGFRDDVSAQVTRIIVSHRADHGRIDPAARKSGRDSTSGQLHNDTAYGIGRDGTVVSRKPLASLSPNDIVVTKRGANIRDVDLQKHLARVTHGLDGKAFEAALLAFAASPILPDNTDNPYFGLRRVRLEETLQESARVEVADQEGRPYKAYKGDSNHCYEIWCLPDGKIKPQVVTTYEAHQSGAEKKPHPAAKRLMRIFKRDMVMLERDGETIIGYVQKMKQNGSIFVAPHTEANADARDRDPKDDFKLIQLGAGSLVKAKARRVIVDEMGRLRDPGPPL

SEQ ID NO: 2662 - protein, 1077 aa, unidentified
  REGION 1..1077: note = Description of Unknown: Cas Enzyme sequence
MRLGLDIGTNSIGWWLYAVENNAISEVTDGGVRIFSDGRDPKSKASLAVDRRAARAQRRCRDRFLRRKAALLKRMAEVGLMPADPTEAKTLELLDPYALRAEGLDRELPMTHFGRALFHLNQRRGFKSNRKTDRGDNESGKIKDGTKRLDEEMAIKKARSYGEFLHMRRAKATNPKEVPTVRTRLTIARRDHAEKEEAGYDFYPDRRHLSDEFYMLWAAQASHHTDVLTDELRDEIATIIFHQRPLKTPEVGLCLFTDETRIPSAHPLNQRRILLETVNALRITEPGIKGVPLSHENRDKIVHLLDNRKHTKSLSGMTLKLKALGKAIKLRPGQSFTLETANRDAIACDPVRASLSHSGRFGPNWSTLDWDTQWEVIQRIRAVQSDREHADLVNWLMSEHGLERDHAEATANAPLPEGYGRLGMTATTRIFETLEKNVCPYSEAVAVCGWHHSDGRTGEVLEELPYYGEILSRHVIPGTGVKTDDDITRYGRITNPTVHIGLNQLRRLVNRIITVYGKPDEIVVELARGLRLSEDQKRDVQRDIKKNTDAAIARGEKLEDIGVPNTGANRMVLRLWESLGDDVMTRNCPYSGKRISAGMLFDGSCDIDHILPYSRTLDDSFANRTLCLKEFNRQKTNKSPWEVWGETPQWGVIAANLKNLPPNRAWRFAPDAMTRFEDENDFPARALKDTQYLSRIARTYLDALYNGQDGNNHVWVVPGRLTEMLRRHWGLNGIEALSDSDAHTVKPKNRTDHRHHAIDAAVIAATDRSLIKRISDMAQRDEINGAEQVARSVAPPWEGFREDIAVQVQRIIVSHRADHGRIDPALRKSGKDSTSGQLHNDTAYGITRDGTVVSRKPLLSLKPSDITATTRGANIRDTDLQRHLARVTRGLDGKDFEQALSAFANTRELPDQTNNPYFGLRRVRLEETLQESARIEIADNKGKPFKAYKGDSNHCYEIWRLPDGKIMPQVVTTFEAHQLGVEKKPHPAAKRLLRVFKRDMVALERDGMVVVGYVQSMHVSNGLFIAPHTEANADARSRDKSDPFRFIQMSAAPLIKAKARRVYADEMGRLRDPGPRR

SEQ ID NO: 2663 - protein, 1084 aa, unidentified
  REGION 1..1084: note = Description of Unknown: Cas Enzyme sequence
MRLGLDIGTNSIGWWLYGTEGGRITEVVDGGVRIFSDGRDPKSKASLAVERRAARAQRRRRDRYLRRKAALMKRMAEVGLMPVDRAEAKALELLDPYELRASGLEGPLPFTHFGRALFHLNQRRGFKSNRKTDRGDNESGKIKDATARLDQAMMAKGARTYGEFLHMRRAAAPDAKSIPSVRTRLTVGQRDNAEKEEAGYDFYPDRKHLSEEFDKLWAAQARHAPEVLTDELRDEIATIIFHQRPLKTPEVGLCLFTGQHGVPERDKRIPSAHPLNQRRILMETVNNLKVTTRGDSSRPLTREERDQIVHALDNKKHTKSLTSMTMKLQALGKVINLRPEQSFTLQTANRDAIACDPVRASLSHPDRFGTRWSTLDWDRKWDVVQRIRAVQSDAEHADLVRWLMEVHGLDRDHAEEAAKAPLPEGYGRLGLTATARILAALESDVLTYSAAVAVCGWHHSDGRTGEMLETLPYYGEILERHVIPGTGDPNDDDVKRYGRITNPTVHIGLNQLRRLVNRIITVYGRPDEIVVELARDLKLSEDQKKDVQRDIKKNTEAAIRRGKKLEEMGVPNTGSNRMVLRLWEDLGDDVMTRSCPYTGKRISAGMLFDGSCDVDHILPYSRTLDDSFANRTLCLKEANRQKTNKTPWEAWGETEKWEAIAANLKNLPANRAWRFAPDAVERFEGENDFSARALTDTQYLSRIARAYLDALYDGGDDKSHVWVVPGRLTEMLRRHWGLNGVAALTDSGEQTVKAKNRTDHRHHAIDAAVVAATDRGLIKRIADMAKRDELNGAEDVARSVPPPWEGFRNDISAQVARIVVSHRADHGRIDPAARKSGRDSTSGQLHNDTAYGIGRNDTVVSRKPLVSLSPNDIAFTKRGANIRDIDLQKHLARVTRGLEGKAFEAALLAFAASPILPDNTDNPYFGLRRVRLEETLQESARVQVADQEGRPYKAYKGDSNHCYEIWRLPDGKIKSQVVTTYEAHQSDAEKKPHPAAKRLMRIFKRDMVMLERDGENLIGYVQKMKQNGSIFVAPHTEANADARDRDPKDDFKLIQLGAGSLVKAKARRVIVDEMGRLRDPGPPV

SEQ ID NO: 2664 - protein, 1078 aa, unidentified
  REGION 1..1078: note = Description of Unknown: Cas Enzyme sequence
MSASYRLGLDLGTNSIGWFLYGLNGDDVDSVIDGGVRIFSDGRAPKSGASLAVDRRAARAQRRRRDRFLRRKAALMKRMAEVGLMPSDPGEAKELERLDPYQLRAEGLDSTLPLTHFGRALFHLNQRRGFKSNRKTDRGDNESGKIKDATARLDQAMIAKGARTYGEFLHMRRAAAHDPKQVPTVRTRLSVARRDNADKAEAGYDFYPDRRHLSEEFQKLWAEQAQHHDVLTDELRDEIGLIIFHQRPLKTPEVGLCLFTNEKRVPSAHPLNQRRILFETVSALRVAARGEPSRTLTRDERDQIIHALDNKKPTKKLSDMVMKLKALGKVIRLRPEQSFTLETANRTALKCDPVRASLSHPERFGPRWSTLDNDTQWEVVRRIRAVQSDSEFTDLVGWLVEDHGLDRDHAEATANAPLPEGYGRLGLTATMRILSALKADVLTYSDAVGACGWHHSDGRTGMVPKNLPYYGEILDRHVIPGTYDEKDDEITCYGRITNPTVHIGLNQLRRLVNRIITVYGKPHQIVVEVSRDLKLSEDQKRDVQREIKKNTDAAIARGEKLEEMGVPNTGANRMVMRLWEALGEDVMTRNCPYTGKRISAGMLFDGSCDVDHILPYSRTLDDSFANRTLCLKEANREKTNNTPWEVWGDTPQWDAIAANLKNLPGNKAWRFAPDATERFEGENDFSARALKDTQYLSRIARTYLDALYDGGDGKSHVWVVPGRLTEMLRRHWGLNGLTALTDNDKQTVKVKNRTDHRHHAIDAAVIAATDRSLIQKIAMIAKTGELAGAEEVARSIDPPWEGFREDIGAQIARIMVSHRADHGRIDPALRRKGRDSTAGQLHNDTAYGVVDGNTVVSRKPLLSLKPRDIAVANVRDADLQRHLERVTRGLDGKEFEKALSDFAAAAKLPDGSPNPYQGLRRVRLEERLQKSARIEVRDQTGKSFKTYKGDSNHCYEIWQLPDGKIKAQVVTTFEAHQPGLEKKPHPAARRLMRAFKRDMIKLERDGETVTGYVQQLSPANGLSIAPHTEANADARNRDDTDEFKFIQMRAGPLIKANARRVYIDEMGRLRDPGPAKLR

SEQ ID NO: 2665 - protein, 1100 aa, unidentified
  REGION 1..1100: note = Description of Unknown: Cas Enzyme sequence
MSHQSLSLSNKLFSFDIGTNSIGWCVFVLDEMGVPSAIRDIGVRIFSDGRDPQSNASLAVARREARSMRRMRDRYKWRRKKTVSVLVEYGLQPEDETERKRLVAETSDQKPDSDAAKIDPYNLRRRALTEKLPLYHIGRAFFQLGQRRGFKSNRKTDRKSNEKGKIAVGVEELAARIRAAGAQTLGAYLAMQRDQGRVIRIRQGSEAFAPSKKDPSVLSDDYAVYPERAMLEDEFDKIWDAQAKFYPDILTQARKEHLFKVIFHQRPLKKPKVGKCSFNPKEERLPKAHPLFQEFRLYKEVNELGVRMPDMSVRKLTLEERDTLIWQLRQKTNKQKKYNFTSLRTALKLPTSTTFNKESKNRTDMAGDEVYITMADDKLFGNRWSKFSREKQWEIIAKLREEENPEILKQWLRDTLGLTDEEQVEAIADASLPDGYGRLGHTALSSMLEELKAEVIPEAEAARRCGYNHALFNSEHEGLDELPCYQEILERHILPGTGDENDAYDIRKGRITNPTVHIGLNQLRKVVNRLLQKHGKPAKMVVELARELQLSDKQKDERNKEIGKNTRAAEMRSQKLQECGQKDNGYNRLLLKLWEELNEKPEDRICIYSGRPITVEMLFSGVVDIDHILPWSKTLDDSQANKIVCLKEANRQKGNRAPAEVTEWIGHYDEILARAKNLPKNKSKRFAHDAMKRFEDEGGFLARQLTDTQYLSRMALEYLSALYPAKEPDENGELKNRKHVWVVPGRLTEMLRRNWGLNDILADAKITDTNKPKNRNDHRHHAIDAAVIGVTSHALLQRISTAAAKMEEADLENLITKIVKDTPPWPSFFADLKEAVNGIIVSHKPDHGTVSRTGYAEGKGQTSGRLHEETAYGLTGRVDNKGNTIVVWRIPFLSLKAKDIANIRDENLQGEVYSAVNGLKDGKAFEEALRYFQQNHKCYKGIRRVRVTGARNVIEIKNTAGRAYKGYRGGDNYRYNVWQTLDGKWYSEVVSTFDIHQPGWKSEFHAQNPTAKKILSLQKNDMVAYDHPEDGYTVARVVKFGQNGQIFFAAHNEANVDKRNSDKNDLFNYLSKTANPLKAINCRQVRINEIGQVFDPGFKT

SEQ ID NO: 2666 - protein, 1100 aa, unidentified
  REGION 1..1100: note = Description of Unknown: Cas Enzyme sequence
MITLGIDLGTDSLGWCLIETVGEPLETQQGSIIAIGARIFGDGREPKSGASLAVDRRAARAMRRRRDRYLSRRAALLRTLTEYGLMPADEEARRQLVRDTNDGRSKNGGPRAPGKSGDMSASVHGLRARALGEKLTPHQIGRVLFNLNQRRGFKSNRKTDRRDNDQGKIEVGVNRLDKAMLDAGAQTFGQFLHARRLEGKSIRTRLRPETGEDARGDGYDFYPLRAELEREFDRVCMAQARYHPDLLDDERIAHLRAIIFYQRPLKPVVAGRCSYNPDETRLARTHPLFQAFRLYKEVNELALVGEDQQARKLTTEQRDTLVHKLRSAKTASFASLRKALRLGPEFRFNKESETRTGLLGDEIHVAMSDKKCFGNRWSGFSIDKQWEILSRLRDEEDFVTLREWLVEQCGLDAEQASAVAKVSLPEGFGRLGATALAALTDALKNETDEDGAVITEAEAARRCGYDHSDKGDRNFPGYEALPNYQEVLERHIPPGTGNPDDVYDIFKGRITNPSVHIALNQLRRVVNALIRRYGKPDRIAIELGRELKLSDRQKDEIDRKIRKNTRDAEERSTKLAELGQPDTGYNRLRLKLWEELNRDQPLNRVCIYSGEPITAAMLFTAQVDVDHILPYSKTLDDSEANKILCLTAANRQKRNRAPAEIAEWASRYDEVLARAGSLPRNKSWRFARDAMEKFADQEGFLARQLTDMQYGARMALTYLASLYPTEEADAEGVLRKHSRVRALPGRMTEMLRRKWGLNELLPDHNIGGGDPVKEKNRKDHRHHAIDAFVIACTSRSLIQKIATASAALEKEGAERVVAKIADPWPGFREELRFKVNAALVSHRPDHGTVSHGGGQTAGKLHNDTAYGLTGEKDGKGNDLVVSRKPLSAFKAAKDLDGIRDRQLREALQEATYGLSGRDFEQAVHPLAAQERLEGKPNPFRNLRHIRVIEPLKTIPIRDEAGRAYKGYKGDSNHRYDVWRLPDGKWVSEVVTTFDAHQPGWQSAVRQQYPTAKKMLSLKQDDAVAADGNGERIIYRVVKFNTAGQIYLAAHNEAGALKARDAEPNDPFKYVSKAASGLKAINARQVRVDEIGQLFDPGPRG

SEQ ID NO: 2667 - protein, 1088 aa, unidentified
  REGION 1..1088: note = Description of Unknown: Cas Enzyme sequence
MLSKQPALFAYDIGTNSIGWCVFRLNAKGEPIAIADAGVRIYSDGRDPQSKTSLAVARREAKAAARRRDRTRRRQKATLRALVEYGLMPEGKAERELLLRDTSDGAGANAPANDPLNLRARALIEKLPLHHIGRALFHLGQRRGFKSNRKTDRRDNDKGKIAIGIDRLRDAMHEAKAETLGVFLAGRRAQGLHVRLRAGSSVILDDGYDFYPVRSLLEEEFRRIWEAQAAYYPDILTEARGEHLFKVIFYQRPLKKPRIGSCTFNPAEQRVAKAHPLFQAFRLYKEVNELEIVAPDLSQRKLTLEERDKLVLRLRGARKATYKALRKELKLTPDMRFNKESENRVDMAGDEVAAALSGKDLFGPRWNALSIDAQWEVVERIQEEENPLVLHHWLVETHGLSDEAAEAVAGCHLPEGYGRLGHTALSAMLAELKAEAIPEAKAARRAGYNHSYFGIGEIFDELPKYQEVIARSIPPGTGNPEDGYDVEKGRITNPTVHIGLNQLQRLTNALIRRFGKPAEIAVELARELKTNDKKKAEINRRIGENTRAARQRSEKIAELQKEDPALVDNGYNRLLLKLWEELNVAKPEDRVCIYTGKPISISMLFSGAVDIDHILPYSRTLDDGQGNKLLCLREANRVKRNRAPAEVTEWADRYDEILERANRLPKPKRWRFARDAMAEFEANSGFLDRQLTDTQYLSRLAREYLCSLYPDQGEQWRVRVIPGRMTEMLRRNWGLNALLPDHNYSDAKNRNDHRHHAIDAAVVGVTTRSLLQKIATEAGQREEQELEDVVKGVPLPWERFRDDLHQALDNIVVSHKPDHGTIGPDARGRGRTAGKLHNDTAYGLTGEVDAKGNTIVVRRKMLLSLTDKDIPAIRDNELRARLHSVAGGLSGKELQQALLDFARNDPQYAGIRRVRVTEALSVIPIRDRDGHVYKGYKGDANYRYDVWELKDGKWQSEVISMFDAHQQGWESPLRKANPTARKVLSLQQNDMVAYDHPTEGYTIARVVKFGNSGQIFFARHNEGGSLKARDADRDDPFKYFSKSANGLREIKARQIRVDEAGYISDPGPRDRENREGNQELISRSKISI

SEQ ID NO: 2668 - protein, 1109 aa, unidentified
  REGION 1..1109: note = Description of Unknown: Cas Enzyme sequence
RLQENFTPVKMAFFGTWMNMNDLLFSFDIGTNSIGWCVFALDEAGEPCRIVDLGARIYADGRDPQSKTSLAVARREARAMSRRRDRYLRRRKAMLRTMIEYGLMPADKAGQEAVLRETGDREGDDESFNPYALRARALTEKLPPSYIGRVLFHLGQRRGFKSNRKTDRRDNDKGKIALGIDELKAAMHRSGSPTLGAWLAMRRAEGHPVRLRAGSEVFDAEGYAFYPERSLLEDEFCQIWDAQAVYHPDMLTPERRAHLFRVMFYQRPLKKPLVGRCSFNPAEARLSRAHPLFQEFRLYKEVNDLEVVLPDQGHRKLTLDERNALVTKLKSSRKASFSVLRRTLKLTPDLAFNKESEARKELLGDEIYSVLADAKMFGARWGGFPRTRQWEIIVRLKEEEDPARLSGWLKSEFGLDDARVAAIASASLPEGYGRLGETALASMLEEMKAEVIPESEAAERCGYDHSNLAKEHDEGLDILPEYQEILERHIPPGTGDPDDIYDIRKGRITNPTVHIGLNQLRRVVNALMDRHGKPRHIVVELARDLQLSEKQKADVNRRIAKNTREAEARSQKLIEMGQLDTGYNRVLLKLWEELNQDKPEDRICIYSGKPIGIAMLFSGEVDIDHILPWSKTLDDSQANKLLCLKSANRQKRNRAPSDVPEWQDRYEEVLARAARLPKNKRWRFAADAMQQFEAQGGFLARQLTDTQYLSRMALEYLSALYPSEEADKWGELRQRKRVHVVPGRLTELLRRNWGLNMLLPDHNLGEMAQEKNRKDHRHHAIDAAVIGVTSRSFLQRMSAAAARLDDVAFDDLVRTVVKDNPPWPGFREDLLATINRVTVSHKPDHGTVSRTAYLQGKGQTAGKLHNDTAYGITGQQDTKGSPLVVRRKPFMALEAKDIASIRDAELQSALYGAIGSLTEKKALQEALVRFRDTHPQFKGIRRVRMLEALSIIPIADGAGKLYKGYKGDANYRYEVWETLDGKWHTEVVSMFDAHQPGWQSPFHKQNPAARRVLKLQQNDMVAYEHPGDGYTIARVVKFSNDKRIYFASHRESGSLKTRDADKGDPFTYFAKANNGLRDIKCRQVRIDAAGRVFDPGPQDRESRQANGRA

SEQ ID NO: 2669 - protein, 1116 aa, unidentified
  REGION 1..1116: note = Description of Unknown: Cas Enzyme sequence
MTIFPFLRLLSASPNARITGMIWQNTLFSFDIGTNSIGWCVLALNDRDEAIRIIDIGARIYSDGRDPQSKTSLAVARREARAMSRRRDRYLRRRKAALRTMADYGLLPADKDVQKALLAETGDKRAGSGLPSLNPYALRAKALDEKLPLFHIGRALFHLNQRRGFKSNRKTDRKDNDKGKIALGIDELRAEMHRAKALTYGAWLAARREAGHVVRLRAGSEAMTESGYAYYPERKLLEDEFDAIWDAQATHYPDILTPERRAHLFAVMFYQRPLKKPRVGKCAFNPLEERLAKAHPVFQEFRLYKEVNELELVLPDQTQRKLSLEERDTLVKLLRAKKEVGFKALRSALKLDPDLRFNKESDAREKLKGDEIYSALSDKKRFGPQWAGFPLEKQWTIISRLRDEENPEALFAWLKEDFGFEGERAEAVANTPLPDGYGRLGETALASMLDALKEAVIPESEAAKRCGYDHARLGFESEDGEPCLPPYQEILERHIPPGSGDPEDIYDLRMGRITNPTVHIGLNQLRRLVNLLIARHGKPKFITVELARDLQLSEKQKADHNRTIAKNTREAEARSRLLLEMGQQDTGYNRVLLKLWEELNPGKPEDRCCIYSGKVISAQMLFSAEVDIDHILPWSQTLDDGHGNKILCMKAANREKRNRAPADVTEWNGARYDEILARAARLPQNKRWRFAPDAMQKFEKDGGFLARQLTDTQYLSRMALEYLNCLYPSEEADKYGVLSPKRHVRVSPGRLTELLRRNWGLNNLLPDSNLGEMAQAKNRKDHRHHAIDAAVIGVTTPSLLNRISGAAGRLDDVDFEDLVRKIVKDTPPWPNFRDDLQKAVNSITVSHKPDHGTVSRKGYADGKGQTAGKLHNDTAYGLGTDKNGNAVAVRRKAFLSLEPKDIPAIRDEDLRMALHEAIGGLSDKKAIQSALMMFRDAAPTAFKCIRRVRLEEKLQVIPIHDAEGRAYKGYKGDANYRYDVWETLDGKWQAEVVSMFDAHQPGWQSTFHKDNPTARRVLSLQQNDMVAYKHPKDGYTIGRVVKFTVDGRMYLVDNKESGSLKARDTDKNDPFKYLVKSANGLKEIACRQVRIDVAGRVFDPGPQDRESRSKRKKSTA

SEQ ID NO: 2670 - protein, 1080 aa, unidentified
  REGION 1..1080: note = Description of Unknown: Cas Enzyme sequence
VQPYRLSIDLGTNSIGWCLLNLDRDDAPREIRALGSRLFSDGRDPKDGTSLAVARRLARQMRRRRDRYLVRRARLTAALIRFGLMPADRNARKRLEVEVDPYSARERGARERIEPFELGRALFHLNQRRGFKAVRDATKTDEDEGKVKAAVERLDQLIRETGAPTLGAWFAWRKAREETIRARLTGKGRDAAYPFYPSRRMLEDEFDALWTEQTRHHPDVLTEDARKTLRHRIFHQRPLKPQPVGRCALYPDDQRAPRALPSVQRLRLYQELGNLRITHLDLSERPLTPAERDLIAGTVLGFPVKPARKAPKIMAEIAFDKLRALLDLPVGARFSLESEKRSKLLGDETGARLSRAFGPGWGALPLSEQDAIVEVLLGETDPDKVLETLKARWNVDEAAANALAATKLPAFHGQYGRRAVSELLPVLERETRTDPGGRVRPIRIDEAVKDLRGGKDHSDYSRDGDTLLDALPYYGEALERHVAFGSGDPADPDGKRFGRVANPTVHVALNQLRMLVNAVIERHGHPAEIVVELARDLKRSAEERKKEDRRQADNQKRNEERKRLILSLGERPTARNILKLRLWEEQGPPEARLCPYTGSPISIGMLLSARVDIDHILPFSRTLDDSAGNKVVCLSEANRGKSNKSPWEAFGPSPEKWAEIVARAEVLPKNKRWRFAPDAMEKADAEGGFLARHLNDTRYLSRLAVEYLELVAPRVRVSPGRLTALLRRRWGVDEILAVEEERPAADATDAPDVKKNRGDQRHHALDAAVIGCIDQGMVQRLHTAAAKTEREAAAREENIRRVLADCEAPWEGFRAELERRAASIVVSHKPEHGVSGALHKETAYGPVEPAEEGYNLVARKPIDGLSKDEIAAVRDVRLRAALEARLEARRRDSNDPVQALVKAAADLGAMPASKGIRRVRVLKKEANPVRVVHGDGAHQKLVLAGDVHHVDIAVSADGRKWVGHWSTLFEAHKTRTADGRAAPPRPDAGERFVMRLHKGDYLSLEHLGRRRVVLVAKLVPSSESVVVIEPHHVRTDTTKQVKISCNQLRVRGAKRVTVDVLGRVRVHAPGSRTGVPRADE

SEQ ID NO: 2671 - protein, 1078 aa, unidentified
  REGION 1..1078: note = Description of Unknown: Cas Enzyme sequence
MRLGLDIGTNSIGWWLYETDGSEADAPIVSVIDGGVRIFSDGRDPKSGASLAVDRRAARAMRRRRDRYLRRRATLMKVLANAGLMPADPAEAKTLEALDPYELRATGLDAALPLAHLGRALFHINQRRGFKSNRKTDRGDNDSGKIKDATARLEQAMMASGARTYGAFLHMRRQRATDPRNVPTVRTRLSIAKRDGADGKEEVGYDFHPDRKHLEEEFHKLWTAQASYHPELTNELRDLVFEKIFFQRPLKEPKVGLCLFTAEERLPKAHPLTQRRVLYETVNQLRVTADGREKRPLTVEERDQVIHALDNKKHAKKAPMSATNGPTLTLKHLAEKVLRLPDGQRFTLETGVRDAIACDPVRASLSHPDRFGPRWSTLDADAQWAVISRIRRVQSDADHADLIDWLTQTHGLDRDHAEMTAKAPLPEGYGRLGLTATTLLLDVLTAGVVTYSDAVAACGWHHSNQRTGECLDRLPYYGEVLDRHVIPGTYNEADDDITRYGRITNPTVHIGLNQLKRVVNKIIEVYGKPDQIVVELARELKQSEQQKQEAMKRIRDTTVAAKKRSKKLEELGYEDNGRNRMLLRLWEDLNPDDCMRRFCPYTGKRISAAMIFDGSCDVDHILPYSRTLDDSFANRTLCLKEANREKRNQTPWEAWGGTPKWDAIEANLKNLPDNKRWRFAPDAIARFEGENDFLARALVDTQYLASISRTYLDTLFTEGGHVRVVPGRLTEMLRRHWGLNSLLSDAKRGAVKAKNRTDHRHHAIDAAVVAATDRSLLNRISRAAGQGEEAGQSAELIARDTLAPWDGFRSDLEVQLGRIIVSHRADHGRIDKEARKQGKDSTAGQLHQETAYSIVDDMHVASRTDLLSVKPAQLLDEPGRSGQVRDPQLRKALRVATGDKTGKDFENALRDFAAKPGPYQGIRRVRIIKPLQEQARVSVPAQVPIKAYQGGSNHVFEIWRLPDGRIEAQVITTFEAHSMEGEKRPHPAAKRLLRVHKGDMVALERDGRTVIGHVQQMHIKNGLFIVPHNEANADARNSDNTDPFKWIQIAARPAIAAGIRRVAVDEIGRLRDGAVRPG

SEQ ID NO: 2672 - protein, 1081 aa, unidentified
  REGION 1..1081: note = Description of Unknown: Cas Enzyme sequence
MRLGLDIGTNSIGWWLYETDGQGASARIIGVIDGGVRIFSDGRDPKSKASLAVDRRAARAMRRRRDRYLRRRATLMKVLAKSGLMPADPTEAKALELLDPYTLRAKGLDEALPLTHFGRALFHLNQRRGFKSNRKTDRGDNESGKIKDATQRLDWAMHEAKARTYGEFLHMRRQRASDPRHVPTVRTRLSVAARGGPDAKEESGYDFYPDRRHLEEEFQALWEAQSAYHPDVLTDDLRDLVFEKIFYQRPLKEPEVGLCLFSGYDDIPSKERRLPKAHPLTQRRVLYETVNQLRVTADGRETRPLTLEERDQIVHALDNKKPAKSLSSMNMTLKALSKVLKLRDGERFTLETGVRDAIACDPVRSVMIHPEAFGPNWSKLDWQAQWEVISRIRKVQSEDEFADLVNWLIERYGLDAEHAQKTANAHLPEGYGRLGLTATQRILDRLKAGVLTYAEAVAACGWHHSDQRTGECLDTLPYYGEVLDRHVIPGTYDEKDDEITRYGRITNPTVHIGLNQLRRLVNKIIEVYGKPDQIVVELARELKQSKAQKEADIKRIKETTSAAKKRSETLKEHGLKDTGYNRMLLRLFEELGPTIGPRCCPYTGEVITATMVLNGECDIDHILPYSRTLDDSFANRTLCLKEANREKRDQTPYEAWGGNAGRWAIIEANLKNLSDSKKWRFGPDAMERFEGESDFLDRALVDTQYLAKISRAYLDTLYTEGGHVWVVPGRMTEMLRRHWGLNSLLSDKDRGAVKAKNRTDHRHHAIDAAVVAATDRSLINRISKAAGLGEKAAQSAELIARDTPEPWEHFRSDIAIQLEKIVVSHRADHGRIDIEGRKSGRDSTAGQLHNDTAYGIVDDMTVVSRTPLMSLKPSDIEVTTKGKNIRDPQLQKALSVATKDKEGKAFEEALRQFAAKEGPYQGIRRVRLVETLQRSARVEVGQTEKGTPLKAYKGDSNHCYELWKLPDGKVKPQVMTTFEAHAGIEKRPHPAAKRILRIFKKDMVALETNNETFICFVQKLDLANGLFLAPHKDSNCDARHRDKTDPFKFLQMGAGSLVKANLRRILVDEIGRVRDPGPPKV

SEQ ID NO: 2673 - protein, 1073 aa, unidentified
  REGION 1..1073: note = Description of Unknown: Cas Enzyme sequence
MRLGLDIGTNSIGWWLYETDGKDTAATITRVIDGGVRIFSDGRDPKSGASLAVDRRAARAMRRRRDRYLRRRATLMKLLARTGLLPADPAEAKQLERLDPYELRAKGLDEALQLTHLGRALFHIDQRRGFKSNRKTDRGDNESSKIKDATQRLDWAMHDAGARSYGEFLHMRRSRAEDPRHVPTVRTRLSIAVRGGPDAKEEAGYDFYPDRRHLEEEFNLLWETQAQHHPDILTDDLRDVVFEKIFYQRPLKEPEVGLCLLSSEKRLAKAHPLAQRRVLYETVNHLRVTADGRETRPLTREERDTLIHALDNKKPTKSLSAMTMTLAALGKLLKLPDGERFTLETGVRDSIACDPVRASLTHPDRFGPRWSTLDWEQQWNVISRIRAVQSDAEFVALVDWLQQEHGLDADHAARVADAPLPEGYGRLGLSVTKALLEKLKADVITYSEAVAALGLHHSDQRTGEDLRYLPYYGEVLDRHVIPGTYDAKDDEVTRYGRITNPTVHIGLNQLRRLVNKIIEVHGKPDQIVVELARELKQSEAQKKLDIQRIKDTTADAKRRSAQLEELGVADNGNNRMLLRLWEDLGPAVGPRCCPYTGKTISLTMVFDGSCDVDHILPYSRTLDDSFANRTLCLKEANREKSNQTPWEAWGNDKTRWDAIDGNLKNLPDNKRWRFAPDAMERFEGEKDFLDRALVDTQYLARISRTYLDTLYTEGGHVWVVPGRMTEMLRRHWGLNSLLSDASRGAVKAKNRTDHRHHAIDAAVVAATDRSLLNKISKAAGQGEEAGQSAELIARETPPPWEGFRADLEHRLNSMIVSHRADHGRIDREGKKHGHDSTAGKLHNDTAYGIVDESTVVSRTPLVSLSPGDIEITTKGKNIRDPQLQKALAVATKGKEKKELEVALRAFAEKPGPYQGIRRVRLIESLQQSARVEVGQDERGAPLKAYKGDSNHCYELWRMPDGKVKPQVVTTFEAHAGIEKRPHPAAKRVLRVFKRDMVALERDGETMICYVQSMHIANGLYLAPHREANADARNRDKTDPFRFIQIGVAPLIKAGIRRVLVDEIGRLRDPGPPR

SEQ ID NO: 2674 - protein, 1078 aa, unidentified
  REGION 1..1078: note = Description of Unknown: Cas Enzyme sequence
MRLGLDIGTNSIGWWLYATHEGTITSVIDGGVRIFSDGRDPKSGASLAVDRREARGQRRRRDRFLRRKAALMKRMAAVGLMPVDPAEAKALEVLDPYALRAEGLDQALPLTHFGRALFHLNQRRGFKSNRKTDRGDNESGKIKDATARLDQAMMAKGARTYGEFLHIRRSAAPDAKQVPSVRTRLTVARRDHAEKEEAGYDYYPDRRHLSEEFNKLWTAQSRHTPNILTDELRDEIGLIIFHQRPLKTPEVGLCLFTDERRIASAHPLNQRRILLETVNALRIAALGEPKRNLTREERDHIVHALDNKAHTKSLAGMAIKLKALGKVIKLRPDQTFTLETANRDAIACDPVRASLSHPDRFGSRWSTLDADAQWDVIQRIRAVQSDSEFQALVDYFMGDHGLDCDHAEGAANAPLPEGHGRLGLTATTRILASLEADVIPYSAAVAACGWHHSDGRTGEVLNELPYYGEILERHVIPGTYDAKDDDVTRYGRITNPTVHIGLNQLRRLVNRIVTVYGKPDEIVVELARDLKMSEDQKRDVQRDIKKNTDAAKARGVKLVEELGVKDTGANRMRIKLWEDLSTDVMHRKCPYTGKQISAGMLFDGSCDVDHILPYSRTLDDGFANKTLCLKEANRQKTNKTPWEAWGDTGQWDAIAANLKNLPANKAWRFAPDAMERFEGENDFSARALKDTQYLSRIARSYLDALYDGGDRKSHVWVVPGRLTEMLRRHWGLNGLTALTDSEAQTAKAKNRTDHRHHAIDAAVVAATDRSLIQRISKMAGRDELEGAEQVARSVAPPWEDFRTDIGAQIAKIIVSHRADHGRIDPVARQSGKDSTSGQLHNDTAYGIKGGSLVVSRKPLMSLKPNDIAISTRGANIRDVDLQRHLQRVTDGLDGKAFEAALSDFAAAETLSGGAENPYFGLRRVRLAETLQETARVEIKDQAGKPFKAYKGDSNQCYEIWRLPDGKIKAQVVTTFEAHQTGTDKKPHPAAKRLLRVFKRDMVRLERDGETVLGYVQKLDLANGLFIAPHTESNADARNRDKDDTFRFIQMSAGPLIKANIRRVVVDEMGRLRDPKAPR

SEQ ID NO: 2675 - protein, 962 aa, unidentified
  REGION 1..962: note = Description of Unknown: Cas Enzyme sequence
MPTDPADRQRVARIDPYALRANALRRRLTPAEFGRAIFHLNQRRGFASNRKLDRGNEEKGKIAEASGRLKTELSRAGAPTLGVWLAERHEARQHVRARLVGQGAKASYDFYPTRDLLMAEFTAIWAAQAAWDPSLTDARRERFCRIIFHQRPLRTPPRGRCWLEPGEFRADRGLPLTQRFRIAQDLAHLRLGEPGMPQRNLTSRERGVLVAKLHRGEEISADKLRKLLGLSATTDLNLRGAGADALKGDETAKRMGGVKGVGKAWHDLPPDVQDRAAQIILDEQEEQAAIAALEALGIERNAAARAVDVTLPDSTASLSAKAMARILPHLEKEGATYDKAVQAAGYAHHSDDRTGEIRAALPYYGEVLFDRIGTGSGDPAHETEKRFGRAPNPTVHVALNQLRHVVNALIARHGPPAQIVVEVLRDLGRSAEQRREVEKEQRTNREANDRRRALLAERGVKVNAANLMRLRLWEEQSRDGDPKERRCPYSGELIGMERLFSAEIEEDHILPFALTLDDSAANRVLVTREANRRKSRQTPHQAFGNKAAEWEAILQRAALLPKQKAWRFSPDALIKWQGEHKDFLARHLTDSSYLARLARFYLRIVCDPDQVWCVPGRLTALLRAKLGLNSLIGKGGAMKDRADHRHHALDALTVGLIDRGLLQRVTRAAKQAEESGRRLIDDLPEPWPGFVAAAREAVERVVVSHRPDHGTAGKLHNETAYGAVRGAEYGGPNVVVRKPIASLAAWSPADAQAHVRDPLLAARIAEALGASDAKTRQNALADMRDAAGANVRRIRTWERLEGTKAIADRATRKTYRVVKLDANHRVEFWRLPAIDGKPGRVVMQAVPLFNAAADAEAKRLGRPVADRRPHPAARLMMRLHKNDMVAFGVGAERQILRVVKFRSNQVNLAPHNEAGNLKARDADKADSFKYVNASIVSLARAGARKVYVSASGQVSDNGPLLW

SEQ ID NO: 2676 - protein, 1043 aa, unidentified
  REGION 1..1043: note = Description of Unknown: Cas Enzyme sequence
MNYRLALDVGANSIGWCALDLGADGAPRGIIGTGVRVFPDGRDPKTLSSLAAERRLARSMRRRRDRYLQRRRALMNALIRYGLMPADEGERKLQASLDPYVLREAALHRQLAPTELGRVVFHLNQRRGFQSNRKMDRANEEQGKIANAADRLKTEIARGGHATLGAWLAERHARRAEVRARLRGSGAKAEYPFYPTRDLIAEEFDAIWTAQSAWNPALTAVGREHLRRIILFQRPLKDPAVGRCGLEPDELRAPRALPSTQAFRISQDLANLAIRRAGEPDARLTAAQRNTLYELLLSGKDLSFDRMRRLLKLGDDASFNLEGPARDGIAGDQSAARLAGKNRPLASIWPELSLFERDAIVQALLDADISETAIDALIALGLPAEAAAASERVTLPDGHGSLSSKAVHAILPHLEAGLRYSDAVLAAGYPHHSDDRDGVIHERLPYYGEVLAERLGTGTGRPGDGPERFWGRVANPTVHVALNQLRRIVNAVIERHGPPTEIVVEVLRELGRSAAERRSVEKEQAENRRRREGWARKLQELGVPANGRNLAFMRLWEEQAKDPKDRVCPYTGERISVERLLSGEVEEDHILPFALTLDDSFANRVLVMREANRRKARQTPHDAFGSSSEWPDISARARLLPSAKAWRFAPDALDKWRGEHKDFLARHLTDSAYLARLSRLYLRAVCDPVWLVPGKLTALVRDKLGLNASTVLGKGGVRKDRTDHRHHAVDALVVGLCDRGLLQRVATAARRAEERGRRLLDDLPEPWPGFVAEASQKIRAIVVSHKQDTAPQGRLHNDTAYAEIPSSGPRLANVAHRVPVASLTGWTPEKTAAAIADPRLRAHIDAALAAGDKTKQAAALAVIPHDAAGTVVRRVQVAERLDGTAAIADRRTGRPYKRVKLDANHRAEFWKLPSRGPKAGEVAMLVVPMLEAARAAEARRLGRQTPDTRPHPAARLLMTLHKDDIVAFGLGAERRFLRVVKFRDGQVNLAEVHEGGSLKARDADKSDTFKYVNASVSRLRTEHARKIFVDAAGRVRDLGSLNW

SEQ ID NO: 2677 - protein, 1064 aa, unidentified
  REGION 1..1064: note = Description of Unknown: Cas Enzyme sequence
MKYRLGLDIGTNSIGWAVIRLNGDDQPVGLQDAGARIYSDGRNPKDKQSLAVARRAGRSMRRRRDRFLRRRRKLLRLLKQYDLLPIDEVGGDRIFDPKLHDPFEIRARGLDEQLSLHELGRAIFHLNQRRGFQSNRKSDKGEEAETGKIKSAIGRLHAAIENSGARTLGEYLHKRRTEGQPVRVRMRPLEQAEGKKPEDGYDFYPDRELVKAEFDALWQAQAKVHPDTLNYEAYNAISDVLFFQRPLRPVRPGKCTFNPEEERLPKAHPLSQRIRIFQEANNLRVIDQDLSVGPPLSREDRDVVVLALRSKASQTFGQLRKVLKISNRTRFNLESDNRKKMDGDITTAVLSDERRIGPQWAALPQERQIEIVHRLLNEQDEDALIVWLMAELKLSEAQAKATANAPLPDGYASLGPTATRDILAELEKDVVPYSTACERAGYHHSDFRTGEVHDSLPYYGAILERHVAFGSNDPADSEEVRLGRLANPTVHIGLNQLRRLVNALIRTYGRPRQIVVELARDLKLNKKQKEQLNKRLKENTDRAERHRKKLDELGLPDNGENRMRLRLWEELNPGAPNDRRCPYTLERIGIEKLFTADVDIDHIIPFSRSLDNSAANRTVCIARANKAKGNKTPAEFLSHMPAWEEILANAQSLPHNKAWRFAANAMERLEKDMDFIDRQLTDTQYLSRIAGEYLQALYSEKGQSNVWVTPGRLTAMLRRYWGLNSILTGHNLEEPDNPAKNRDDHRHHAIDAIVVALTDRSLLNRMSREAGQAEDMDQELMADVPKPWDSLRDDVMSVMDRIVISHRPDHGSSSGRGRAEGFNQTSGRLHNDTAYGIVSGPDKRGAYAVVHRVPFDSLAKIGDIEAIRDEYLKKELLEAVYGLDGKAFKEALLQFSAEHEVFRGIRHVRIVETLSIIPVKDKAGRPYKAYKGDSNDRFDVWRLPDGKWVSEIVSTYDANQTGYRSPVRQENPTAKKVLSLKRGDILAWEDDNGNRKLIRVVKYSTIGTMQLAAHNEAGNLKARDSDKSDIFRYINTSASGLQKHNARQVRVDELGRVFDPGPRF

SEQ ID NO: 2678 - protein, 1091 aa, unidentified
  REGION 1..1091: note = Description of Unknown: Cas Enzyme sequence
MAISYRLGLDLGANSIGWCAVKLDGQGSPYGVLDAGVRILTPNDEAGRDPQSKASLTANRRTARSMRRRRDRFLRRRKRLMTLLIDNSLMPEDEQERKALERLDPYWLRAAALDQRLDAHEVGRVLFHLNQRRGFKSNRIADTDDSEKSATRDGMRDLEQALCKSGARTLGEFLAKRHRRDKDGHRLLQNGKAMAPEAVRFRPSIQGTRNLYDFYPSRDLIAAELTQIWETQAAHHECLTPELFDKLKRVILEQRPLKKPLVGRCTLRPDAQPVRQYGIDLDLDLGERAPKAHPLFQRFRILQDVAQLRVVLPGMPERPLSLPERDMVAAYLMNHGGSTIELKKLRSAADLPDNARFNYEQSGRVNLPPDQTAAKLAAKKAFGKRWRALPRERQIEVVERLLAVADDVELTDWLRKEHGLSDAEAETVSTIRLPQGHGKYGRSALADLVQEMEKQSKEAEDPNTGEVYERPLTCGEAVAALSRHHSNLRPEEKSTRLPYYGEALVRHVVSLPAAPEGSQERIGRVPNPTVHIGLNQVRRLVNALINKYGRPQSIAIELARELKLSKTRKAEIQKENKKNEQKNIERRERLANLRIRDTHDGRLRLRLFDELPCGNRVCVFTGKPLSTDKLFDGTIEIEHILPYSRTLDDSFMNKVLCMREANRRKASRSPAEAWSGDELQKIVERAAQLFPKKAWRFQPDAMSRFGDNSDFLARHLTDSQHMAVLAKAYLEHVCRDVQTLPGRLTAMLRARWGLNTLLPYHNYTGTNQKNRKDHRHHAIDAFVVACTDRGLFKRIEQAAGRDEKLNLGRLFPKGSFPDPYDDYRNDLEAFLNNIIVSHKADHGLPPSGPFNRHATSGQLHKETAYGIVEEEINGKRYNLVTRKPVEALTRKEIDSVRDDALREELRKVDDDAKQAGQEWHKARDNFAKRAGIRRVRVLMTNQSVCEVRHGSAFTKAYIPGDNHCVELFELPDGSWSGEGVTVYDAHQPSYAPAWRREHPDAKLVMRVHKGDLIEANFGEGTEIYRVFRLEPTAKRFRLAAHNEAGSMASRHGDPDDPLRWLFATWKKLQGAAAKRVRVDILGRVTAACDAP

SEQ ID NO: 2679 - protein, 1088 aa, unidentified
  REGION 1..1088: note = Description of Unknown: Cas Enzyme sequence
MRYRLGLDLGTNSIGWCALKLDEGGAPCGVLDAGVRILTPNEEAGRDPQSKASLARDRQMARSARRRRDRFLRRQKRLMTLLVGAGLMPADPAARKTLERLDPYWLRAAALDRPLEPHELGRALFHLNQRRGFKSNRVADAGENEAGAIKEGVANLKWALEESGARTLGELLARRHRRDREGRRLKDGEAWATPAPVRFRPRSQGAKNLYDFYPSRDLIAEELDCIWAAQKAHHTALTDELLAALRRTILEQRPLKKPLVGRCTLRPEAGRVERYGLEIDLGERAAKAHPLFQRFRILQEVSQLRITRPGRTERPLTLPERDVIAAALMQKGGNLVEFDKLRAAAKLPEDCRFNYELAGRKGLQPDQTAVKLSMGRAFGKAWRSLSRERQIEVVERLLATEDETVLLDWLRDACGLDEEQADFVSGVRLPQSHGQFGRAVLAELVAVMEGGSREAVDPETGEVLARPLTYDEAVRELGLHHSDLRPDGKLEQLPYYGQALVRHVISKPEAPEGSQERIGRVPNPTVHIALNQLRRIVNALTELHGPPAEIVIELARELKLNRERKEELQRQNRENERLNDARRARLAELGVADTHGSRLRLRLFDELPADEKVCVFTGTPLSVEKLFDGSVEIEHILPYSATLDDGFMNKVLCTREANRRKGRHAPAEVWSGAELQEIVERAERLFQKKAWRFQPDAMKRFEAEGGFLARQLTDTQHMARLAKTYLEQVCDQVWAPPGRLTAMLRAKWGLNSLLPDHNYADTNQPKNRKDHRHHAIDAFVVGCTDRGLINRIARASGQAEALDLERLFPKDGFPEPYAGYRDDLAARLERVVVSHKPDHGLRPGAQDDVHVTSGQLHEETAYGLVEEEIDGKRYNLVSRKPIDGLSEGEIGRVRDAALREELQEVARAAKTAGRKLNEALAEFGEARGVRRVRVLKTEKSVRVVSHGSGFEKAYVPGDNHRIEIYELPDGQWAGEGVTVFDANRPGYEPAWRREHPGARLVMRVHNGDLIEADFGQGRRIYQVCMLEAGNGRIRFASHNEAGSLAKRHADERDSFRYEIKAYSKLKSAGARQMRVDPIGRVTPAEERP

SEQ ID NO: 2680 - protein, 1085 aa, unidentified
  REGION 1..1085: note = Description of Unknown: Cas Enzyme sequence
MKQIEGHGAYRIGIDLGTNSLGWCVLDLDADLQPVAICDMGVRIFSSGRDPKSGASLAVDRRNARAARRRRDRYLGRRSALMNALIAGGLMPDDEADRKALEGLDPYALRANGLDAALPLYHVGRAIFHLNQRRGFKSNRKADRGKDDEKGKIATGVSRLREAMADTGSRTLGEFLHKRRISAQDPRRVPAVRTRLRPERGPDAKGDGYDFYAERALLEEEFDTLWSAQARFHRPSKLPETLRNRLRDIIFFQRRLKEPEVGRCTFFDDKRLAKSHPLFQERRLYEEVNALEIEEAGKASRKLTRDERDKLIFKLQNARTASFDALRKFLKLPADARFNKESENRSKLLGDEVRAELSHKDRFGPRWSTLELDMQSEVVRKLRDEPDEGALVDWLTHEFGFDAARAKAVAGARLPEGYGRLGEKATRLVLDQLKADVVTYDKAVARCGEQHPEMAHHSDFRTGEVLDALPYYAVVLERHVPPGTNDPLERDEAVRYGRITNPTVHIGLNQLRRVVNAIIGIYGSPAQIVVELARELKLNEEQKRTLNRELGANTREAERRSKALEELGYPASPANRAFLKLWEELNPDNPLDRRCVYTGRQISLSMLFNGEADVDHILPRSRTLDDSNANKIICIRESNREKRNRSPYEAFGHDEARWAEIADRAARLPKNKRWRFQPDAMERFENEERDFLDRQLVDTQYLSRISRQYLEAVCPTVKGSAGGVWVIPGRMTQMLRGKWGLNSLLPDHNLPLNTNKRKNRLDHRHHAIDAAVIGVTDRKLLNRIQKEAGRAEADGLREHNLGDIEPPWPGFREDIGAKLDSLAVSHRPDHGKITPLAGRAGKDQTAGKLHNDTAYGLTGETDEKGNEVVVVRKPVEALKARADLNRIRDQALRGALEAATQGLTGKEFEAAVRNFADSNPTWPGLRRVRMTEPLKTIQVKDRKGMPYKGFKGDANLRYDVWELPDGKWMAEIVTMFDAHQAGSQSKVKENHPTARKAMRLHQNDMLAFEHEGGTMIGRVVKFSVAGTLVLAGHAEAGSLKARDAMSSDIDPFKYINASASALKKRKARKIRIDEIGRIHDPGPPR

SEQ ID NO: 2681 - protein, 1080 aa, unidentified
  REGION 1..1080: note = Description of Unknown: Cas Enzyme sequence
MQKLHRLGLDMGTNSIGGWGVTLDAQGQPSDSLACFVRIFSDGRNPKDGSSLAVQRRVPRGMRRRRDRYLRRRDDLMEMLITVGLMPPDETERQCLASLDPYALRAHAVRRPITPYELGRALFHLGQRRGFKSNRKTDTSDSHKLTEKINELRRLIRESKAETLGEFLHKRRLKGRMVRARPEAGFYPDRALYEEEFDKIRAAQAAHQALQPGQWDELRQIIFRQRKLKPVDPGWCLLEDGARRAHRALPCAQEFRMVQEANNLRVLIRGKRAEELTREQRDIVLRELRGRKELDLDRLVTLLKLPEGAQINLLDENRKTLKGDETATRLAHKDLFGARWRKPPFGYPRRTSIVRKLIETEDPHEIELIAQSEWGLDEAAAKKLAATPLPEGYARLSEQAIGKLLPIMEEQGLGYADAVAEVTEYRHHSDFRPDAALDRLPYYGAVLTRHVVGADPTKPKEDEVGHYGRIGNPTVHIGLNQLRRVVNRWIEIYGKPEEIVIELARELKMNKEDRDAERKKNTDNETANRRREEQIRSAGGHPSSHLLRKLRLWEEQSQGSVQVCPFTGKTISFEMAMTDATEIEHILPFSKTLDDSMANKVLCLREANRVKRDRSPFDAFQSNPQAGEHRCAYDEILDRAHALPPNKRWRFLPDAMERFADETDFLDRQLNETKYLSRIARVYLAHLYNEKAEGRLRVRAIPGKLTAMLRGKWGLSKLLRDHNRIGDTEGGSVRKNRDDHRHHALDAFVIAMTDQRMLKRISDLNSDGDRKRLIEAVPEPWDGFAPDALRPKLDHLVISHKPDHGTPGERGKTTGALHNDTAYGLVTPGKNGTWVVVSRGALAGMLTPKDMDAALPAIRDKTLREALIASWKEFKTGSRIAGENDAGPSRKKKNPAGLFAEHLATTGIVVGGRNVRVRRVRMTEELTVVPIKDRKTGKPYKAYKPDGNAFADIYRLPDGRWTATVIRRFDANQRGFDPAKRRPHPAAKKIMRLHIDDMVALDDGGRRRILRVVKMSGQTITLADHHEGGALKKRNDDKEDPFKYLEKSANSLKELHLRKVGVDEIGRLSDPGPRTAPKTS

SEQ ID NO: 2682 - protein, 1084 aa, unidentified
  REGION 1..1084: note = Description of Unknown: Cas Enzyme sequence
MTEHRHAAYRLGLDLGTNSIGWAAIRLDDSGEPFGILDMGVRVFPDGRDAKSKESNAKTRRIARGARRRRDRYQKRRADLLKTLVEYGLMPDDKRERQALAGRHDPYELRARALDDPLHPHELGRALFHLNQRRGFKSNRKADQDSDGESGIIKQAAEALTDEMTASDARTLGEFLYWQRCAGQPTRFRNLGTGTTAKYKFYPTRQMLEEEFDEIRTAQVPHQDDLRHDQWDSLKDTILFQRRLRSVDPGLCQFEAGEPRAARALPVAQEFRMLQEVNNLRVRVGIEPERELCPDERQRALDLLRSGKKIELRKGKENTPAKPRRNLKLPSDAVLNLSRGGRKAIEADETAVRLMKRGKRKERPAQEIFGAQWLEFPLDARNEIVRFMLCTEDPENVRRKASADWGLDNAQAKALSEAILPSGYSNLSEKSIRKLLPHLERGLVFSDAVQAAGYKHHSDFRCDQAHDYLPYYGAVLERDAIGADPNKDPKIDGEPARYGRFPNPTVHIGLNQLRRVVNRLIEVYGKPKEIVVELARDLKWNRERKEHDQWQREKNEERNQQFKEMLQSAGEPVKSHVLRKLRLWSEQGPPQARFCPYTGRTISCAMAMDSRTEIDHILPFSRTLDDSMSNKVVCMTGANRHKGNQSPWEAFHHDSAEYDEILARAAALPGNKSWRFKSDAMQRFEEEERDFLDRQLDETRYLSRTARAYLAHLYDEKTEGQRVRAIPGQMTSILRRGWGLEGMLRVTPAGEIVRKQRDDHRHHAIDAFVVANTTQGLLQRFAQASTSRRREAAERLAAIAGDVRPWDGFSREDLRPFLDRLTVSYKPDHGTRGQHGRTTGRLHNDTAYGIDNYVEDGQSTVVVRKKLLAGANGWPKTRKHLESVRNESLQEALLELWDQVKSDGGNVAKFIEQAANPGVPMGGRLQIVRRVRILDEQRVIPIWSDKSRTEKPYKGYLPGGNEFADIWRMRDGRWRMIVVPTFDANQSSFDIEMYRPADKKTGKPDPAAKRLMRLYKNDMGALGDGADLRIVRIGQFWATERMVLSEHNEADPKEKSYVASKLQSLGFRKVGVDEIGRVRDPGPP

SEQ ID NO: 2683 - protein, 1081 aa, unidentified
  REGION 1..1081: note = Description of Unknown: Cas Enzyme sequence
MPYRLGLDLGTNSIGWWMVKLDKAGRACGSLGGGVRIFSDGRNPKDGTSLAVQRRVPRGMRRRRDRYLDRRSDLMNHLIAFGLMPGDEGERKALEALDPYELRAAALDRALSPHELGRALFHLNQRRGFKSNRKTDSDDNETGIVKERISELRARIETSGARTLGEFLHKRHLKGRMVRARPEAGFYPERAMYEHEFDLIRQRQNSHHSLTIEQWDPLKDIIFFQRPLKPVDPGWCLFEAGEKRAHRALPLTQEFRMVQEANNLRVTSPGSPARRLTLEERDKVLGHLRKKKELKLDAMLKLLKLPSGSTVNLFDDHRSTIKGEETAARLAHKEIFGDTWFNLSAEERTGIVRTLLDTEKPEEIERIAQLQWGLSEAAAKKLAGKSLPDGYSRLSEKAIAKLLPIMEDQGLNYAEAVEQVPEYGHHSDFRPDEARDTLPYYGEVLARHCVGADPSAPRENEVAHWGRLANPTVHIGLNQIRRLVNRLIEVHGKPEEIVIELARELKMSKEDKDKERKKNSENEAANRRREEQIRAAGTAPSPHLLRKLRLWEEQKVGTANLCPFTRQPISFEMAISAATEIEHILPFSKTLDDSMANKVLCLIEANRAKRDRSPYDAFHTDPTIAGRKYVYDDILFRADNLPANKRWRFHPDAMDCFNNDERDFLDRQLNETKYLSRIARSYLSNLYNEKEEGRMRVRAIPGRLTAMLRGKWGLSALLPDHNLADGEEVPRKNRNDHRHHALDAFVVANTTQGLLKRLADLNDDAERQRLVDAVPDPWDDFDREELRKQLARLTVSHKADHGTPGSKGKTTGALHNDTAYGIVGPGKNGNTIVVSRTPLSRFTTPKDMDKGLEGIRDAALREALTAAWETFKAAPPAASNSDDADSRRKPKNPAMAFAEMAATKGIELGGRKVKVRRVRMCEELGVVPIKDRKTGKAYKAYKPDGNAFNEVYELPNGKWVSVVIRRFDANQPDFNSADFRPHPAARKVMRLHIDDLVAVDDGGQRRVLRVVKLSGQKITLADHFEAGALKSRDADKEDPFKYLEKSANVLKSMGLRKVGVDEIGRLTDPGPQQAKSGGKAA

SEQ ID NO: 2684 - protein, 917 aa, unidentified
  REGION 1..917: note = Description of Unknown: Cas Enzyme sequence
  MOD_RES 884..887: note = Any amino acid
MRYRLGLDLGTNSIGWWMVQLDSDGHACGSLGGGVRIFSDGRNPKDGTSLAVQRRVPRGMRRRRDRYLGRRSDLMNHLIAFGLMPGDEAGRKALEALDPYALRAAALDRPLLPHELGRALFHLNQRRGFKSNRKTDSGDDDKETGVVKERIGELRRLIDKSGARTLGEFLHKRHRKGRMVRARPEAGFYPERAMYEDEFRLIREQQQTHQTLTDEQWEALQDIVFFQRPLKPVDPGWCLFEAGEKRAHRALPLTQEFRMVQEANNLRVTSPGEPARRLTMEERDKILGHLRKKKELKLDSMLKLLKLPSGSSVNLFDDHRTTIKGEETAARLSHKDIFGEAWFSFSFEKRTEIVRTLLDIEKPEEIERIALAEWGLSEAAAKKLAGKSLPEGYSRLSEKAIAKLLPIMEDQGLNYAEAVQEVPDYAHHSDFRPDEARDALPYYGEVLARHCVGADPSKPKEDEVAHWGRLANPTVHIGLNQIRRVVNRLIEVYGKPEEIVIELARDLKMNKEEKDKARKANSENEAANRRREEQLRSAGTAPSPHLLRKLRLWEEQKVGTAHLCPFTGDPISFEMAISEATEIEHILPFSKTLDDSMANKVVCLREANRAKRDRAPHDAFHTDPAIGGRKYVYNDILFRADNLPANKRWRFHPDAMDRFENEERDFLDRQLNETKYLSRIARSYLANLYNEKAEGRMRVRAIPGKLTAMLRGKWGLAALLPGHNMAGGEDAPRKNRNDHRHHALDAFVIANTTQGLLKRVAELNADADRKRLVDAVPDPWEGFDREELRTQLARLTVAHKADHGTPGHKGKTTGALHNDTAYGIVGPGKNGNTIVVSRTPLSRFANPKDMDRGLTAIRDKALREALTAAWEAFKAAPPELSNPXXXXTRTAGVSRKTRPWLLPRWPRPKASNLAGEE

SEQ ID NO: 2685 - protein, 1017 aa, unidentified
  REGION 1..1017: note = Description of Unknown: Cas Enzyme sequence
VEKYRLGLDIGTNSIGWCVLELNNENRPCSVQDMGVRIFSSGMKAKSPDTSNAAERREAKQARKRRDSYLKRRSQLMEVLIDIDIMPKDEPERKKLESLDPYALRAKGLDDELSRYELGRAIFHLNQRRGFLSNRKVDKPDKDKEQGKIESAIRNLREILKNSNCRTIGEFLYKRHIEKKPVRSRLTADGYEFYPHREMLAEELDILWKKQSAFHKNLTREQYERIYDVIFFQRPLKPVKPGKCLFEPDEYRAPRAHPLFQRFRIYQDLSNLRIISPDHSDRPLHIEERNILFDELLTKQTLRFTTMKKLIHIGRNYQFNFESNNKDKLEGDKTGGAMSGKERFGSGWYDFSLEDQANIIERILYTDPEDDSELIDWLMNSHSLNMEKAESVVNAFLPVGYSKLGLKAMGKIIHEMEKEVTTYDKAVIRAGYNHHSFFENNERLDRLPYYGEVLSRHVIPGTGNTVDKLEKRYGKIPNPTVHIGLNQTRRIVNAIIKKYGHPEQVVVEMARDLKNSKKVRDKINKEQKQNREANEKRKLHLTELGLPVNHENLLRLRLWEELGNNPVDRKCVYTGDQISIEMLFGPEIEIDHILPFSRTLDNSAANRIVCLRKANRLKGNKTPCEAFSVLSGWNWEAITGRAKNLPPNKRWRFGEKAMERYDSQERDFIDRQLQDTQYLSRVVREYLTHICPGEVWVTPGRLTALLRGKWGLQKEREDHFHHAIDAAVVGVTDRWLLNRISRKSADEKEKNLPRFLSNIDIPWRNFMKDILNRADSIVVSHKVDHGLQGQLHNETAYSMKSETDTKAVHRIPITSIKNMKDIKIRDKAIKKRIEAYVEQSDKTFNEAIQEFSDLTGICRIRIIEDKDTVLIPIRDKNGKIYKGVKGDSNAYAVIYADSKGKWQMEIISTFDANQEGFIPEYVSSGHSEIMRLFRDDTLEINDEGTRRIMRVQKLNNRAKRKTIILVDHYIANADTRHKNKDDPFKMEEFSALKLQKKSAKQVYVNELGEIIYVAKKK

SEQ ID NO: 2686 - protein, 1009 aa, unidentified
  REGION 1..1009: note = Description of Unknown: Cas Enzyme sequence
MNYRLGLDLGANSVGWCLLELDEDMNPFRVARIGSRIFSNGRDPQKGTSLAANRRQHRQMRKMRDRYIQRRTDLMRLLIKLGLMPKLESERKRLQDLDPYVLRARGVSERITLHHLGRAIFHLNQRRGFKSNRKTDKDEKESGLIRCGIATLHAAMEASGAETYGQFLYQRRQSGQSVRARPKTDGREASYDFYPTRELLEAEFDRLWTTQATYHPELTDQVRESIEGTLFFQRPLKPVVPGRCTFNQEEQRAPWALPLTQRFRILQELGNLRILLPDLAAKALTVPERDTLLKMLLAHKEIKFDAMRKALKLGDRCRFNLESDRRNYLKGDETAVILGHKDRFGKAWRTYSFKKQTEIVETLLQAEDEAALIEWLMAEAGVDAERAARIASTRLPDRYARLGRTAMGRIAEIMETDAVPYFEAATRAYSHHSDFRTGEVFENLPYYGIPLGRYTSNVTRGCDEEIRYGRITNPTVHIGLRQLQKLVNSLILEYGPPTQIVLELARELKLSQEAKRRILKEQKKNQEANDHRRDFLNQRGLADNAENLLRLRLWEELHGNPLRRRCVYTGEIISMEMLFTPAVEIDHILPFSRTLDNSAANKVVCLRKANRDKTGMSPYEVFSESPNGYDWEGILQRAVELPENKAWRFGPEAMDRFEGKGDFLDRHLTDTQYLSSAAREYLTCICDQVWVTPGRLTYMLRRAWGLPKSRDDHRHHAIDAAVVAATDRGMLMRVARAAARSEREGLPRLLSGDGQGWEWLREGVMRCLDHVVVSHKPDHNVNAGLHNEIAYGYGEDDGGLPMAIHRVPILSIHDSKSALKIRSATLRDALLQLVLDSQKAKERVLDFSMRTGIRRVRIQEKLELIPIRDAAGNVYKGYKGDANAFVEVFRNRDGRWGLEVVSTFDANQSRFMTQRQRQSLPMVMRLFRGDMLALGNGDDRRIFRLVKFSQGQGLVLAEHFEAGSLKKRDADPADPFKYVYAGASALQSKGARKVSVDILCRVRDPGAKP

SEQ ID NO: 2687 - protein, 1075 aa, unidentified
  REGION 1..1075: note = Description of Unknown: Cas Enzyme sequence
MPYRLALDLGTNSIGWCMLDLDPRDRPRGILGMGVRIFQDGRNPKNQASLAADRRLKRQMRRMRDRYLRRRGRLMDALVRHGLMPAAETERKSLEALNPYALRARGLDAPLTLHELGRALFHLNQRRGFRSNRKVDKDEESGKIKPAIQKLRGLMADSGTRTLGEFLNHRHGKGLTVRARLQGKGAKAGYDFYPERSLVEEEFDALWSAQAEHHAELTHEAREEIRDIVFFQLPLQPVNPGRCTFEPLEQRAPAALPVAQRFRILQELNHLRAQSPELEERPLTLAERDTLAGHLLKGRDLTFDQVRKKLRLPEGWTFSLEAANRDKIKGDGTAKVLGHKGRFGPRWHGFSPEDQERLADLLLDIEDESELLGLLTADWGLDPARAAKVADAPLPTGYSRLSRKALHAVTRELAAEVVPYAEAVVRAGYGSHSQFDTGEVFERLPFYGLVLQRHVTFGSGHPADRAEERYGRITNPTVHIALNQVRRVVNELVKAHGVPAQIVLEVARDLKNGPQARREIKKRQAENRKDNERREQQLKELGVPVTRDALLRMRLWEELAQDPATRRCPYTGEQISMRRLFSAEVEVEHILPFARTLDNSPANMTVSLRRANRYKENRTPFEAFGRSRDGYDWEGILERANAMPQNKRKRFAPDALERFMEKGDFLDRQLVDTQYISRVAREYLSCLYAPRRSAPVWATPGRLTSLLAARWLAHGQGAPPEPGRYRHLVLTPEGFVRKQRIDHRHHAVDAALIGVTDRGLLKRVADLRAREVDQGVERFLADLAEPWPGFRDQVLEAAEGVVVSHRPDHGIGGQLHDENPFGILDGNGSPGNAQKYAPISKLTKPDQLLKVKGRRLRAELLSAVTGRSVGQCIQDFNRWQDMQKKEAKAEINSIVGMADTDFTEQVAAFAARKGMRRVRLLETVALTPIRDKSRLAYKGVKTGSNAFYEIRLRPDGTWDGDIVSRLDAHRPGFRTRCEEQGYPLITRLFSNDMLELNENGERRIVYVVKLSEKQIALAEHREADVDRRKPDPKIYKGSPVALQKAGARPIYVDPIGRVLYPEVPCHAAPGGGDRR

SEQ ID NO: 2688 - protein, 1003 aa, unidentified
  REGION 1..1003: note = Description of Unknown: Cas Enzyme sequence
DRRLARQMRRRRDRYLNRRAALLNLLTSLGLMPVDAAAAKQLERHDPYALRARGLRERLTPHELGRAIFHINQRRGFRSNRKTDKDGEAGKIKPAIKRLRELMAEAGAGSLGDFLNRRRLSGLPVRVRPKGQGAKAEYEYYPERSLLEEEFDAIWKAQSTFDPSLTEAAREQLRGIIFHQRPLKPVNPGRCTLEPDQPRAPVALPIAQRFRIMQELNHLRVVSGDLAERPLNLGERQKLAAVLLQGKDLTFDAMRQRLSLPPGYSFNLEGENRDRLRGDQAAHLLSKKTLFGASWLTLSPAEQERLVDLLLEEEDEGELVAALVADWGLDAQRAAAVGGVNLPAGYARLSRKALHAVTDCLAADVIHYADAVTRAGYASHSHFATGEILDRLPYYGVVLQRHVGFGTGHPADRAEERYGRIANPTVHIALNQVRRVVNELVKLHGHPAQVVVEVARDLKNGIMARREIAKRQAEMKRHNDRRRADLQALGIAVTADALLRLRLWEELAADPAARCCPYTGETISMGRLFSPEVEVDHILPFSRTLDNSPSNMTVSLRRANRYKGNRTPEEAFALSPVGYHWDSIVARAGLMVRGKRWRFAEGAMARYEEEGDFLDRQLVDTQYIARVAREYLSCICDPKKVWVTPGRLTSLLAARWGFPRKDRNDHRHHARDAVLVGVMDRGLLQRVATHHARLAGEGVERFLAGLPEPWPGYRTEVLTRIHTVVVSHKADHGVAGALHNQTAYGIRGENGTPGNAQYRVPLEKLAAPTDLLRVKGLGLRTAMLAAASGMPLRLCREKMLELATLPEKEAKARLAGFADIPAKEFATRLAEFAAGRNMRRVRVLDTLTLIHVGNGDGAPYKGFKGDSNAYYDIFLRPDGEWAGEIVSTMDANRPGFMPQLARQGLPRVMRLFNGDMLEIEDAGVRRVVYVVKQSEKQIVLAEHFEANADNRNRDKEDPFRFIYKSSPAALRKAGAVPLFVTPTGCIRRLEVPRHAAAYGGNSR

SEQ ID NO: 2689 - protein, 1053 aa, unidentified
  REGION 1..1053: note = Description of Unknown: Cas Enzyme sequence
MPYRLALDLGTNSIGWCRLDLDDNLAPISILDAGVRIFPDGREAKGDASLAVARRLARQARRRRDRLIRRRERLMRALVRHGLMPEDLVARKALEQLDPYALRARGVHEALTPHELGRALFHLNQRRGFRSNRKAAKGDDAPKIKPAMERLREMMGAMTYGEYLHSRRLQGLHVRARKSGEGAREGYEFYPERSLVEAEFDRLWNVQAAHHAGLTPEIVQEIRNIIFFQRLLKPVNPGRCTLEPSEPRCPRALPLAQRFRILQELNHLQVSQANLVLRSLSKPQRDQLFNQLLEKHKLSFAGMRRTLRLPPGCSFNLAGEKREDLKGDETGALIGGKKGIGAKWFGLSFEQQTDLVKLLLGSEDEEELLAQLVQEWGFTADEAQRLANLELPPGYMRLSEKALEAIVPELEAEVIPYSEAVVRAGYQSHSDLGGQEIMARLPYYGIALERHVSFGTGKPTDRLAERFGRVTNPTVHIALNQVRRVVNELIKTHGHPAQVVVEVSRDLKNSPLVRRRIEKEQARNQLANAERRKKLEELGVSQWGDGVLRLRLWEDLHDDPAARRCPYTGEPISINQLFSGAVEIEHILPFSRTLDDSAANKTVCLRRANRDKGNRTPFEAFGASPPGYDWQAILARAAQMPPNKRWRFADNAMAEFEKGEDFLARQLTDNQYIAIRAREYLTAICPANQVWGTPGRLTHLLARRWGFPPKNRDDHRHHALDAMLIGVTDRGLLKRVADTHARNQTGGENRFLSNLEPPWPAFREEAMGHLEGIIVSHRPDHGLGGQLHNDTAYAIAGENGQGRNAEHRIPVGAINTLKDILNIKGHRLRAELLSHVSGKSLDSCRRFLTEADDMQPKISKERLKIFAQVDDKAFAEMANRFFSRRGMRGVRISETIPLIPIRDRTGRPYKGVMGDSNAYYDIFIGPDGKWVGDIVSTFDANQGDYRGRFEGRDDHRRVTRLFRNDTLEIEENGQRQFVYVVKLSEKQIALAPHNEANVDKRTRDRENAFSLIYKGSPAALQKAGARPVHVTPAGRVFYLETPRHVAQRGGDSR

SEQ ID NO: 2690 - protein, 1062 aa, unidentified
  REGION 1..1062: note = Description of Unknown: Cas Enzyme sequence
MSWRLGLDLGVASIGWVALRLDTEGEAIGVMDGGVRLFSDGRNPKNNEPFNVRRRTQRGIRNNKARQRMRQRSVEAWLVNVGLLQSFKHDVRSIDPYQARSDAAEGPVSAEVIARACMHIAKSRGFKSNRKTDSSEESASDFKTKLATLKDALQGKTLGQWQHERQQKELRLFNESKTAKTPAERYVRQGVKFRGDSAFYPTRVMLQDEFHVIRDVQAAHHDLSADDWNELERRIFFQRKLRKQERGKCSLFPNEDRALAALPSSEAFRVEQQLSNLRQEFSDRTSAFLTPQQRESVRQKLQQQKTLSFSAILKMKEKGSPVFPDVIGFNLATIANDKLPGCTTRLQLTKTIGEDLLSSMSIEEQDDLVELLIEANEDEEIYDRLRDKPALAPFGEALAALSFSSGTLNLSSKATRALAPLLEAGMNYADATANLTDDDGNPLHHSRRSVSKLEADEPLPYYGAVLTSSVIGGKRTGDPFADPEGFYGRIANPTVHVALNQVRKVVNALITMYGHPAEIHIELTRQLNAGTAKRNEILRNQAKNRKENDRLRDLAGSLGVPDPSRTDLQKLKLWEQLNGKDPSDRRCVYTGRRIAGTDVLTSQVEIEHILPYSRTLDDRISNKTLAFKDANALKGNQTPHEAFGSDTHASKGMVWTEILDRISRLHPATAWRFASDAMERFHKLDGGFVERSLNDTGYLARASKSYLELLTGFGRVVVVTGRHTANLRHDWGLNKLLRDGDDKDQKNRGDHRHHMIDAFVIAMTTRSVLQRMAKDAKYSDLDHRHQRGVFPLPDSQREQLQDLVDNCLVSVKPDHGTQGQFFDETAYGLKPGPKDMDPERNASVRKSVIGLRQDPEKVFGWKLVEGICDPSIQNALGTYLLEHKNSGKTHKELLEAFQSGPLCDIVEQRGIRRLKVRIKDQSVQPIPSAPYKGYAVNQYAFADVWYLPPNKKQKKPTYKAIFVELFKAKDILSGQASAPRPDHPGAKRVMRLFKNDIVSIEEGGKTALLRVYGFSATNNKLDVRSLNAGDAPRKYQSINQLGAINLKKVRLNAAGKAKGGNL

SEQ ID NO: 2691 - protein, 1132 aa, unidentified
  REGION 1..1132: note = Description of Unknown: Cas Enzyme sequence
MSLLSDYKNIIFAFDIGTNSLGWCVLGGKRGADSSVIPDHIVDIGVRIFSDGRDPQSGASLAVARREARGMRRMRDRYLRRRQKLLNRLIEYGLMPAREDERKKLVRETSNKPTPLQRAAERIDPYNLRLRALTEKLPLYYFGRALFHINQRRGFKSNRKADSRDTNEKGKIAVGVGELYGQMSACNAPTLGAYLAARYNEGKIVRIRQDSEMVQAGVKEDNYLFYPERAMLEDEFNQIWDKQAEYYPDILTEKRKEQIFDDIFFQRPLKEPIAGKCSFNPQETRLPKAHPLFQEFRLYKEVNELTIEVLGSAKGQKLSKDQRDQLIKILRPKKSMKFTAIRKELKLKDCIFKKESKSREGLAGDEVYAEMIDKKRFGNQWGDKINSEKQWEIIQKLRSEADPDKLDTWLAEQFPNLDEEQRAAIANTKLPQGYGRLGKTALSQMLEEMKDAVIPEAEAARLCGYDHALLNSEREGLPELPKYQEVPDVARQIPPGTGDPNDDWDIRMGRITNPTVHIALNQLRRVVNALIRKHGKPLEMAVELARDLQLSDEQKKEVNKAIADNTKAAVMRSDKLKELGVADNGYNRQLLKLWEELDKSDPLNRRCPYSGEVITCSMLFSAEVDIDHILPFSRTLDDSNANKILCLKKYNREKSNFTPAEAADRLGWDYDAMLARAQNLPQSKRWRFARDAARRLEGTEGGGDFIARQLTDTQYLSRLARTYLSSLYPGKEEGYNIETGELAGEKRMHYHVRAIPGKLTELLRRNWHLNDILHDRTENNDTAKPKNRQDHRHHAIDAAVIGVTTRSQLQNISSASKNMEARDFENFVKEAVKDTPPWEGFQAELQERVDRIVVSHKPDHGTLPSAKARKAGKGETAAKLMKETAYGLPADADGKRLTDDKGNELVVWRISLRDLKAKDLGNIRDEKLRAMLKEHIYAETGELKDGKAFEQALLSFKQKDMPYKGIRHVRVMGARNTIPIYSRRDKERAGKPYKGYWNDGNYRYDVWQTLDGKWKHEVITMFDAHQPDYQSQFHKENPTAKKVLSLQQNDMVAYSDPDDPQKKRIIARVVKFDNQGHIVFAPHNEANVDARNRDKNDSFKYFIKMAGALEKIKCRQIRVDEIGQVFDPGPLK

SEQ ID NO: 2692 - protein, 1104 aa, unidentified
  REGION 1..1104: note = Description of Unknown: Cas Enzyme sequence
MSIRLGLDLGPNSIGWALVDDKKRQVLGCGVRTFPEGLDNFDTGKEASLNEQRRVARGMRRQTRRRARRKARLRDALVQAGLFPAEADEQTRLYEQDPYELRARALDEKLEPFQIGRVLLHLNQRRGFWSSRKEKAKAEEKKKSRKKPPKKKDAGADKDTTGMLIEIGELEKAIAESGCRTLGEYLHRKAVALDHTERKDDDHVRNRHTRRDMLLQEFDAIWTAQQSHHPDLLTDRLGYGALGRQKYPHKPIPRHDPRRKGLSDLDAFGLHGLIFFQRPIYWPRSVVGRCELEPRQRRCPRAHRLHERFRILQELNNLRYAGDLHPDEPLTDDQRQTLLAYLATHEKMKFDDMRKNLDLPDDVRFNLEVGKRASIHGMKTDWLIAKKTGKAWHQRPDDQKTEIVELLRAPGLDEDLLVDRLVEEHGCSREEAESLAAVDLPPGFGSLSVKAIRKLLPHLERGLVYMAQDEENSALHAAGYLRPDELQRRLFDTLPLPGKARDCPIGDIPNPVVKRALHQLRKLVNTILREYGKPDAVHLEMARSAQLGPQRRAEYNKHMREREAARDEAAHELGNAGYPVTRDAITRLVLWKSQNGDCLYCGRKISQTQALTGGAHVDHILPRSLSHDDAQSNKLVCHPECNAEKGQQTVYEWIGESDPDRYERICRSARKLLADKKIPYAKYRKLLCRHVDSGEFLERQLVDTGYITRATGEYIKLLFEQPHAVLGLKGQYTAQLRHQWGLGTILEQFADSPAWQAKNDLRPGEKNRADHRHHAIDAVVLALTDRRTIQKLSRGHALKEHPDGWPGFRDHVKEKIAAVNVSRQVNRRVRGKLHEDTLYGPTHDGDGEQVEGVFVWRKKLVDLTPNEVLAIRDQTVRELVVARLSEAGLQVGRGRKLNADDKKRMKAVLAGVRLPSGVPVKRIRLLKKDQTVRPIRKGRPDEAWVKPRNTHHLCLFEWNENGKTKRDSVFVPLIEALRRLRKGEPVIQRTPPPDHPTIPADARFLLSLSNGEMILADVKGQPTLLVFKTAAATTGQMLFVSHNDARRSADQELRRFNPNALPLLGSCSMLFRRKAPNGDSYEERERPCSKVTVDLLGRIRWAND

SEQ ID NO: 2693 - protein, 1018 aa, unidentified
  REGION 1..1018: note = Description of Unknown: Cas Enzyme sequence
MADLTLGLDIGTNSLGWALVDERGSRIVAAGVRVFPEGVDRDTQGGEKSKSAARRTARGMRRQLARRRRRRRHLREVLIQAALLPSRAVELGTLLSLNPYQLRRRGLDTPLEPYHFGRVLLHLNARRGFLSNRKTDRTRRTEVKGMLAEINDLAKEISASGSRTLGEYLARLDKRFDPKASPETARIRRRHTRRDMYEYEFDILWSAQQKHHPDVLTEELKERVRQIIFFQRPMYWPKSLVGRCELEPKLLRCSRGDRAAQRFRLLQEVNNLRVLEPFAGRDRPLTDQERSTLISYLSTAKDRSFDQMRKKLGLPDDARFNYERGERGKLKGHQTDAAMASKKALGKTWTNMPDTQKDAIVAVVVEEEREDVALKQLMDECGLPQEQAERALGVSLPDGHMNLSRTAIVKLLPHLERGLPLMGDDESNSALHAAGYLRPDQRAVRQRDFLPAAPDVPNPIVRQALVEVRKVVNAVIREYATPSHIHVELAREAKRSLEGRREILIDNARRRQARDEAAQRIEEHGDKPTRATIQNYLLWQEQGEQCAYSGRCISVAQLLSDAVDVDHILPRWRSLDNSMANKVICFREENAAKGDHTPREWLEHGDPDKYERVLRVAQRLPYGKQRKFVQKDIVLDEFVERQLRDTAYITRCVTQYLRCLGARVVTPRGAMTAELRHFWGLNTILDPEGRGKKNRADHRHHAIDATVIALTNSKRLHALANARGSDVPPPWARFREDVESAMGKINVSHRVRRRIAGELHEATFYGATHKLPHPTVEDHSVPRPWSKGWVERDGMYVRRKSVTELTDTKQIGKVRDPTIRQILQEHLRQRGIDPHRPGRIPSDAFKGGNTPRMPTGMPIRRARMLEESTTIRRVSRGRAFQYVKPGSNHHIVYHAEGQRDQEKWIAQVVTMWDAAQRARRPHPIPIVNRSDQDGKRFVMSLSINEMFQIDGAANGRLLCVVRKIDQRSLRVHYKVHTDARVAGEINKDNLYLSPERMRKCNARKVTVDPLGRIRWAHD

SEQ ID NO: 2694 - protein, 1225 aa, unidentified
  REGION 1..1225: note = Description of Unknown: Cas Enzyme sequence
MSQGAEQVRFILGLDIGSNSVGSAWVDTDKQEVHLAASVFPAGVDEQENKRGAPKNQARRQTRAQRRTIDRRAKRKRVLTRFLMEEGFLPCEPVGLQKLFDLDPWALRRKALKEPLTPHEFGRIVIHLAQRRGAVGVVSDPENPDEGKVKEGMDRMNALLAERGAATVGQLLADLMDERRQQQDGVTWNEPIRNRQYRLPEAQQLFAGRDLIRKEFQRIVEAQRAFEGSGLSGLLTDELVKRLDDPTRTDTWRQGGLLFGQRRTYWDTGTLGRCVLEPTERCVPEADMYAQEFRVVEYVNNLRVRAPFEDWRSLTAQERDQVIAKLRAPLLKRSKGQLVPKKSASMDDIREALGVPKTRRKGADPFEIRQESQDPDRPPNTDWFYREVVHQVFSEPVWTAMEQGARDIVNKALLKLDPDQPDDAERVRFRATGWWGLDDKAAARLVEVWKSRPKLERRLKLSRRAIRNLLPYMNRFSQARRRWPTQIEARQAFAEDRASDASPEQRRRYLIGAPTLTKADRRFLRKHPDLLPPAPMMSNPVVRKAIHEVRRVLIAWRRRMGCWPDQVVLEYTRSATQPEKVRNEQLALNRKRDRIKDGLREQFNLRGLAINQQERAIQRVVLCRQQRGLCAYTGTPISEKTAAEGTDVEIDHIVPRSRSQDNGLNNKVLVLRTANRGKGNQTVKEWLPAEAFAALEQRLQHFQKGEPVEEYSTGRDYARKWENLHRDAPSTGEFLSSQFTDTAYATRQVGQWIRDALYDGERDGRRHVFTTKGPYTAILRKDWGLLEDLLDQHWRLHAVGDADEAAPAAESKARREKGKDRSVHLHHAIDAVAIALAPRKLQELAARAEAEERARALEGRWPRSVPLAPPWPSLPHEASRDDLQQAIQTFRDQVVGAAQQIVVCHRPVKRRLVDKFHEETHYGPVIAPLPCHRTEKADSLFTNRISADRLTPNHLRVPDEWDELSARLDDPGVLPGDKKALRRQLAALVDPSPGKSGIVRDRALRDRIRKCLRGNALDPDSFTAAEIKKLVGEGKLTMGSGVPIKGVVLLRTNADPVIIPRKRWDPTTNRMIRDDDPRTARVYIGGNNHHMEIRQNRRRGRWSGVIIPTFEAARRVRLERRDAVERVDNDDSDFVMSLAEGEMIYARRKDRPPDDPAAVGYFVVCKLDKPARIHFAPHWDARKASEQDRWDVTPGDLKNCGPEPGVPAYKVRVSPLGEVRRLEHD

SEQ ID NO: 2695 - protein, 1051 aa, unidentified
  REGION 1..1051: note = Description of Unknown: Cas Enzyme sequence
MNEKTTLALDIGTNSIGWAVVSEDEKRIVAAGVRVFPEGVDRDQKGGEIPKNQQRRMSRGMRRQVARRARRRKVVRQALVAAGLLPPEADGPAADVHRRRWEDDAFARADPYVLRRRALDEKLHPFEIGRLLLHLTQRRGFLSNRKGDRQKKKEDSDLLKEISVLQQSIHDTGDRTLGEHLARRQQDEPDRRVRGLHTHRQMYLAEFEAIWQAQAPHHPELLTDQLKWGSVGPQEYPAAPRQTGGGAARLLARFGLHGLIFFQRPMYWPKSVVGRCELDPKQKRCPRADRVAQEFRILLEVNNLRIITAGGEELQLTDDQRQTVLGLLMQKDKVTFDELRKKLGLGERDGFNLEAGGRSKLDGHVTDAALKKCAGKAWLTRPDDERNAIVQSLIHDEERTFRLRAKPEWGIDNELADRLLDAHLPEGFSSYGRLTIERLLPHLRRGMPLLSRDGRPCAVREAGYLAPWDRPIKGGSSLGPPPKMTNPIVGQALYEVRKVVNAIVREYGKPSRVVVELAREAKGSAAQRDRQSREMHERRQRRDAAAERIGEAGLKPTRAAIERVLLWDEQQGVCIYSGLCIGLAQLLGGEADVDHILPYSQSLDNSLMNKVVCFRRENADKAQRTVHGWLAESDPKKYEQVLQRAARLPIDIRNRKLPRFSQPTCELEQFITRQLTDTAFITSTVKQYLEILGCDVICSKGQMTAELRHQWGVNDILRDDALDVKNRDDHRHHALDAIIIALTTRPRLQKLARRGGEKLALPWETFWEDAQRAVAAINVSHRARRKVAGALHEDTVYGATQKVAGGTIADRPWAKGWKEAPGVYVLRKPLTALSLGEVARIRDDRVREVVEQRLEKHGLKPGRKAGEDAAGGRKIPPAVWTEPLYLTPRRGVGTATHIRSVRLLKPEDSIVPLGTTRVKYVKPGSLHHLVIFECDGPKGKSRREAVFVSMLEASRRVTAREPLIRREHPTNPAARFVMSLSRGETVRGVFKDAERLVRFVTAASTQGQLYFAEHSDARPSGTLVKYAVKASTLKAHKVIVDVIGRVYPAND

SEQ ID NO: 2696 - protein, 1437 aa, unidentified
  REGION 1..1437: note = Description of Unknown: Cas Enzyme sequence
VGSAWVDTERRDIHLGVSVFPAGVDEQEGKRGAPKNQTRRQKRSQRRNIARRAKRKRRLRSVLTEAGLLPRDPNDRQRLFRANRWPVPEDEEQYKSLLRDEYTVWDLRRDASSRQLSPYEFGRVLVHLGQRRGAMGLNLPVEEEADEDDSRATTDEKKKARKAWDNTQQLMKEHHAKTFGELMAVLMKKRQSNIDANGRTLSLCEPIRNRRNLLVDKPENAVFATRELIHEEFNGLWNNQKEFGGELGGLLTDSLKARLDDPTEEKPWRYKGDIFGQRLTYWRTPDRCDLEPAERRCPIADMYAQEFRVMEMVNNIRIKGPLDGDWRPLNREAGGEREKVVLHLRGEGGQTIPTVRKAKKHPKNKQSSKEAGVQGIRRVLGIDKRTLNQKDLTEDAWQIKMEEKDPDRKINTDWFHREIVLGVFTKPMWGALTPQQRDSVNRAILRFDPEDENHGRQLHDRAVAWWGLACAAADRLVEAWRKRPKLERRVNLSRRAIRNLLPYLRDGLTVTEARQRFAEDEDAIDQATGKPPTVEQRALYAFSVTNATKERLLSLLSSDPQKVDEILRPLKNDEKQALIGSPRIARAVSELLRRRGTNYRARHYMRKHGVLLPPAPMLANPVVRKAIHEVRRHILSHMNAHRNPETGEPRRPDRIVIELARSARQSGKVRQAILDRNRAREAIRESIIQRHKLANLSANQQKAAVDRVLLCRQQRYVCPYSGLVERDKGIDPYAGKVITEDQAAQGNEVEIDHIVPYSKCGDDSLNNKVLCYRTSNRGKGSQILKNWLGGEQSHAFQALEQRLRHICEKAKPRSKKRDSEESSDRNKDDKADYFSRKDYKRKWENLHRMPSLDEFRSSQLTDTAYAAKQAGEFLRAVLYDGEADGRRRVFFTKGSFTGALRKDWRLFQRLPRFRPKGQEPAPEERQIERQQFKKDRRDHRHHAIDALVIALTLEGPPGSSDDYLQHLSRQFEEIETKKEQYKQAGVEPPQEAFRRRALPPPWPSGDVNAFRRQVLSKVYADFDVMDRRFKGVGLEGGEPLVVSHRPERRKIVGKFHEDTAYGPVLGQKTKYTCRVDVTKLRPGYLKLSEAQRQALAEKRKPKPTDDPAIDPNSYLVRDLRRRLEIRKCLREGCTLKPEYAEKKLIEKLNRGRHIDPPFDVGGTAEELRTRVSTIGPRLWLDPDDFTRAEIQLLVKHGAIHTRSNIPIKSVVCVRTIINPAVIPPKNWDQTTSRPVPDPDPRTHRAYLKKNNHHIEIRERTKTRKAGFLTEWVGKPVPMFDAARRNAARLKALREAGVPTERQWRRLPRNERRKFHDLISDINTRSPLVDRSDNDDGGFVMSLAIGETVHMRRPKSSEPGYFVVFKIDPTGTIHFKSHWDARSDKGEKDTSGSLIEESRRADVRCSARQLRDLGPEPGQPPYKVRVSPLGEVTRLDHD

SEQ ID NO: 2697 - protein, 1258 aa, unidentified
  REGION 1..1258: note = Description of Unknown: Cas Enzyme sequence
MICLGLDIGSNSVGSAWVDTEKREVHLAVSVFPAGVDEQEDKRGAPKNQARRQKRSQRRTLARRSARKRHLRSFLTQAGLLPTDPADLEMLFQANPWYLRREALSRPLTPHEFGRIVVHLSQRRGAVGITTDPDDPNEGKVKDGMDRLDKLMRDRGPDTTIGQLMADLIDERRQEHDGITWNEPIRNRQYRIPEDQQLFAGRELIRREFHRIVEIQRSFKDSQLGPMLTDDVIRSLDDPTQTDTWRHQGLLFGQRRTYWDTGTLGRCVLEPTERCAPIADRHASYFRVVETVNSILIERQGQPKRPLTPEERDKVVRLLRGPLFKKSRGRPEPKSTASVTDIKEALGIKPRDKTVKLNIEADEDREINTDWFHREIVHGAFTEAKWELLAEDQRESVNRAVLKFDPDQADDAARLRAGAERWWAMDAASADRLVEAWKRRPRLEKRLNLSRRAILNLLPIMNRFDSVNNRWPTQQEARKLYARTLNDQHARRRYETGAPGLSAADRYYMRLGKHQIVAGVPELPPAPTLSNPVVRKAIHEVRRHLVAYLRRFGRKPDRVVIEMARVTKQSERQRNEALARNRHRDKIRKAIIKEILPAAFGEEEAARLSLSQQRAAVDRVVLARQQRNVCPYCGQGGLTDLLAARGDDLEIDHIVPYSRCGDNGLNNKVLVHRACNRGKTNQTPREWWGSAFDERIRFAEKVFKDIKPEKSDYFNKRDSDRKWENFTREVREGEEWKNSQLTDTAYAARQVAAYLADALYDGRGLPERGDGEGAQKVFFTMGRFTAMLRKDWQLFETLKPPQRDSKHGELTAEEELRLAEKNRGDHRQHAIDAVTIALTDPTIKNTLASWAAQAAEYYEQHRQWPRRKPTDPPWGDVPSFRKQILSRVYESFDSSELASGKRDERGAASVLIVSHRPVKRRLVGALHEDTHYGPVVGPLPSHRTERIDTLFTNRISVDRLSPNHLRVPEGWDELSVRLDEAGVADARKRDLRKQLSAMKDPSPEKSGIVRDRALRDRIRKCLRANGLDPDGFTANQIKQLVREGKLTMASGVPIKSVVLLRTNSDPVIIPRKQCDPASGKTVPHMDPDNPGAPHPRTRRVYIGGNNHHVEIRERIRQRGGQAVAEWIGEVVTTMDAARRLHPPRNPDGTRPEPRPAVDRSDNHDGVFVMSLAEGETIYARRKDRPEEPASYFVVCKLDKAGNSCRIHFAPHWDARKASEQDRWAVTPGDLRLCGPEPDRPPYKVQVGPLGDVKRLEKD

SEQ ID NO: 2698 - protein, 1145 aa, unidentified
  REGION 1..1145: note = Description of Unknown: Cas Enzyme sequence
VEYKNYKRENIKATILAQGGLTPVGLVCEFSSCCDNKTSSCCEKTLRARIHYTDPHFANGSSVVNPNFEALIAMSQPSGIHSSPQTSRILGLDLGPSSIGWAIVDEEGQQIIAAGVRVFPEGVDRDKQGGEISKNEQRRIARGMRRQTTRRARRKRLLRKALVRAGLLPEMAALPPSDARRITWEREQFQKEDPYSLRRRALREKLELFEIGRVFMHLNQRRGFLSNRKTDRTKKDENSGILVEINELAKKMGDRTLGEYFAERQAEDPRARLRGQHTRRDMYEQEFEAIWAVQREYHPTLLTEQLKYGSEGRQTYPFKPGNSNGASILERYGLHGMIFFQRPMYWPISVIGQCELEPKQRRCPRADRLAQRCRLLQEVNNLRLLDTSSAEERPLRREERDLLIRFLERRKEAKFDEIRKEFCRKLSVPETIRFNLERGERRKLLGMPTDALLAHKDLFGKGWYERAEEQRDRIVRTLLDEENEGRVSQLATSEWGLDQVAAEKVLKIDLEGKESKGYASFSRVALEKLRPHLERGLPLMTRDGTPSALSEAGYLRPDQRVVNQRDFLPKPPSLTNPLVRQALYEVRRLVNSIIREFGRPARIHIELAREVKGTAIDRARRTHEMRERERQRDDAAEEIRKLAIKVTRDAIDRYLLWKEQNGVCAYSGRCIGLNQLFGGEVDVDHVLPRQRSLDNSFMNRVVCFRSENDAKRDRTPWEWLAEADPDKYEAVLQRTKYLPYSKAQRFRQPHVELEDFFARQFVDTTYITTQVHEYVRCLGTDVVCTKGIHTADLRQHWGLNTVLRDDGLDLKNREDHRHHAVDAIVVALANRSRLQQLAKLYRHGAVGEVLPEPWSGFRTTVEQVVNGINVAHRVRRTVRGALHEETLYGPTEKPWRERDGDRPWAKSWIERSGLFVHRKPIESLTLAEIEHIRDERVRELVIERLERHGILAGRKKRGANSEDGSRNIPKEVWKEPLLLTPRNGKSRGQPAVIKTVRVIKKEETIQPIRRGSAYVKPGSLHHLCIFEYKDERGRRKREAKFVSTIEAARRQKNGEPIILRSHPDRPDARFVMSLSRGEMFLGSFKGKEQLVRFVTAASTQGQLYFVPHTDARPSKAVTKYAVNANTLVGRKVTVDVLGRLRWASD

SEQ ID NO: 2699 - protein, 1291 aa, unidentified
  REGION 1..1291: note = Description of Unknown: Cas Enzyme sequence
MPVYLGLDIGSNSVGSAWVDTDCQEVHLAASVFPAGVDEQEDKRGAPKNQARRQTRSQRRTISRRAGRKRSLTRFLIGCRLLPADPKELQKLLDLNPWHLRRKALSEPLSPFEFGRVVLHLAQRRGAVGVITDPDDEDDPNRNEGRQVKKGMERLEALMKQAGPQTTLGQFIADRIDQSRGPIERAPADRCSRGTRRRRHRQAKRWAQRGEQPPDPHYQAPIRNRQYRMPEDQYLFAGRELIRNEFREIVKKQRSCPGSELAAMLTDESVKLVRQLDDPTQTGAWRHQGLLFGQRRTYWDTGTLGRCVLEPTDRCVPIADRHASYYRVVETVNNIHIQQRGREERPLTAVEREKLIRLLQGPLFQKRKGHLEPKSSASVTDIKHALGINTRDKTVRLNIEADEEREINTDWFHREIVHAAFTEARWEAMSEQQRESVNRAILKFDPDEPQDADRLRAGALAWWVLDAAAADRLIAAWKHRPKLERRLNLSRRAILNLLPYMEQFDAPSNRWPTQQEARKAYAAVLQERFAQSGREADRIAAQRYDTAAPGLTARARYYMGLEKHQIRQNGEVVRDTKGRPLALPPPAPMLSNPVVRKAIHEVRRHILAYLRKFRRKPDRVVIEFARGVKDTAKRRNLQLKANREREQERKLIEENLRGWGIAESNWDRAVLRVRLCREQNGVCPFSLQGANANRTITDKMAAEGREVEIEHIVPEGMSGKTMAFNNLVLCFREANRGKGMRTPADWLGPDGVRAMLQRIENAPIRQNRVKWERLQAPTPDEQAFRSSQLTDTAYAARQVAAYIADALFEGQGLPERGGPRMIFTTKGEFTARLRADWGLHESTIDRAHALDHRPTPEALSADPGIEQASRRARKEPKDRTDHRHHAVDALAIAMVGPELLEQVGRTAREAREYRDRTGYWPRRTAIDPPPAWATPESFHQDVVTAFEKLIISHRPVKRRLVGAFHEQTHYGPVITPLPRHRTEDHETLFTNRIPATGLSPNHLRVPDGWDELSAKLDDPNLPQQQKRAIARQLAAMEDPSPGKSGIVRDRALRDRLRKCLRGNGLKPAGFNAAEIKKLVADGKLTMASGVPIKSVVLLRTIADPVIIPRKKLQPGTGKMVPDMDPDDPQKPHPRTARIYIGGNNHHIEIRQRERKRKGQVVTEWAGKVVTNFEAAKRVRVENRDGVDRSDNDQGGFVMSLAEGEMIYARRWDPKQKQATGAPDYFVVCKLDKSGNSSRIHFAPHWDARKASEQDRWDVASGDLKDCGPEPGKPPQKVRVDPLGNVVILEND

SEQ ID NO: 2700 - protein, 992 aa, unidentified
  REGION 1..992: note = Description of Unknown: Cas Enzyme sequence
MSGFTLGLDLGPQSIGWAVLDESSRQMIATGVRVFPEGVDRDQKGGELSKNEVRRVARGMRRQIARRARRKRALCRILIESGLLSNNPCDQMKLDLLDPYDLRRRALTKKLHPHEFGRLLVHLNQRRGFCSNRKADRSSKKETAGILAEISELANTIQSGGYRTLGQYLSHLGADPHCRIRGRHTRRDMYEHEFEAVWSAQSEWHSNILTTELHDRIDRVMFYQRPMYWPKSVIGRCELEPSQPRCPRGHRLAQRFRLLQEVNSLRLVDSTADEERSLTPEERDRLIKILSAAKERSFEQIRKSLGLLETCQFNLERGDRKKLLGMPTDAILAHKNLFGKKWYGRSEDEKNAIVDDLLLLERNKIDESTIRQRAVECWGLSADSAERLLDVDLPDGYMNYSLQAIHKLLPFMETGLLLMADDQTPCALVKAGYQRPDQRPVRIVDRLPAPPELTNPIVRQALHEVRKLVNALIREYGKPTRIHIELAREVKGSSRLRQEWAKKMRQREAQRNVAAEKINEAGAKATRDAVDRYLLWQEQNEICIYSGKTISIKQLLGGEIDVEHILPYSRSLDNSMANKVVCFRNANADKSDRTPYEWLAESDPKRFEAVCLRASKLPYNKRRKFIQKEVVLDEFVARQLVDTAYISKAVAQYLCCLGADVLCSKGQLTAELRWQWGLGSVLRDDGLNLKNRDDHRHHAVDAIVIALTDRARLQQLAKIRRRGGTRLTGEILPDPWPNFRKDVETAVNAINVSHRVRRKVAGALHEETIYGPTEQPGQFVYRKPIEALTLSMVDDIRDDSIKQLVTDRLKAFGIAPGKGNKIPAEVWKEPLLMPSGVPVKKVRLIKRDQTIQPIRGNTAYVKPGSNHHVCLFEFIDEQGKTKCDAIFVSTLEAAKRVIRKETLIQRVHPNRPEARFLMSLSKNEMVLLTHNGKEDLYRFEKASSTSGQMWFRYHTAAGKSNNKTGLVSKMPNTLIARKVTVDPLGNIRWAND

SEQ ID NO: 2701 - protein, 1282 aa, unidentified
  REGION 1..1282: note = Description of Unknown: Cas Enzyme sequence
MAVYLGIDIGSNSVGSAWVDTDTQRVHAAASVFPAGVDEQEDKRGAPKNQARRQTRSQRRTIRRRARRKRVLVRFLVHRRLLPADPAELNRVLNLNPWHLRRKALAEPLSPFEFGRIVLHLAQRRGAVGVTTDPVDPEEGRVKEGMDRLAKAMAETQAQTVGQFIADRMDESSQPIQRVPDHQCARRTLQRRRRQAQRWAQHGQKPPAPRCQAPIRNRQYRLPESELLFAGRDLIRREFHRIVEVQQSFRESQLSDLLTDELVRQLDDPTPTRTWRHRGLLFGQRRTYWDTGTLGRCVLEPTDRCVPIADRHASYFRVVETVNNIRVQRRGEEERPLTPTERHEVLRLLRRPLFKKRKGALVAKSAPTVSDIKQALQINPRDKTVRLNIEADEEREINTDWFHREIVHGALTEARWDAMSEVDRESVNRAILKFDPDQPEDAERLRAGAVAWWRLDDAAADRLLAAWKQRPKLEKRLNLSRRAILNLLPYMEQFDELHQRWPTQQEARKAHAKALELQALTTGNAALRLAAQRYRTGAPGLTARDRYYMRLSKHQIKQDGDIVRDAEGRPLAVLPPAPTLSNPVVRKAIHEVRRHLLAYLRKFRCKPDRVVVELARVTKQSERQRNAMLARNRHREKIRKQIIDEVLPAPDAFGKQGAESLSLHQQRSAVDRVILARQQKQICPYCGQAGLTDFVAARGDDLETDHIVPYSRCGDDGLNNRVLVHRRCNQGKANQTPREWWGPAFDQRIRFAEQLFKDAPPDKFDYFTKRDYDRKWQNFTREVREEDEWKNSQLTDTAYAARQVAAYLADALFDGRGLPERGDGQDQQRIFFTVGKITLMLRKDWQLFETLKPEQTGLPEPLAAKEELQLAEKNRGDHRQHALDAVAIALTDPAIKHALATWAARAAEYRDRCGKWPKRAPFPPPWGSVASFRRQILAQVYQNLVVAHRPVKRRLVGALHEETHYGPVIPPLPRHRAEHPDSLFTNRIPAVRLTPNHLRMPDQWDEWSRRLEDPNLPSHERRAILKRLAAMEDPSPGKSGIVRDRALRDRLRKCLQTNGVDPDDFNPPQIKKLVADGKLAMPSGVPIKSVVLLRTIADPVIVPRKKLDPITGTLVPDMDPADPTKPNPRTRRVYIGGNNHHLEIRQRQRQRQGQLVEEWVGHVVSAFEAARRVRLEKRDAVDRADNEHGLFVMSLAEGEMIFARRKDRPEEPPDYYVVCKLDKAGNSSRIHFAPHWDARKASEQDRWDVTPSDLKLCGPEPGKPPQKVRVNPLGEVVVLDKD

SEQ ID NO: 2702 - protein, 922 aa, unidentified
  REGION 1..922: note = Description of Unknown: Cas Enzyme sequence
LDAPLAPWELGVVLFHLAQRRGFRGSRAGNADGKDGPVYEDISALKQEILGSQSRTLGEHFHKLREHAVRKGLAEPRVRGRHTTRAMYEAEFAAIVDAQTPHHARTLTPELRERLRDALFFQRRLKPTDELIGHCELDPAARRCAVAHRAAQRFRIAQEVTNLRVIAPDGQESELTSEQAARVRSALAGSEKQTFEQLRKLLGFSEQHRFNLEQGKRTTLYGNRTDAKLRSKAVFGAAWQELTEDERDRIVELLLREDDLETLERYAREVRGLSPEQAHAFARVELQPGYLSYSVGVIRKLTPHLERGALLRHKDRARSAIHLAGFTPIDEMPVPMFDRLPHPPTDIRNPLVLAALHQVRRVVNAIVHEYGKPGAMHIELAREIQGGIEQRRERTIAMRKRERERDDAAELIRANCPGVRVTRDAIDRYLLWRDMKETCPYSGKTIPLAGLFGPDVEVDHILPYSRSLDDSFANKTVCYRDANRDKGQRTPFEWLGGDDARFEAMIQRVRHLGAWGQRSKARKFTQQTCELEDFIARQLSDTAYICRQTAAFMRHLGVDVVCVKGQSTADLRERWGLNSVLRDDGLNLKNRDDYRHHAVDAIVVALTDRSRLQALATFDPASQRREKRLAAREQPAQVDKQTGELLAAAQPWTHFREQVDASVNAINVSHRPQRRVRGALHEDTYYGKTSEPGVYTSRKPLAGLKPGEVERIRDEGIRKAIVLRAQARGMALADAKEFPKDFWNEPLFQVRRKPGTPRTRDEWETTHIPVRSVTVAKRDSTIQALGTTGLHVKPGSNHHVCIFEYRDDKGKVRRDAVWCSLLEAVQRITRKEPIIRRRHPEVASAAFVMSLCPGDMMLIESEGKQRLMRFVTGASTQGQLYFSDSRDARKSADRKDKAKKATTLVGSKVTVDLLGRVRWAGD

SEQ ID NO: 2703 - protein, 1070 aa, unidentified
  REGION 1..1070: note = Description of Unknown: Cas Enzyme sequence
MDELSSIKFSKLEGFMLRFAFDMGTNSIGWAVVDANQNDSEVKILDMGVRIFSDGRQPGRKGEPGDPLNQTRRMKRAQRRQLERRKRRKQAMYRFLKSSEYLPLDKDDYDKWRLLDPYQLRAEAINRELNRYELSRVMMNLSTRRGFKSNRKTDARSKDVSVYKDKIKAFATELGDRTLGQYLYEKRKTDPNAMIRFRPGTHFYPDRSMYEKEFQAIRDKQSIYHPTFDWERAYRTIFFQRPIRRPQRGNCTFYPDEARAFFVQPSTQLFKALQDINNLSYLTDREHMLEPSQKETILEAIRVKKKLSFSQIRNMLNLLNDAVFNLEKGTKDALEGLATDIDFSKKLGSRWRELDLETRDNLVELFIVEDDDQKIKEGFAQYGFSEQTIHEAINTIDLRAGVSSLSTRFMRDCIELMQSKWIRYDEAVTQLGLRHYRPFEQDELLEKLPYYGKVLPYMTFSSRPINRSNIENQDETKNDEEKYGRISNPTVHIALNQLRKLCNILLDLFGKPEQIIVETATDLKNSRKKIAQINAKQRENREKNTRIRGEIASIIKCSPDEIGSSDILKYQLWEELGNNSASRNCIYCGNPISAHQLFNGEVEIEHILPFSRTLKNNRNNLTVAHRWCNNIKGDRTPYEAFGSSPNGYTWAEIEARVSDLFRSNFQKKANFLKEDLEQNLSEESSFLESQLSDTAFITRAVKQYLSSIIVYSNIITTPGQLTSILRSKWGLNEILSQYDDKNKCDHRHHAIDALVISLTTRSMLQRFASANARNYAYKIMPPPFPVDRQDLKERLLAMLISHKPDHGLEGPLFDESAYGYNLNEKPPQEFFIRKPLASLTWKIIQDEDILSTSIRKKISEFLKEQRISKANSDDRALQRAMIVFMDQDPSHPRSVKIRAKNAEGYMSLEPGKNGRTGHKAYPKTDVLCVDIWQIPVGNKKYKFVGDFKKRADVHSMDGIIEKNRPHPAAKFLMRLYKNDIIRIQNVYGSTYARVSTFSATQNKLDLQPIYASSDIKSWLQSTRKEFCGSFWRPIETTQNFVSINALFRTPGNNISHVNITIDGKLSCRKI

SEQ ID NO: 2704 - protein, 913 aa, unidentified
  REGION 1..913: note = Description of Unknown: Cas Enzyme sequence
DDGGKLKERIEELKTKLGGHTLGQYLWDRYKEEVPVKGEDRKAGGIRFRGESELYPDRSMYEAEYDAIRARQEAHHTLTPDQWDRFRNRYVLFQWPLKPVERGACTFFPEHQRHWKDTPIGHDFRVYQELNALRWVDEDHAEHELNMEQRRAVLSLLLTRKSEVKFSSLRKEKNSDGDVLFPGCQRFNLEDDKRKGLKPHGIAAAFIADPHLVSLWEVRERVDGDNGRLDDIFEALLNEADSDALTRRLEQEFNLPVEAVASLSGIHLSRVTASVSRQFMEAMVPIMRDQGLLYWKSVGEIKDKDGVPLDFTVRVSDGEHEVLPYYGEVLKGSMLGADPKADPIEDPENYFGRINNPTVHVALNALRRVLNTLIERFGTPPVQIHVELSRDLKKTKKLRDEETKKQAANQRENDRIRSLLKSHGMANPSALDVKKVKLWEELGENELSRRCPFTGRVISSVAQLMNGDVEIEHILPFRRTLDDSFSNLTVAFRWANRLKGNHTPYEAFADGRFEKEGIVWEDVRARGEALHRKSWRFGPDAMARFEKEHDFIARQLTDNAYIARSAVKYLGCLKGVEKIVPNRGGLTALLRGKWRLNGILSDDNLKSREDHRHHAVDAAVIALADRSVLNAVSNLTARGADDRVRIDVPQLDVRIEKSLRERVPRIVVAYKPDHGWQAPMFKETAYGFVPVEKRDPGLPEHNLVTRKPLTSLTPKEYATVRDPVIRQRVLECVSNAKQKGDKPEKALVEFGKKEGIKSVRILIKDQTVEPIGSAPYKGYKPDSYVCCDVWRCPKGKPGKWKSGEYEWKGEYWSYADTPNGVPDAHTRKPHPSAKFIARLYKDDLVAYEEAGQWQIMRVAGFKTTTNRLEVKPYNLAKSDRAFVSVNVLGERGLRKLRVEPDGRVRGLPAAARS

SEQ ID NO: 2705 - protein, 1046 aa, unidentified
  REGION 1..1046: note = Description of Unknown: Cas Enzyme sequence
MLWRLALDMGTNSLGWAAFALSPSGTIENLMESGVRIFPDGREPSSKDRVGESLAVERRLARGARRNRDRRLKRKKQVIDRLVQLGLMPRDKMARRTLEKLDPYELRAAAIERPLTCHELGRVLFHLSQRRGFLSNRKSDSNDEETGKIKPKISELRVRLGDQTLGQWLNDRLKSGKSIRFRGEDGDLYADRAMYMQEFDRIRTQQEPHHNLTVNDWDNLRNGNKTQGFDGIFFQRKLKPVERGRCEFFIDEFRAHKDLPVAHDFRILQEVGNLQYYDQNQEKHNLDKHQRDILIKTLHHQKTLSFGKIRQLKTPDGGRLFPRNCLFNLEEGPRDKLNGNITAVEMRKPDMLASLWDELTPRQQNDLIEMLHEAQDDDQLVRDLITKFSFNDEQARAVSKFKLSAATTRLSRKFMSLCARVMRDQQLGYDAAVREIHDDDGVFFHHSKYEVDQLLDKLPYYGALLKGSTIGGKPDRYNAGENPEQHFGKINNPTVHVALNQLRKLVNRLIDRFGPPTEIHVELVRDLKKTARARDEIAKKNKKFAKANEERAKIFRELNGGREPSGLDLKKIRLWEELGPDQFTRHCPFSGKVISAAMLFNGEAEIEHILPFSRTLDNGTANLTVAIRQANRLKGNRTPYEAFAGDHHADQGMVWCDIAERAKSFETNKRWRFDADAMDQFEKDGGFLARQLTDNAYISKLTKRYLSHICDQNKIATIPGGLTAMMRGKWHLNSLLGDHNYKERNDHRHHAIDAFVVGLTDRGMLKRVSDQTKRGADMRVHIDLPDITPLRNQLNEKLAGMIISYKPDHGTNGKMYKETAYGIVPEDKQDTDLKGYGLVTRKKIASLTEKEISAIRNPGWRSLIEQHIYEASANGVKLDKALADFGKEHGIKTIRILVSNQSAIPIPSASFKAYAPDSYVCVDIWQLPKGKPGKWKKGEYDWKGAFWSYADCKGKAPDKNEGKIDGKPIHPAAKFITRLFKNDMVELEEGNQPTIMRVGGFSTTDNKIDLRPQFKTDGKRKFISINVFKTLFKKKLYITEDGQQRR

SEQ ID NO: 2706 - protein, 1043 aa, unidentified
  REGION 1..1043: note = Description of Unknown: Cas Enzyme sequence
MGYRLGLDLGTNSIGWTALTIDPAKEGLERFSLLDMGVRIFPDSREPAKGGRVGDSLAVARRMGRGMRRNRDRGKNRMAYMMRYLIDLGLMPADKEERRELECLNPYQLRAEGLERPLSPFELGRALFQLGLRRGFKSNRKESNEAKEETARAQQISALREALGNKTLGQFLWQRLQEGEPVRFKEGTDWFPDRAMYAEEFNALKDTQLPHHQLSEEEWDRLRDNCILFQHPLRPVERGRCTLRPEYRRAHRDTPIAQWFRIYQDVGNLRWIDEKLQSHPLTPEQRDAIVQTLLTQKTVTWGGIRKLKGVDGKPLFHRDYRFNLESEQRKKLDGHKIAIWMKADERLQDLWEMISPQTLDDIFEDLHGTLEDDKLVPHLIRKHKITSEQAEAFAELPIGSMTVNLSRQVMEELLPIMRDQGLEYFDAVTQLCDETGNPLHHSALENIDKREKLPYYGEILTQSVMGEDASKDPQTDPEGHFGRIANPTVHVALNQLRVLINSLIERFGEAPAEIHVELSRDLKLGPKQRNEINKEIAKNTKRNEKLAALWREISNGREATARDLKKVKLWEELSTDIMARRCVFTGKNIAGHHLVNGEVEIEHILPFSRTLDDTMANLTLAFKGANRVKGNNSPFEAFGDNRHPDFDWEGILDRASRLPKNKRWRFAADAMEKWEGENDFIARQMTDNAYIARSARKYLNCLSDHVVPAPGRLTAMLRGKWHLNLGEDGRKSRDDHRHHAIDSFVVALSDRSVLQRVSRLSARGADDRIHMEIPELPAQLRQDFKTKLENILISYKQDHGIQGRYFNETSYGVLPESQHRDGYNLVTRKPIASLSPKELDAIRDPLIQANIKEHLYDLGWYGLSKADQAKKLPDYLSAFGKEHNIHRLRILVKNQSAIAIKSAPHKAYAPDSYVCCDIWALPKGKKGKWKKGEETWQGVFWNYAECAKFSPDLPDKNTQKPHPAARFVMRIFKDDMVSYQEEGREHIMRVAGFSTTNNKLDLKPHNLADAPQKFFSINALRDKDLCQVFVSPDGRYLNKRRKP

SEQ ID NO: 2707 - protein, 1049 aa, unidentified
  REGION 1..1049: note = Description of Unknown: Cas Enzyme sequence
MTYMTWRLALDMGTNSLGWAAFSLNSFHQVGRLKDSGVRIFSDGREPSSKDRVGESLAVERRTARGARRNRDRRLKRKRQLITRLVQIGLLPEEAHARKSLETKNPYALRSTAVEHPLPPHDLGRALFHIGQRRGFLSNRKSDGDDEETGKIKPKISELRQALGDKTLGQWLYQRDKNGQSTRFRGEDGDLYADRAMYLNEFDRIRAIQEPHHSLTASDWDDLRNGNKGQAFDGIFFQRKLKPVEKGRCEFFIDEYRAHKDLPIAHEFRILQEVGNLQYYDQDQQKHDLNDEQRAAVFEKLKSQKTASFKALRSLKSTAGELIFPRGCSFNLESGPRDKLNGHATNIDMQKPDMLGEDWLTLSSAQQNDLLEILHDAADDDQLIKDLIEVFSFTKEQAKSVSKYKLSPATTHLSRKFMERCASIMREENLGYDAAVREVYDDDGVYFHHSRYDVDHLLEKLPYYGELLKGSVIGAKPADYDPIETPEQHYGKINNPTVHVALNQLRKLVNCLIDRFGPPSEIHVELVRDLKKTAYARDEIAKKNKNFAKANDGRAILFREQNNGRDPSGLDLKKMRLWEELGPDQWTRPCPFSGKIISAAMLFNGEAEIEHILPFSRTLDNGTANLTVATRQANRLKGNRTPYEAFGHNQLADQGMVWRDIAERAKSFPEHKRWRFDADAMEKFEEEGGFLARQLTDNAHISKLTKRYLSHICDQDKISTIPGGLTAMMRGKWYLNSLLGDHNYKERNDHRHHAIDAFVVGLTDRAMLQKVSNQTKRAADDRVHIDLPDITPLRNQLKDRLSSLIISYKPDHGTNGKMYKETAYGLVPPEKQDPDLKGYTLITRKKIAALTAKEIGAIRNRGWRSRLEQHIYEAKANGVKLDKALADFGRENNIKTIRILVSNQSATIIPSAPFKAYAPDSYVCVDIWQLPKSKAGKWKKGEFEWKGAFWSYADCKGETPDKNKGKIDKEPIHPAAKFITRLFKNDMIELENNGERKIMRVAGFSTTNNRIDIRPQYDTDGGQQYISLNVLKNMSLRKLHIHPDGQLRG

SEQ ID NO: 2708 - protein, 1076 aa, unidentified
  REGION 1..1076: note = Description of Unknown: Cas Enzyme sequence
MEVKMHWRLGVDLGTNSLGWWAFRVTREGTGDRARWQPVESMDGGVYIFPDAREPSKNGRVGDSNAVARRMARGMRRNRDHGNNRIRLFVRDLISIGLLPENPAQRKELFKTPKKATPETDVFNPYRLRAEAIARPLTPHEIGRALLHLGLRRGYKSNRKEASEDDGGKLKERIEMLKARLDGRTLGQYLWDAYVNEAKREKDKGRRKGLRFRAENEFYPDRAMYAEEFAAIRKTQTPHHQLTDADWDRLRDRYILFQWPLKPVERGRCEFYQSESRHWKDTPIAHDFRLYQELNNLRWIDANLASDSLDAEQRTGVLQKLMSQKSEVTFKSLRKLKRADRTPLFPADSHFNLESEKRSGLNSHKIAATMSADPILAPLWERRERENDGMLDDIFEILHRAEDDREAVSCLMVDFGLDEETAKHLTTFKLSSGTTNVSSRFMDQIVPILADQGLVFSDAVRELTDDEGDQFHHSLRDDKRRWVRLPYYGDVLSGSMLGADPSADKATKPEKHFGKINNPTVHVALNSLRRIVNTLVERFDAAPVEVHIELTRDLKLPRKKRDEINAEQAKGKRENERIAALCAEHGIHDPSARDIKKVKLWEELGKDQFARCCVFSGKSISAAQLFNGEAEVEHILPWSRTLDDSMTNLTVSMRWVNRLKGNKTPYEAFHGDHYTSQSIVWEDILQRASVLPKPKRDRFSPDAMKRFEGEGGFIARQLNDTAYMARTATRYIKALKGVENVLANPGRLTAMVRGKWGLNGILGDDNKKTREDHRHHAIDATVIALTDRSVLNEVSRLTARGADDRVRIAVPDLDEGLRHAIRVRVPEIITTFKPDHGLQGRMYNDTAYGFVPEDKRDQDLPQHNLVTRKALAGLTPKECEAIRDQKLRAAVRDYLLEAQGAGVKPEPALAKFATEKGIKRVRVLIKNQSVKPVPSAPYKGYALESYACCDVWRIPPQKAKNGKFGRPKWEGAFWPYAETVGDASPDKALKKPHPAAKFVTRLFKDDVIAFEDGDRTQIMRVFGFSTTQNKLDVRPHFAATAEQTYVSINVLSEKGLRKLYVTPDGQILETRRRGAS

SEQ ID NO: 2709 - protein, 1074 aa, unidentified
  REGION 1..1074: note = Description of Unknown: Cas Enzyme sequence
MHWRLGIDLGTNSIGWWAFRVVKKGTGESVRWQIAESLDGGVGIFPEGREITTSGLVGDSNAVQRREARGMRRNRDRGNNREKSLKKVLAGTGLFPRAREEKDSLFRNQKKKNGDPERFNPYRLRAEAIERPLEPFELGRALANLGKRRGYKSNRKEASDDDGGKLKERIADLHTTLKGRTLGQYLWESFQEQNKREAEGEKRTGIRFRGENPFYADRSLYEAEFVAIQTKQEPHHTLTPNDWEKIQSKILDQFPLKPVERGWCEFYTDEKRHWSDTPIGHDFRIYQELNNLKWIDENEVAQHLTTEQRQAVLHTLLTRKSEVTFASLKKAKTPEKNKLFPPIGRFNLEGGKRKGLKPHKIAATFLASPILAPLWQTREETGVPLLDDAFEVLHQAEDDAQAVASLVEEFSLTEEQTKALCDLKLASGTASVSRRFMEGIVPILRDQGLVYSYAVAEMRDENGQPLHHSLRDDGMRWKRLPYYGEVAPHSMLGADKQSDPEHDPEKYFGKINNPSVHSALNALRRLVNTLTDRFGTPPVQIHVEMTRDLKQSRKQRDDAAKQNRTNEAENNRIKKFCTEQGFPEPSALDIKKVKLWEELNGDDLVRLCPFSGKPISAAQLFNGEAEIEHLLPFKRTLDDSRANLTVAHRWANRLKGDRSPYEAFGDDQHADKGIVWEEILGRIEALPHNKRWRFGPEAMEKFEQEGGFLARQLTDTAYMARFASRYLRALEGVESVVTIPGRLTAMLRGKWGLNGILSDDNRKHRDNHRHHAVDAAVIALTSRGVLNEISRQSARGATDRLHIRVPDLEPEIREAIRQRVPDFTVFHKPDHGLAGKFFKETAYGFVDKRKRDADFKEHNLVVRKPLEGLTPAECKTIRDPDLRKKVDQWLYEAKGAGVKHDKALAEFSKEHDVKSVRILVKDQTVAPVPSATHKGYKTDALAFCDIWRIPKGKPGNWKPGEYKWEGQFWSFLETAPFIGKGEPNKEIKRPHPAAKFVCRLFKNDMIAVWEKGEVTTYRIGGFSSTNNKLDIHPVDRHFSGHNYKSINALGGLSLRKLYVTPDGRLLNSSGWRSR

SEQ ID NO: 2710 - protein, 1207 aa, unidentified
  REGION 1..1207: note = Description of Unknown: Cas Enzyme sequence
MVILGLDIGSNSVGSAWVDTDKKEIHLAVSVFPAGVEEQRDKRGAPKNQHRREKRSLRRAIARRARRKHMLRKVLIEAALLPSDPEELHRIFYPPSQEEAERWDPWTLRREALERELHPYEFGRILVHMAQRRGALGVTTAGDRRDDAGASTEEGRVKEAIDRLRKEMQKRNARTYGELMAILRDERKHPLPGKHHVTYSDPIRNRRDSFEFHADRQLIREEFHKIWEKQKSFGGRLAELLTDELLLKLDDPSEDETWLHKGILFGQRRTYWKVSTLGRCELEPTDRCCPLADMYAQEFRVIETVNNIRIEERGKPPRSLTPEERAKVIDYLRKSKTASPASIRKVLGLNKKEIKPFVSLNIERDPNRQINTDWFYREIVHGVLGESRWLKMTEREKESVNNAILKFNPDKPEHEEKLRAGAKKWWGLSDDQVDRLIQAWKGRPKLEKRLNFSRRAIKNLLPYMSQAIRRSGPTNSEFDPINHRWPTVNEARQMFAEDATNGASPEQRERYSLKHRVLRKADRHFLKKHPDLLPPAPVLANPVVRKAIHEVRRHVIAYIRKFGRKPDRIVVELARSARQSARVRNAKLALNRKREKIRKQIIEEFGLGRLPLNQQRAAVERVLLCRQQKGVCAYSGRRITDREAAAGMTGDGSRLEIDHIVPWSRSHDNSLNNKVLCFADTNRDKGNRTVKEWLGEGSKAFEELEQRFGHLEKGKPVEEYFTKEDYARKWENLHRDAPEVEEFVESQLTDTAYASRQVVAYLRDALYGGESDGSRRVFTTKGIYTAILRRHWGLIESNLDAELHGIKDEAAGAGDPGIARKGEKTRISHLHHAIDALVIAFSTPDRIQQLARLAQEQETSGAKATRNKKKLPPPWGTPEEFRRQVVDAMRKIVVCHRPVKRKIVGAFHEDTMYGPTDQPDQFTNRIPAENLTPNHLRVPDGWDELSQKLEDPAISEAEKKQIRSRLAEMPDLPPGKSGIVRDRALRDQIRKCLRRNGIDPDGFKSREIQDLVRRGELRLQSGVPIKSVVLLRTHKDPIVVPRKKWDDKLGRYVPDPNPRAKRVYVGGNNHHIEILEDVRTGKWTGEVVTMFEAARRVRVEKRDPVDRSDRDGKRFVMSLSEGEVIYACRPNKGPNGSGTAEYFVVVKIDKYPARIYFASHWDARSANEQDRWNIVPSKLKECGLAPGEPPQKVWISPLGEVRPLVRH

SEQ ID NO: 2711 - protein, 1373 aa, unidentified
  REGION 1..1373: note = Description of Unknown: Cas Enzyme sequence
MSTRYTLALDIGSNSVGSMWFDRKTGSITTGTSIFPAGVDETEDKRGDPKNAKRRMTRRARITLRRRAERKRELRLKLIASGLLPNTAHEFKALLQSTDPWTLRREGLDKPLTPHQFGRVLLHLAQRRGALGLHIAEVEDGEDGQPEASDDGKVKAAIGEMWIKMRDAKVRTFGEFIAMTREDREHVHPLPGPDPRPKNERKGPREYRDAIRNKAGNYEHCADRAMIRDEFAKLWEAQKKQKGETTKLLTDALRAELDNEQGDSTWRHKGLLFGQRRQTWDLGTLGRCVLEPTERCAPHADMYASRYRVVETVNNLKIVGRGALPRPLTKDERQKVMAYLSGPLGMLPSKTIKDKKGTDGKVVKGRVIPERPKQTVSVTDLRELMGWGKATKTTQFRFNIEADEDREINTDWFNREIVHGAIGVQAWANMPESLREGINKAILKHDPEQDGEAAALKAGVMKWAKLSDQQASALVAAWAKRPKLDAKRLHMSRRAVRNLLTVMDRPEPWPEPKGEVGKGHRWLTQIEARKLLAGDADFLDVTTGKPMDDITRRRYATGAKGATASDRHYMGKHVLTRSGKPIIGPDGHPLAEPPPAPLISNPVVRKTIHEVRRHLVEYMTTFGRKPDEIYIELAREAKMGAKDSDKALFRNRLRNRIRNDIIDHFGLDTCTPTQQRAAVDRVVLSVQQGGICPLCGNQKVRSRITPNMAAAGDDCEVAHIIPKGGGGHNGLGNVVLAHTKCNRDMARRTPRQYWNDTLDGGFETGFRWIEGVFCDVSRPKFSEVKKAEGDALWACYFDWKDDKRKIEQFAKDVKDIQDMTQRQEAATKYAARQVMAYLSDALFDGKGLPERSGGNDQRTIFASDGMWTSRLRREWGLFFDPHHAKAKGLSNPEEHVRKEKNRGDHRHHAIDAIVIGLVDAQVMYEGRELTARNAWDGREKAADMAGINTADEEKMDNYRRLHPIGPPAPYKSREEFREAVKAAVFGDDSTPRPICHRPVKRKLVGALHEETLLGPALDKQGNPTNNFTAKKGILALSPNHLRMPEGWDELEAKYHDGRTSALRRSAILRELAAMEDPSPGKSGIVRDRALRNQIRKCLRAAKLDPDAFSANEIKKLAESGGIKQASGVPIRSVVLLRTMNDPVLIDRKRPEYETGNMVIDSDPASRRAYLGGNNHHIEIRAAKNKHGKEVFTGVVVSGFEAARRKLAKLRAFRAANIPKPDVVRGLSKADRAKLRPMIATIEKTYSLVNRADDDALGGRFVMSLCEGETVWMRPKVKDGGTQADAGYYVVAKLDKEVNPEKKTATASIVFVPHWDARAAGLRKDSGGKPIPDSKREQFEATPSDLASLAPPNHPHAVKVRVSPLGVITILDRD

SEQ ID NO: 2712 - protein, 1356 aa, unidentified
  REGION 1..1356: note = Description of Unknown: Cas Enzyme sequence
MLPGDEQGRHTFLSVGPDAWQLRAEGLERALTLMEFGKVLLHLGKHRGARVKKTVPVPTGDEEAMELVDGSTDQAGADLEPGSFNDEAEEGEQIGQPGEPARNDAKEKREILAASNRVARDMKAAGVPTYGALVHAIRSGQFVPEHAPKDMKASPEGRHIRVRNTKGVYVYCPTREDIRHEFRKLWEQQAKGGGELASELTDEYRVLLDDEDRSTDRGRPFAGNNARAQFRQRWIDSGLLFAQRWTTWDVGTLGRCDLHPSERCVPRADMYASRYLVVETVNRLRLVEEDGSSTPLKGDQRQAVLLLLCGPFKVHKSGQHKGKVCREFSNADIRGVLQLPKFRKEQWPKLSSEVEDEKKFPGDWFHREIVLGAFGECRWEELGERRREKVNRAILRFDPDEPSSSPKFKAHLAKACGCTPEEIAKLTAAWEKRSSVQSRLRRSRRAIRNLLKVMDVDPPDGKSAPSEIEARRSIARSLDFTDATDGRNLDDRTKERYLKSSRGLNAAARQYQKKHNGRLPPPQMMMNPVVRKSLHEVKSHLEAIRARFGKPDAIVIELFRDAKMGKKELDRHNAQQARRATVRLGILRAYGPAHAELAAYEDNILRVLLALQQRCLCPLCGQTMTPGDNDCRDGITLRTAFEGTGCQLSHIFPIARGGPKGPRNMVLAHTQCNQSMDARYPREWWGEDHYKTIAKTWLSRIYNAEPVTSTDRDKTDKTFGAWWPTYFTKRDNRQKLAMFGKTPDDFKGFTEQQRNDTRAATRGVMRFIADGLYAGKGLPEDAPGLAQTGQTERRLIFARDGWIGNRLKEEWGLVFNVHGGQAHAVERSPAQRKAAEKDRKDHRHHAVDAIVLALASDSVIAQWHTRERDAQSQPGGAAAAKNFRRNNPIFPPGPWGGKGASFKQAVDALRAEVQRAVYGEGTGDRPVVHRPEGTRIRGGFHEDSLMSPAAGRESPRYMGDPDEVFVDSIRVADLKPEHLRLPTPSTPDSVRERLTAMYERSGLTTKAAKAEAKRQLAAMNGDFGQWAEMDPAPGKGGLVVSVRERTRLRKMIESFNFVRTKKGGSRESETYKVKIRNKKTKDTGEEFDSDTAEQEESDVDSSDSSLPSFTNRHAAEMAAAGGFKDSKGRPILKVKRLRICKRPVFVGRQREPGMSQDELRQLRAFVGGAIHHAAYYVDNKGKTSAVGVTLDCAVKRNAERIAALKEAGVPSADHLRRMARHERRAFREKLRSINAAHPIVDGRDDPKRGRFLMSLAIGETVWMRPSKDEAPGYFVVLKIDVVKSGSATAVLAAHWDARPSGERRSLMGKGVKFSGRDKVEMPPTDLRRFAPPGHDWPVKVRPRLYAHSGLEPVKRS

SEQ ID NO: 2713 - protein, 1179 aa, unidentified
  REGION 1..1179: note = Description of Unknown: Cas Enzyme sequence
VRILSFDIGSSSLGWSLIDPHNRCIVNLGVRIFPEGVDRDKKGGELSKNERRRLKRATRRQAQRRARRKRRLRDALVEAGLYPADTVAQAEYDGMDPYDLRRRALDEPLELYELGRVFLHLGQRRGFLSNRKGDRGKKQENSKLLAEISELAQRMDRAGDRTLGEHLAKRMPTPGEAAATPMLPENEDAADDRVRRLHTHRTMYLEEFDRIWEAQRRHHPSLLTDRLKYGESEKPQRFPVEPDPPRKGKKDQSPLRRYGLHGLIFFQRPLYWSEKSIGFCELEGEQRRCSRADRLAQKARLYQEVNNLRIIDTDDRERDLEPEERRKLLVYLSSRKEATFDQIKKHLGLFETARFNIERLAKGSNQIGGRSKLKGLETDYILSQDDCFGDRWHELAEDEKDAIVRDLLDPKLDDARTFDKAVSQWGLSAAQAEAVLNAVDGLPTGYAKLSRKALLHGKTGDCGILAALEAGLPMQCGEGRDDHGKPTDAIHAAGYLRADERDVKLLKELPEPEDIPNPLVRRALYEVRHIVNAIIRKHGAPDEVRLELAREVKGSLDKRQQTRIKQIEQQRRRDEAAKRIRDVGYRPDRKSINRYLLWEEQEGLGIYSGKPLSIEMLFGGVVEIDHILPRPRSLDDSMANKALDLREVNARKGNRTPWEWLERDGDPQVDYDAVLQRARKLGHYGKYRKFTQKTLELDDFIARQLVDTAYISRAVVQYLRQLGRPSGEKNQDGTEKLAPVHVVGRKGMTTATLRHLWGLNSVLHDTGFNAKKNRDDHRHHAVDAIVIALTDEARLKALSEAYEEYEKINPDTGEMELRAGYGRIQSSKLEVWPTFRRDVEDAINQIKVSHKTQRGVQGQLHEETLYGKGDNPQEYVARKPLEALSLNEVPRIRDAAVRAKIEARLREFNLDPGRGKGGIPAKAWKEPIWMNEEKRIQIKRVRVLKKEESVVLIRGGADNYHGGEGAVAANQRHRAGSGGFVKPGRQHHVAIFCTLDRKRQPKYHGVFVSMLEAAKRKRAREAIIQRHDPDKSAARFVCSLCSGDSLIIYDPVEELERIVVVTTLVSTQQRIHYKDANDARPTSERGADAGTTANALFGKLRAQKVAVDQLGRVRYEDQQKPAELAVDPDIAALARQRIAAKVSERAIKCRLADMGKKHLGAQFTAELHRLRLNESKSSD

SEQ ID NO: 2714 - protein, 1364 aa, unidentified
  REGION 1..1364: note = Description of Unknown: Cas Enzyme sequence
MITLGLDIGSNSVGSAWIDTVTGQVTAGVSIFPAGVDESDDKRGDPKNAKRRMVRRTRITLARRSERKRELRLRLIAVGLLPAKEEDFRTLVDETDPWELRRRGLDQALTPFEFGRVLLHLSQRRGALGLKMSDPDNTDADGEDAAAKEDGKVKTAVQEVRAKMQDCKARTFGEFIAIQRAERVTAITTEDKRPTDQRKGDRLFRGPVRNKAGSYEHCADRGMIRHEFALLWQAQRGFDGQTAALLTDQLRNELDNESGDDLWRHKGLLFGQRRQSWDLGTLGRCTLEPTERCIAHADRHASLYRAVETVNNLKVIEGTAEARPLTPDERAKLLDYLRGPLGMDKPRKVKGKEQPAKPKTTVSVSDLRKQMGWSARAGKSDPRRFNIEKDEDRQVNTDWFRREIVHGAIGVDAWEAMPEDLREGINRAVLKFDPDEEAEAITFRKGLMDWGTLDEARADALIIAWLRRPRPDSKRLNISRKAVRNLLVFMNRPEPWNDPKRPGQTRWLTEIEARKMIAEDGDFIDATTGRPLDDRARPRYATGAKGATARDRYYMRKHILHDINGEPIIGVDDKPLAEPPPAPMISNPVVRRAIHEVRRHLVAYMTKFGQKPDEVYIELAREAKMGAKDADALLFKNRLRERIRKDIIDQLGLGSLSSTQQRAAVDRVVLAVQQGGVCPLCGNQAVQRSLSPELAASGEGCEVAHILPRASGGHNGLGNLVLAHTKCNRDMARRTPRQFWDDTLPGAFDHGMRWVEGIYGDIQRPKPSEVKNASGLPLWKCFFAGGPGRKGLSYDQRKIEQFKKNISDADVQGMTERQSAATKYAARQVMAYLADALYDGKGLPERGGPRKIFATDGMWTARLRREWKMYFDPHGFKANGLEDAEEQERREKDRGDHRHHAIDAVLIALSTQPIRNRWEQREKQAELTVPNSANEEAMDNYRHANRIPPPPPFPDVQALRDKVRQAVFGDSTKPRPICHRPVKRKLIGALHEESLFGPVVDHGGQPTGNYTAKKSVLALDPNHLRLQVDEPEKQAVERLTARRQKSHRVDAGTAKKWAKEVIASASYTPAKVDPPTGKSGIVRDIGLRIVLRDCLVANGLDPDNFKANDLKKLCDPTKPDGWKIRMPSGVPIKKVVLLRKMSEPVLIPRKRPDYATGQMVYDSNPKATRAYVGGNNHHVEIRVDDKGKWTGQVVTAFDAAQRKLARLRAFRSEGIPKPKDFTKLSPAERKRLHPIISRIEREHPLVDRTDNADKGGRFILSLCEGEMLWMRSKPGSGLPDEPGYFVVAKLDRKGNSCGIVVVPHWDARAATERKNASGDKVPNSKRIDFAVTPTDLATLAPLGHEHAVKVQVSPLGHIRTLHRD

SEQ ID NO: 2715 - protein, 935 aa, unidentified
  REGION 1..935: note = Description of Unknown: Cas Enzyme sequence
LSNRKRERKSGEVKGMLAEISSLAERIEKTGCKTLGEFLHHNARAMDHANRVEDDHVRGRHTLRQMLENEFDAIWQQQSVHHPDLLTDKLRYGSAGPRKQPEHPHPRSEGSSLLELFGLQGMIFFQRPIYWPRSVVGACELEPKAKRAPRADRRAQRFRLLQEVNNLRYLDPDTREEKVLDEGQRALLLSKLSRAKEMDFDKIRKDLGFLETVRFNLEAGKRKKIQGMVSDCLLASKSAVGPNWHALPEATKNAVVALLASSTDDDETHEALVKHHKLTAEQADAALDVDLPTGYVNLSVKALENLLPHMERGLRLMGNDENDSAMHAAGYMRRDELQRRIFDHLPDPARIRAGDARIGDIPNPVVKRAIVELRKVVNAIIREHGKPDAVHVEMTRTVREGPARRSEYSSRIREIEASRDHAADEIRKLKLQGVNVHVRRDSILQYLLWQQQDHACIYCGDKISQAQLFGGEIDVDHILPYSRCLDDSQMNKVVCHRKCNADKGNRTPHEWLADSDPDRYDRVCQFALSLVRRSDFPYKKYRRLIQKELVLDDFIARQLTATGYIASATAEYLRCLFEHDHDVLGLKGELTAELRHQWGLDDLLSSLPDSPAWREQSNLRPGEKNRADHRHHVIDAIVVALTDRSRLQQLSRIRKAGGVRTTGEALEFPWRTFRDDVIEKINQIKISHRCERKVAGGLHEDTFYGATHQEGVFVVRKSLDALSPNEVPMIRDAGIRRIVENQLAKHGIGVGRGKKTDARTWRAAMTGVAMPSGVPIKRVRVLRNEKTIRPIREGRHDQAFVKPGSTHHLALFEWRNNGKRKRDAVFVTMLEAINRIKRHEPIIQRTPPINHPSIPPDAAFLFSLSRGEMVLADWKGEEKLLVFKTASSTQGQIWFAEHTDSRKSSEYKQFVANANTLNARKVTVNPLGRIRWAND

SEQ ID NO: 2716 - protein, 140 aa, unidentified
  REGION 1..140: note = Description of Unknown: Cas Enzyme sequence
MSITLGLDLGPNSIGWALIDDDAKRLVDCGVRIFPEGVDNFDTKKEKPRNEARRIARGMRRQIRRRALRRKRLRLALADTGLFPPGELEQQALLDKDPYELRARALTDKLDPHEIGRVLLHLNQRRGFCPTAKGNARAAK

SEQ ID NO: 2717 - protein, 1074 aa, unidentified
  REGION 1..1074: note = Description of Unknown: Cas Enzyme sequence
VVGIRYAFDLGTNSIGWAVWLFGPGLYGNNTALALRGAGARIFRDGRNPKDQQSLAIMRRAPRAQRRRRDRFLLRRGNLVAALRTAGLWPADQERASSLARLNPYQLRAEGLDRELTPEEFGRALFHLHQRRGFKSNRKADRKNKEDGKIAEAAKRLRERLADENARTFGEFLWRRQNKDNVAERLSARIRLHGAGAKALYEFYPTREMIEDEFAQLWRTQARFAPEVITDDKRENIHRVLFRQRALRPPKIGYCTLVAGEQRLPKALPSVEARVIYETLNHLEIAAGVRTRRLERTERDALATVLLRGDNLSWKKMRTALKIGADQKINFEEGGRKQLDGSKSALALGRKGPIGAAWASWPLDRKDAFVGALLTEADESALAEKLQRDFGITDDQAARAAAIVPEEGYARLGPTANAAILDELVADVIPYSEAVALAGKKRGEDWHHSDERDGVILDPLPYYPEVLERHLIPGDGESEDVFQRIGRIANPTVHICLNQLRRIVNALVDEFGPPDEIVLELARDLKNSQERKKEIEAENRKNRDAAEKRSKRLIEEFDQADTGENRARLRMFEEQERAGAGVARCPYTLRAIGLTDLFSAEVDIDHVLPMSRTLDDGRANKVLCFREANRFKRNQTPHEAFGRGWTTARGERVEWEAVAANAANLPRGARWRFLPDAMERFNADGRDFLARQLNETRYLSRLAKAYLSKACDPDRVWVVTGQMIGLLRGKWGLNDLFVDHNRVDLSPEAEEKARKDRNDHRHHAIDAIVIGAMTRGLVNEIARRAGRAVEHDERLFAGLEPPFPEFRQRAREALERLVVSHKPEHRKAAALHEDTAYGFVRDEREAREIGNLVRRKPIDALTGPEVDAVRDPVLRRELQAARARFADAKGKLTDAKAFQHALQQFGEERKIRRVRVGKADQSVIAIADRRTGEIYKGLAPGENHHMDIVQMRDGAWKGFTTSYFEVNRKGWRPRWEAEKTGGKLVMRLHKGDMIELLDADGVRRIKTVVRLSPSNNIVYLVRHTDAGDFQKRHDDADDPFRWDFANIGKLKERGAVAVRVDETGRVTKKRSNVL

SEQ ID NO: 2718 - protein, 1074 aa, unidentified
  REGION 1..1074: note = Description of Unknown: Cas Enzyme sequence
MAEQRPYRLGLDLGANSLGWAMIWLDEGPSGLGPAGVRIFPDGRDPQSKSSNAVSRRVARGARRRRDRYLQRRKELMAALIEAGLMPAGEAERKKLQDRDPYEIRARGLDKRLSLHELGRALFHINQRRGFKSNRKTDRQNEEGGVIAKAAGKLEQMMLEEGARTLGELLAGRHSGRLGVRARPEARPSNVSSGAKAAYEFYPTRDMLEQEFVKLWEVQRRQHPELTAELHGKLHHIIFFQRPLVPPQVGKCALDPAKRPDDREGFRCPWAHPLAQRFRILQEVNNLTAGPVGERKRKLTAGERCKALHELLQTGAVTFEDLRTALKLESGWIFNLHSDRRDELKGDETAAALCSSKEALGKFDRKIWHSFPAERQAGIVERLLEEEDEEELIAWLIEETGVSKEQAYAIATVTLPDSHCRLGLRALKAIVPFMEEGQRYHQAAASAGYDHARLPTGEIRENLPYYGEILQDQVLGSGDARDPAEQRWGRLPNPTVHIGLNQLRRVVNALIRRFGPPQEIVVEMARSFKLSPDQLRKLELEQRENQRKNDDRRKELEKLGLPVNYGNLLKLRLWEELNPKDALDRQCPFTGEQIGMRRLLSEEVEIEHLLPFSRSWDDSPANKTVCLRAANRAKGQKAPYEAFGSSPTYSGQYYDWEAIKLRAKALPPNKRWRFDPDAMQRFEAGGGFLARQLNETSWLARLAKQYLGAVTDPRKIWVVPGRLTALLRRKWGLDDLLDSEGGRKNRNDHRHHALDALTAGLTDRGLLQRMAREYDEERERIVVKPPWEGFRQDVARVLEAILVSHKPDHGAQGQLHEDTAYGRIAGAKEGEGNLVYRKPFLALKETEVERIRDARLRDELQAAIGSGKAADKRLPNILAEFAKEWGERHGHGALRHVRLTKTEKPDYLVHIGDGAAPYKAYSAGANLCVELYETPDGKWRGEAVSLYQANQAGHQPRWPAEEPGARLVMRLHKGDCISLEEDGQRRYVLVKQLRARGRSMFLAEHHEAGALQTRHDDKEDPFRWRMYPYDKLRQLKAEPVRIDEIGRPWRLGRALPWQEWIERSRRLTPKPGRR

SEQ ID NO: 2719 - protein, 1084 aa, unidentified
  REGION 1..1084: note = Description of Unknown: Cas Enzyme sequence
MPLRFSFDLGTNSIGWAVYRTNPPETGGKTCVPMELCDAGVRVFPDSRDPQSQQSLAADRRDARSARRRRDRYIQRRRHLMSTLVKCGLMPENEAKRKVLVQIPRERKDELRKEGLSNKKIRDTLATPRAKINPYNLRARALNEKLEPHEIGRALFHLDQRRGFKSNRKTDAGDEEAEGMKAAIKKLEERLCDEGVRTIGEWLAKRHQHLVDGKPQPRDVRFRGKQAGSRMEWDFYPQRSMLESEFNAIWEAQKQHHPALLTDEARDRIREIIFHQRPLKPVPAGKCTFEAEEDRAPRALPTAERFRILQDLNHLKVRRTPAGEQQSLTLEERNKLLNKLATGSVMAWKSVCKALGCPPDTTTFNLQSEKCKDLKGDKTAKHLGASKRKNIDAADLIGKQWHDLPLETQDEVVLKLLGDESDDSVCQWLMEQLNITPAQARNMINTPLAPGYARLSKKAMDKIIPHLKGAVVAYNEACKEAGYDHANPFEETGEVFNRLPRYQEIEAFNRQLAGTRDPKDKNQPDKYYGRYPNPTVHVGLNQLRRVVNALAEKHGVPSEIVLEIARDLKNSKKARDEIQKRQKQNQDTNEKRNAKLRELNLPESGENRMLLRLWEDLNQDDPLNRCCPYTGKQISNGMLFSGEVDIDHILPWSRTLDNSAANRTVCIREANRQKGDWSPAEAVERGIFRQEDIDRATANLPGNKKWRFAIDAMERFENDPNRDFLDRQLHETAWLSRLARVYLAHMCHKNHVWVVTGQLTAMLRGKWGLNSILGEGDRKQRNDHRHHAVDAAVIGAIDRGMLKRAADENKHKETGADIKLDIAPPLENFRDSVQGVVDRIIVSHKPDHGIGGQLHEETAYGIVKNPDDEDGMTLVAREPVSKLTRRKINQIRDTRIRHELQDMTRDIADKGLPGILARWSEKNGIHRLRILKKEQSFIKIDDRKTGKPYRAVIAGENHHLDVFEMPDGELEFRVATVFQVNQPDWKAEAPEGGRLIMRLHKGDMVKVDGKSGNREVMVVHQVWKNGVVLAPHNEAGELDKRGKDENDSFHWDRLLSVNTFKKRNLRPVTVTPTGKVKFRVPPEE

SEQ ID NO: 2720 - protein, 1087 aa, unidentified
  REGION 1..1087: note = Description of Unknown: Cas Enzyme sequence
MSSSVVNYRLGLDMGTNSIGWAAIKLDEQGKPCGILDLGVRIFPDGRSNPKDSTSASNAVQRRLARGGRRVRDRYLMRRSKLLNALVQYGLMPSDPEGRKRITADEKLDPYELRARALDRPLNPFELGRAIFHLNQRRGFKSNRNASGDNDNEAKQTRDAISELHRRIEESRSRTLGEYLHRRRKKRKPVRARPDLGLYPDRALYEQEFDAIRAVQQLHHAMNDVQWENLRETIFCQRPLKPVKPGWCTFEEGEHRAARALPLFQEFRMLQELANLTLHVGAESERRLSDKQRACTLERLQAGDDLNLDADKHKRIKNTLGFPSDTNFNLVAGIRTILKGDETTAKLRKPEMFDRKWLVLSLEERNDIVKFLIKTDDPEVVREKAVVEWGLTEEQAVAVSNVSLTSGYGNLSEKAIRKILPHLEIGKGYSEAVQAAGYDHHSDFRSEEAHDNLPYYGEILPRAVVGANPDKDPKSDGEAAHYGRIANPTVHIGLNQLRRVVNALIKTYGKPEDIVVELARDLKTNREQKRRDDQRRREGVDRNERLTEMLKSAEQSVSGEILRKLRLWDEQKKGSLHICPYTGRNISFEMAVSAQTEIDHILPFSRTLDDSMANKVVCIAAANRAKGNRTPYRAFGDNPPGYDYERIKENVANFPHNKRWRFQPDAMNRFEGENDFLGRQLSETRYLSRTARTYVAYLYDQRGEGKQRVRVIPGHMTALLRRGWGLEGMLSDNPDGEPVRKQRDDHRHHAIDAFVVANTTQGLFQEFSRAAGSSYQNAEERLASLIPPPWNGFDINELKQLLDNIVVSYRPDHGTRGAEARGATTGQLHNDTAYGIVELVEDGQSAIVVRKPLSSISRKALNDVRDTHLRAALINLWDEVGGNKARFAERAWSEGVEVNGRRQKVRSVRVKGNLRIIPIRDRVGNAYKGYLPGGNEFADVWQMRDGSWTLVVVPTFDANQPDFDIEKFRPTTSRGQYKGKPDPAAKRLMRLQIDDMGALGEGTERRIVRVRKITNNARQGGLVVLDDHNEANVPERVTRDARIRKDSGIDIGMKEEVYPASKLRRFGFRKIHVDEIGRVRDPGPKSS

SEQ ID NO: 2721 - protein, 1119 aa, unidentified
  REGION 1..1119: note = Description of Unknown: Cas Enzyme sequence
MIESKLPPYRLGLDIGANSIGWAALALNANGDPYAILDMGSRVFPDGRAPEKRSGPGASLAVGRRLARGQRRRRKRYLRRRAALMRKLVAFGLMPANKQERKKLERFDPYELRKRALSETLEPSKLGRALFHLHQRRGFKSNRKTGGGEDKQKATQARMDREGLRQAISDRGNPTLGEFLAGRRERGKPVRARPGQELYPERAMYAREFKKIRARQEENHALTPAQWDELERIIFHQRPLKPVKPGWCALEDNTERAPRSHPCAQEFRILEEVNNLRVSIPGNAERRPEERRLKKNERELALARLRRGADIALQPKPPKKLSTKALGLPTGSSFNLARGGRKTLKGDAVVAAIVKTLKPPKKKGEKAKKDVKADKWWRKLSKRQRRKIAFLFAVEEDADAACKQAQEWGLDASIASRLKEGELPSGYVRLSLKAIRNILPHLRRGLRYDEAVIAAGYPHPSDFRNAEAHDRLPYYGVVLGRYVVGADPAAPEADEAKRYGRFPNPTVHVGLNQLRLVVNRLIAVYGKPQDIVVELARELKMNKDQREARREAQQKGEERNKRFEEMLGREPSPRERLRLRLWEEQRGSAERDAVCVYTGEPITLDMAVSSATERDHVLPFSKTLDDGRGNMVLCMARANRDKGDKTPYEAFADSPDGYDYAAILARAGALPGKRGWRFEAGAMKRFGEEEQFLDRHLNETAYLSRTARRYLAYLYDETTEGYRVRAIPGRMTALLRNAWGLGKSRKDHRHHAVDAFVVANTTQGLLKRFADASAGGTAERLAKSVPDPWCGFRANFEEAFERVIVSYKPDQGTRDPKSRKTTGKLHNATAYGLLKEPGKVVVRKPLADFKKKEALNAVRDPALREALLVLWDETGGNKKKKEDTASSFSEKARVEGVLPKGKGRRQYPRSVRVLDKVDALPIKDESGKPYKGFNRDSNAFAEIWSIPAGKDKEGKRRKAGWRIIVVPAFEFNQRGFDEKTLRPHPAAKRLARIHKGDMAALELKPESEAEKKRVIVRVRKITGGSNPSIVLDKHFEANVAKRAADKSDATMQENKYSARKLRESAFRKVGVDEIGRLHDTGQFREAGGAADEPKPATRKKAAKPRPAEKPRQLGLSLGG

SEQ ID NO: 2722 - protein, 1048 aa, unidentified
  REGION 1..1048: note = Description of Unknown: Cas Enzyme sequence
MAWRLGLDVGTNSIGWAAIRLGDGNGQPCGLLKSGVRIASDGRNPKDKQSLAVARRGPRQQRKRRDRYLKRRAKFMQVLIAYSLMPNEITKRKDLETLDPWAFRVKGLDEKLALYELGRALFHLQQRRGFKSNRKTDKGADDESGKIKIAANDVHQRMKETGVRTLGEFLAQERIADPKIAHEKTVRARLQGKGAKAFYDFYPTRDMIVSEFESLWSAQKEFHGDALGPDAHDEVLDILTFQRDLKPQPVGKCTLNPDEDRAATALPSVQRRRIFEEINHLRVRAPGQGERKLSLQERDVLVVKALSVGKVTFDAMRKLLKVSDLDTFSSESNKRKHLDGDKTAAILAAAKHWGKAWRDLPLETQDQIVTRLLNEEDEQVLCAELVQEYGLGEDMAQAVAKASLPDGHGQLGITATQKVLAELEKSVITYDKAVKAAGYHSHSQLDFEADGEIFDHLPYYGEVMERHVAFGSGKPGDPLEKRVGKIANPTVHVVLNQIRHVVNDLIKAFGPPAQIVVELARDLPLSAKGKSELEKTQADNKTANDLRREELKKLNLPDTYGNRLRLRLWEELNPADIKDRRCPFTGEKISIQRLFSDAVEIEHILPFSQTLDDSPGNKTLSMRRANRFKGQKSPFEAFSQSPEDYDWSKIAERAALMPNNKSWRFGPDAMERYENEERDFLARQLTDTRYISRLTHMYLKRTGADVWVTPGRLTSDLRWTWGLNSILTGHNQEEAADPAKNRNDHRHHAIDAVVIGLTDRSLLQAVATAAGQAEVKFDKRFLSDLEDPWPNFRETVRKSMDDIIVSHKADHGVQGALHNDTAYGVVQADIGSGKSQVVHRVPLESLKTAEKLNLIRDICIREHLMAETQGLSGKDYIEALVAAGEAMTPPVRRVRIIERLSVIPIKDASGDVYKAYKGDGNYCYDIFVGEKGTWTGDVVNRFDANQKGFDPRGKISRTGKPLIMRIRGDDMLALENGGTRTIMRVVKFSDGQLVLAQHMEGGSLKARDKDQNDPFKYLSAAPSALQKRHARLVHVTPAGRVFDPGPHP

SEQ ID NO: 2723 - protein, 1159 aa, unidentified
  REGION 1..1159: note = Description of Unknown: Cas Enzyme sequence
VRKSVPWRLGLDIGTNSIGWCAFDLKSEAGRQHPISIRRLGARIYTDGRDPQSGSSLAQERRGPRGARRRRDRYLDRRAYLLRLLVRHGLMPADPADRKSLEASDPWLLRGEGLDRSLSKHELGRAIFHLNQRRGFKSNRKTDRGKDDKSAKEADDMKTAARKLAELIGPDKPNARTLGEYLYKSRRATQSEGVWRPLTHAAAKTVRARPEVVKGRNDYDFYPTREMILAEFNALWAAQARHHPDLTDAVSDEIRDVIFFQRPLRPVEPGPCTLDDEPDLDRRDRRAPLALPIVQEFRILQELANLELVHRKNPTRRQRMTLAQRDRLLHELRRAEKVTFKRIRKLLSIDDIWTFNLESERRPDLRGDASSVRLSRKEGFGERWWTAFDDVARDSVVRLLLDEENEARLIAVAVEEWGLSPEAAAYVANVRLPDGFGGLGMKALSRIVPILRAEVDGTGHPIHYSDAVLRAGYLHHSDFRDGELLDALPYYGEILRRYTAPVRSESAPEWEREFGRLANPTVHIGLGQLRKVVNALIEAYGPPEEIVVELARDLKRSLDEREEVQRQQYENQKKNELRQEKIDELVTAERARGRSGWRPPRDALLRLRLWEELNPTDASDRKCVYSGQPISMRMLLDDSIVEIEHILPFATSLDDSPSNLTVSLRTANRKKAKQTPHAAFSRDPDWDWDAIMLRVSALPKVKQWRFREDAVDLVRDRARREAARQEGNLPKEALEDIDNSSGFLARQLIDTAYLARVTRQYLWKICNPDNTWVIPGQMTALLRRKWGLNSLLSGNNRKSRDDHRHHAVDAFVVGLTDRSMLQAIQRASAQSDDRIVDDMPEPWDGFREELDAALRRMVVSHRPDHGIDPRKPERDPHVSSGRLHEETAYGLVKNPEREGGNIVARKPLASLTENEVERIRDPVLRAKLKAFLGGGAGDDGALDRAKSRLKDARKKKDASAIERASAEVAHLKRQRQQRRKAGAKDFKAALERFAIETGVRRVRILKTDRSIVTILDHNGVPYKAYSPGENHCVDVIELSNGTWIGVGITRFEAHGPSSLEKWKARYPDGRFVMRLHRDDLLAIDDAGSRVVLRVDRLVPSNGLVWAAPHNEGGVLQRRHDDPDDAFRWAFLMFSQMKSKRARRITVDLLGRVNDPGPPK

SEQ ID NO: 2724 - protein, 1046 aa, unidentified
  REGION 1..1046: note = Description of Unknown: Cas Enzyme sequence
MWWRLGLDVGTNSIGWAAIGRDEDGRLGTLIDAGVRIFSDGRNPKDNQSLAATRRAPRGMRRNRDRRLKRRDEFMTRLVKHGLMPIDGAERKRLENLDPWRLRIEGLDRKLNAHEFGRALFHLQQRRGFKSNRKTDVGADDGGKIKIASNALLAAMEGAKSRTLAEHVAGPRLRDPAAKHTHPVRVRLHGTGAKAFYDFYPTREVVVGEFDTLWAKQKAFHGDALSDVARDELRDTLIFQRKLKPQPVGRCTLNPEEERAPRALPSVQRLRIYQDINHLTYRHPGQAEQPLSLPQRDALAKRALSQQKLTFDAARKALKLADNVGFNLESERRAYLDGDKTAVVLAAKKRWGPDWRKLDLATQDDIVERLLAEEDEAALVTWLKSEHGLTAEAASAVADARLPAGHGNLGRSAGRAVLAELGRDVVTYDQAVAAAGYGSHSDLDFDGEIFDRGLPYYGQVLTRHVAFGSGEPDDQPEKRYGKLANPSVHVALNQIRRVVNALMQRLGAPAEIVVELARELPLSAKGRAELKTRQKRDQDANTARETVLTKLGQPASHENRFRLRLWEELNSDDPLDRRCPYTGEQIPLTRLFTDEVEIEHILPRSATLDDSPANKTLSVRYANRIKNNRSPYEAFHQSPDGFDWNAIAERAAKLPNNKAWRFAPDAMARYENENHDFLDRQLVDTQYISRLARVYLRRTGADTWVTPGRLTANLRWTWGLDSLLRDHNRIDGEERLRKNRDDHRHHAVDAVVVALTDRNLLQRVARQAALAEETFDRRTLAGLDDPWPGFRDSVRAVLDRMVVSHKPDHGVEGALHNDTAYGIVTPPDKNGRSDLVHRVPLAGLSKSADLVRICDELIRNHLLAATDGLTGKAFTEALVAAGEAMSPPVRKVRIVETLRAIAISDKAGRAYKAYKGDSNYCYDIFVGPKERWTGRVISRFDANQKGFDPKARKSIAGEELIMRLRVNDMLAIGESNARSIMRVVKLSHGKIALAVHFEGGSLKSRDADENDPFSYLTVAPSGLQKLFARLIRVSPAGRVKPPRHLS

SEQ ID NO: 2725 - protein, 1079 aa, unidentified
  REGION 1..1079: note = Description of Unknown: Cas Enzyme sequence
MTNNAKWRLGIDLGTNSLGWAALELVRDGDGDLAPYGLKDSGVRIFSDGRNAKDKQSNAAKRREPKGARKNRDRGKRRAARLFQQLIKYGLMPADKKEQKALEGGKGMPLCDSDPWILRYRALNKKITLSQFARAIFHLHQRRGFKSNRKTDRADKNESGKVKIAIKETLAKLKEKNACTLGELFGRERFEVYEFNEAAPKGKRKPQPLARVRKSGEGAKWQYDYYPTRELILDEFDKIWEKQSEFYDKLSDEARDAIRHTIEWQHPLKAQPVGKCTLIPEQERAPKALPSSQRARIFQEVNNLKFAPAGKLSYSLSLEQRNLVTNRLLLPTNKTGKVSFIQIRKLLGISEKFNLESEKRKDLVGDETAARMIQDECWGMAWFNFDLQTQDEIIDKLINEEKEEVLIAWLMQKHGLDKEQAENITECNLVAGYGNLSKEALDKILLPLEAEVIVYSDAVVKAGFVSHSQFGDGVIFDECLPYYGKILERSVAFGTGNPKDIVEKQYGKIANPTVHVALNQVQKVVNDLMKRFGAPEQIVLELARDLPLSAKGKGELETKQKQNQDANEKRRKSLAETYNQPDSYENRMRLRLYEDLEALGKCCVYTGEQIGAHNLFSYEVEIEHILPFSRTLDDGYANKILSMRKANRDKGNQTPFEAFGHSPDGYDWEETSERSSALPKSKAWRFAPDAMERFDNEEQDFLARQLNDTRYISRLAKGYLEAIYGGQGHKGSENNVWVINGRLTADLRHLWGLNSVLRGHNEPEAEAQKKNRQDHRHHAIDAIVIACTDRGMLQRAASEAKKQEEKFNNNLMKDIDEPWKNFRSDVEVSVRNIKVSHKPDHGFEGAMHNETAYGFLKGKEGETDKKGYQKVVTRKPLDSFDSTKDLSIIKDDLIRNKLEEETYGLTGKDFKEALLQTAHNMKPPVYKVRVEKNLRVIPFKDKQGKAYKSYMGNSNYCYDIWVSEKGKWVGEVISTFDAYQLARKDKKWWKNLIGQNEQKLIMRIRKNDYLQVEHEGEIKTVQIYKFSKGMINMAEHFEANIDARMRAKELKSIQMAPSSLQISKAKRVTVSPSGVINIY

SEQ ID NO: 2726 - protein, 1142 aa, unidentified
  REGION 1..1142: note = Description of Unknown: Cas Enzyme sequence
MTAWRLGLDVGSNSIGWAAIELDANGRPCGILEGGNDKQFLPGAGARIFPDGRNPKDKQSLAAQRRVPRGMRRNRDRYLQRREDFLGALVGFGLMPADETERKTLENPTGRKRNQDIEIRKNFDPWCLRARALNEPLTPFQIGRALFHLQQRRGFKSNRKADKEAKDGKISKGAAETLMRMQEKNARTLGELFGRPRLEGNLQASTRARLSGEGTKAFYDFYPTRELILDEFDKIWQAQTPHHPALLTRVAHDKLYSILSFQRPLKPQPVGRCTLEPETDLRAPWALPSSQRRRIYETLNAMHYRKPGEAAEWLTREQRNLLAEKALAKKDLTFDAMRTALRFHDDVKFSIESEKRKKIEGDHTAAILANKKLWGKEWRKLPVVEQEAIVELLLGLEPLTEKTPVHVRQVAEAVMGQAAKTFAIARSEAEHMLTSSDPDVLANWLSERYGLSPENASNVVEANLPDGHQGLGRCANAKVLAQLMADDLPVYSEAVIRAGYRDHRAIEGQGEVHDRKLPYYGEVLERSVAFGTGDPRDPLEKRVGKIANPTVHVALNQLRKVVNRLMDRYGAPAEVVIELARDLPLGAEDKRKLEREQRDNQNANEHRERILREHGVRNTYVNRLKLRLFEELTRGKATNGRCVLSGEQFGYAALLSDKIEIDHILPFAQTLDDSFNNKILVTRQANRDKARRDPYTFAQEQAGYDWEEISARAADLPPQKSWRFSPDAMERYENEERDFLDRQLNDTKYIARLTRTYLGAIYGGGDEAVKHVWVTPGRLTSDLRAVWGLNRILDGNKASDEPDAPSRKNRDDHRHHAIDAIVVALTDRAMLKKAADHARGQDPEVSTERMLAALREPWEGFREDVETHVNAIVVSHKKDHGIEGQLHEDTNYGVVQNPQGDGQKLATRKPIVSFEKYGQLQDIADNRIREELMERTYGLSGADFKQALHDYVNEQKPGKRTNPRRVRVHKPVTESTPVRQIRHGGTGEHRRGVLAAENYCLDIFETPDGKWQCREISRFDANRLNGSDQVAVPGWMKDNPEATLVMRLRKGDTLAVEDVPGEIEYKRVVRLEPSANRVRLARDREAGDYEKRHTDRDDLFSWDFATISKLKARRARLVHVDEAGRVFDPGLRHAGTDCRDIK

SEQ ID NO: 2727 - protein, 1154 aa, unidentified
  REGION 1..1154: note = Description of Unknown: Cas Enzyme sequence
VNTSSRRSRPWRLGLDIGTSSLGWCVFDLKKGEDGRQHPVGIRRMGARIHTDGRDPQSGASLAQERRGPRGSRRRRDRYLDRRADLLKALIQHGLMPAEPAARKKLEGLDPWPLRSEGLDRALSLHELGRILFHLNQRRGFKSNRKAERGSDDKETKDAQDMKAAARQLDATIGPDKKDARTLGEYLYKRHRATFDGTAWQPTTPAKAETVRSRPTTVKGRNTYVFYPLRSMIEAEFDTLWAAQSAHHAELTEAVRDELRDVIFYQRPLRPVDPGPCTLDPEEDLTKRDRRAPLALPIQQDFRILQELANLELFHKTNPSVRRRLTLAERDAVFAALKRSEKVTFKRIRILLKIESIWSFNLESEKRDHLKGDIVSVRLARAGVFGKRWYDGLSDIERQNIVLKLLDEEDEAEIVRVGVEAWNLTPEEARKAADTPLPDGYGRLGLVALSRIVPILRERADKDGGPIRYSDAVQAAGYEHHSDFRDGELLEELPYYGKALQRYTAQVRSDTAPAWEREYGRLANPTVHIGLNQLRKLVNDLAEKYGPPEEIVVELARDLKRSQEEREEVQHQQSENQKKNDLRRETLDEMQKGQPGWKPPRDAMLRLRLWEELDATNVTNRRCLYSGKVISRRMLFSDEIEVEHILPFAQSLDDGPANLTVSLRAANRDKRNRTPFEAFGHSPDGYDWDAIMLRVSALPRNKQWRFRPDALDLVKSRIARENARLDGGLPQDALDDIEKTGGFLARQLVDTAYLARLTRQYLWKICDPNKTWVIPGQMTALLRRKWGLNSLLGDHNKKNRADHRHHAIDAYVVGLTDRSMLQEIQKAQGANRERIVDDMPDPWDGYRDELKAALDRIVVSHRPDHGIDPKAAPGKRRSTSGRLHEETAYGLVKEPEREGGNVVARKPIDGLSENEIGRIRDLGLRRKLQQHLAPYLGDDTSLENARKRLAEARKSKDAKAVERAQAEIGRLKVENKSRKKAGAKDFKAALAKFGQKNGVRRVRLVKPEAAIVVIRDSAGRPYKAYSAGDNLRVEIFERANGSWGREIITAFDANRPDFQPAWHGVDSHPALKWRIHKNDLVKLLVDGEERVMRVVSLWDKYLQLAGHTETNLLERYRDGEFKWTFANYDKLKELKFRRVTVSPIGELRDPAKTP

SEQ ID NO: 2728 - protein, 1091 aa, unidentified
  REGION 1..1091: note = Description of Unknown: Cas Enzyme sequence
MNPQDHSTPYTLGLDLGTNSIGWCAAKLDAQGRPCGILDAGVRILTPNDEAGRDPQSKNSLAANRRAARSMRRRRDRFQRRQKTLMKALVAAGLMPGDEAARKDLEKLDPYWLRAAALEEPLELHEIGRAIFHLNQRRGFSSNRITDAEDAEGSAMKQGMANLRATLKAADARTLGEFLARRHARDKYGNRVDGMGRRIGKSNGNGGAKPNADGVRFRPTADGAKVLYDLYPTRDMIEHELEEIWKAQSRHHSELTDGLLRKLKRIIIAQRPLKKPLVGHCTFRPEEERAPRALPLFQRFRILSEIAALEVERPGRPARKLSMQERDSLASLLMTQASTLKFDKMHKALKLPDDATFNLERGGRKGLDPDKTSAVLAKGPIFGKSWRGLSRLRQTEIVEKLLTEADEDRLVEWLEEDCGLEEGAAVAASKARLPQGHGHIGRSMLSDLIDVMEAESGEAADPETGEVYSRPLTYDEAVGRLGLHHSNFNTDRYARLPYYGSAMARHVISNPGAPEGSQERIGRVPNPTVHIALNQMRAVVNALIDAYGLPAEIHIELARELKQNRKQKDDAARRNRENETANERRREELAKLNLAATHGNRLLLRLYEELPADERVCVYSGTPISREMLFSGIVDIDHILPRSKTLDDGFANKVLCTREMNRFKGNRPPAEVWTGEELQEIAERARRLFRNKAWRFAPDAMEKFALGNDFIARHLTDSQHMARLAKDYLGHLYGDDRNRRVFATPGRLTAMLRGMWGLNGLMGDHNRAEEGEPIKSRDDHRHHAIDAFVIACTDRGLLQRVATAAGRAETRELDRWSVKGEFPEPFDGYREALRGRLETLVISHKPDHGLPSGAKGNAHATSGQLHEETAYGAVKETIAGKTFNLVTRKPIAALSEKEIGQVRDARLREALEEVSYEAKRGEVKLADALDKYGKTHGIGRVRILKTEKYTTTVRHGNGRYHKTYVPGSNHRIEIYATPDGQWHGEGVSVFDANQRDYAPAWRKEKPDARLVMRLHKGDMFEADLGEGPQYYVVRKLSPSNNRIEFVPHRYAGRAEVSAYIRAAYSKLQKAGARPVRVDPIGRVTPIAGTIS

SEQ ID NO: 2729 - protein, 1066 aa, unidentified
  REGION 1..1066: note = Description of Unknown: Cas Enzyme sequence
MASVIILQLAQPSGQVVDVMTYRLALDIGANSIGWCLLDLDAAGAPCGLRDIGVRVFPDGRDPKTLASLAAERRLARGMRRRRDRYLQRRTALLNALVRHGLMPAEETARKALVGLDPYALRRDALYRKLSPHELGRAIFHLNQRRGFASNRKTDRSNDAEQGKIKIASDRLKDEIARTGLPTLGAWLAERHDRQLDVRARLSGTGAKAEYPFYPTRNLVRAEFDAIWAAQSGWDPSLTEAARNSIAGVLFHQRPLKDPPVGRCWLEPAEFRAPKALPSTQAFRIAQDLSHLAIRRVGEPDVALDAMQRAKLVELLNAGSDLSFHQIRKALGLSRGETFNLESKAREKLKGAETASRLTGRKGPLASIWPRLDAAARDALVRALLDAETPEAAIAALATLGIPANAAEAAERVPLPDGYAALSSKAMLAILPHLETGLTYDKAVLAAGYRHHSDDRDGAILDRLPYYGVALADRIGTGTGQPGDPEERRFGRAPNPTVHVALNQLRHVVNAVIERHGHPAQIVVEVLRELNQSAFERRRIEKEQAENAKRREEWAAQLKELGQRVNGRNLAFMRLWSEQSGDPKERLCPYTGERISLTRLFSGEVEEDHILPFAVTLDDSFANRVIVTREANRRKSRQAPHQAFHAQVDWPEIQARAALLPPSKAWRFSPEALEKWKGEHGDFLARHLTDSAYLARLARMYLRAVCDPNRVWSVPGRLTAMLRDALGLNSATLLGKGGARKDRDDHRHHAIDALTIGLVDPSLLQRVATAAGRAEGRGRRLLDDVGEPWPGFVAEAAARVQAIVVSFKPDTSPAGRLHNDTAYTALPDPGPKAPNVAHRVPVQNLAGWKPDEVQEALGNARLAGRVVAALEGASGKPAQAAALGALAHDAAGRTVRRVRVRERLDSTAAIRDRRTGQPYKWVKLDANHRVEIWRLPASGGRPGEVKMVVVPMMVAAADAEAARLKRPVPDRRPHPAAKLLMRLHKDDVVAFGVGEARRLLRVVKFRDRQVNLAEIHESGNLKARDAAKDDPFKYVNASTSRFASEQARKVFVDPAGRVLDQGPLRW

SEQ ID NO: 2730 - protein, 996 aa, unidentified
  REGION 1..996: note = Description of Unknown: Cas Enzyme sequence
MPADTDEAKLVAAKNPYSIRARALTERLEPYEIGRALFHLNQRRGFLSNRKAERRSKDSEDGKIASGAKALDQAMAEAGADTLGQFLAGRSEKRVRLNGESQGYDFYPQRRHVEYEFQRIWEEQAKHHPILLTEEARAALHRILFFQRPLKEPVVGVCLFAGRYGIARDERRLPKAHPLFQERRLYEEVNQLEITTPGEAPRKLTLDQRDKLILASRDKRKVAFTSLAKTLKLQPGESFNKASEARTDLTGNEVRAVLGDKKRFGAAWHHKTPEAQWEIIERLIDEENPEALHDYLTGTCGLGEEAADAVAKAPLPEGFGRLGETATRRILEQLKTGEINGAPLTYSQAVEACGWHHSDDRTGEVLDRLPYYGELLSRDIPPGTFDPRDLEGGRREKKIERYWGKITNPTVHIGLRQLEKLVNAIIAVHGRPDQIVVELARELNLSEKDKDEHNRRIRKDTADAQARSRKLIEEGIADTGANRARLKLWEELAGNPVDRFCPYCGDAGKLIGFRALFSDEVDIDHVIPYSRSLDDSAANKVVAHRNCNRAKGNKTPYERWGSDPERWDRIAAQVANLRKSKQWRFGPDAMERVEKDGGFLARQLTDTQYLSRLAGKYLRSLYPTKEDGRVFVITGRMTAMLRRLWALNDVLDDSKIVENKNSNAPKNRLDHRHHAIDAFVCAVTSQSLLTRIAAAAGRAEEKDLDRQFEDLPEPWPGYLPELRARLLATVVSFKPDHGRKGVPSPMRDVTAARLHDDTAYGLTGEVGPDGRTPVVVKRVAFLSLEPKDISDPERIRDATLRADLYRATQGLSGTAFQQALMQFKETHPVFRGIRHVRVLGERPGTTTLSVIPIKDKAGRAFKAYKGNANARFIVWRLPDGGWKHSTVSVFAAHQRGYELPRPHPAAKKILDLRQNDLVAIERDGTRAIMRVVKFSESGQVTLAAHNEGGALKARDAASNDIDPFKYVAPTAGGLKKLKARQVRIDPLGRVFDPGPR

SEQ ID NO: 2731 - protein, 1048 aa, unidentified
  REGION 1..1048: note = Description of Unknown: Cas Enzyme sequence
MRRLGLDIGTNSIGWCLIKDDNRILGIGVRIFADGRDAKSGASLAVDRRAARSMRRRRDRYLGRRSAFLKALIEHGLMPADADEAKLVAERDPYELRARALHQRLEPHEIGRALFHLNQRRGFKSNRKAERRQKDNDEGKIASGAKALDRAMAEAGADTLGQFLAGRDEKRVRMHGESQQYDFYPQRRHVEYEFGRIWEEQAKHHASLLTDTARAVLHRILFFQRPLKEQEVGVCTFFHSERRLPRAHPLFQQRRLYEEVNQLEVTTPGEANRKLSLDERDRLILKLKTTRQASFESLGKLLKLEPGQSFNKASETRTHLAGDEVHAAMSDKKRFGNQWAHFDRDRQWTIIERLTDEEDPDALHAFLMDECGLDEEHAAATARAPLPELYGRLGPTATARILDELKKEVITYDEAVRRAGWHHSDDRTGEILPQLPYYGELLTRDIPPGTQDPDDPPEKRWGKITNPTVHIGLRQLEKLVNQIVKVHGRPDQIVVELARELKLNEKDKEEHNKRIRRDTAAAVARSDKLQAEGIHDTGANRMLLRLWEELNPANPLDRRCPYCGEPIGMRQLFSGEADIDHIIPYSRSLDDSASNKVVAHRACNRAKGNKTPYERWGHEEERWEAISAQVARLHKSKQWRFGPDAIERIERDGGFLARQLTDTQYLSRLAGRYLSSLYADESEGSVYVIPGRMTAMLRRLWGLNSLLPDHNFVENEHSNAPKNRLDHRHHAIDAAVVAVTTRSRLNEIAKAAGRAEDKDLDRLFEDLPQPWEGFREELGEKLAQVTVSHKPDHGRKGRPAPGRDVTAGRLHNDTAYGLTGETAADGKTPIVVHRVPLMSLKPGDLTDPLRIPDETLRDALYRATDGLSGKAFEQALARFAKEHPVFKGIRRVRVREPLNVIPIRDRNGRAYKAYKGDANARFDVWRLPNGKWTVDIISMFDAHQKDQQDRHPHPAAKKVLSLRQNDMLAIERNGGAAEIVRVVKFSTIGAIALAPSNEGGALKARDAASADVDPFKYIYSSGGGLKKLKARQVRVDPLGRLFDPGPRE

SEQ ID NO: 2732 - protein, 1054 aa, unidentified
  REGION 1..1054: note = Description of Unknown: Cas Enzyme sequence
MRRLGLDIGTNSIGWCLIEDDTRIVDIGVRIFSDGRDPKSGASLAVDRRDARAMRRRRDRYLGRRSAFLTALVEHGLMPANTDEARLVSRRDPYELRGRALDERLEPHEIGRVLFHLNQRRGFKSNRKAERRSKPGEEGKIAGGARALDQAMAESGAETLGQFLAARETKRVRPGGDAQDYDFYPERRHVEHEFACIWEAQAKHHPVLLTETARAALHRILFFQRPLKEQEIGYCTFAGMGGVPADERRLAKAHPNFQQRRLYEEVNQLRIASPGAADRALTREERDALVLKLQDRKKVSFESLAKVIRLGEGERFNKESENRKELAGDEVRAEMADKKRFGTRWLHFDLAEQWRIIERLQNEEDPQTLLKWLMSEYALDEAAAEAVANSRLPEGHGRFGETATRRLLEALKADVVTYDKAAQAAGFHHSDHRTGESFERLPYYGEILTREISPGKEEYGDPLERQYGKITNPTVHIGMRQVEKLVNAIIAVHGRPHQIVVELARELKLNEKEKEDHKRRIKRDTDAAVARGRKLESMGFPDSGANRMLLRLWEELNPVNALDRRCPYCGEPIGMRQLFSGEADVDHIIPYSRSLDDSAGNKVIAHRSCNRAKGNSTPFEKWGHDEDRWNRISDQVARLHKSKQWRFGPDAIARVEKDGGFLARQLTDTQYLSRLAARYLSSLYPSKDDGSVYVIPGRMTAMLRRLWGLNSLLPDHNFVENEHSNAPKNRLDHRHHAVDAAVTAVTTRRLLMEIARAAARAEDKDLDRLFDGLPQPWNGFREELGERLSRVTVSHKPDHGRKGRPSRQRDVTAGRLHNDTAYGLTGAVAADGKTPIVVHRIPFRNLKPADISDPSRLPDTALRDALYEATRDLSGKAFEQALARFAKEHPLFRGIRHVRVREPLNVIAIRDGAGRAYKAYKGDANARFDVWRLPSGRWTSDIVSMFEAHQPGQQDRRPHPAAKKVLSLRQNDMLAIERNGGPPQMVRVVKFSTNGTIALASDNEAGPLKARDAAPNDVDPFKYILSSAGGLKGLKARQVRVDPLGHVFDPGARE

SEQ ID NO: 2733 - protein, 1063 aa, unidentified
  REGION 1..1063: note = Description of Unknown: Cas Enzyme sequence
MVNDKPEYRLGLDLGTNSIGWAAIQLDDKGEPCGLLDMGIRIFPDGRDPTSEASNAVDRRVARGQRRLRDRKLSRRNRMMQSLVDYGLMPANADECKKLEVSDPYALRARALDEPLEPFELGRTLFHLNQRRGFKSNRKAGGDEKEDGQVHTAINELTSRIEESGARTLGEFLARLHQAGKAVRARPETGLRADRAMYEAEFNAIRGKQEPHHNLSGEHWKDLHDIIFHQRPLRPVESGWCQFEFENSERRAAKALPVFQEFRILQEVNNLRIRVGLEPERRLCAKERMRAMNRLHSGSDIRLSEGRDNKPAKPTRDLGLPSGTVFNLAAGGRKSVKGDETAARLSKPALFGEKWLYLSLDERNEIVRFLLDTEDPEVVRRRATDEWGLNEKQAEAVANVSLPDGYGNLSEKAIRKLLPHLEQGKVFSEAVQDAGYRHHSDFRNAEAHDELPYYGQALPRDAVGADPTKDAKQHGEPAVYGRIGNPTVHIGLGQLRRVVNRVTETYGKPAEVVVELARELKMNREQKREYQRQQSEGRDRNERFRKELGEEALESTPDALRKLRLWEEQGPIHNRVCPYTGKPLSFAMVMSAQTEVDHILPFSRTLDNSMANLVVCMTDANRTKGNLTPHEAFGDQCLEYVKDFPSNKRWRFQEDAMERFEGERDFLDRQLNETQYLSRTARIYLSYLYDEQSEHRQRVRVIPGRMTALLRRGWGLDGMLDDTADSEIPRKTRDDHRHHAVDAFVVANTTQGLLQQFAQATGSDYRDAEERLAALVPPPWEGFNRGEVQERLDRMVVSYKQDHGTRGEKGKTTGQLHEATAYGIIEPIGEGRHKVVLRKELSKFTAKDLDNVPDATLQNALRQLWDETGGKVADFAKRAAEDGVPVNGRPQKVRRVRIYSEQRIIPVEDASGKAYKGYVPGGNEFADVWRLPDGKWQTLVVSKFDANQSGVDPNDFRPHPAAKRLMRLQIDDMGALGEGRNRRIVRVRQMDNNKSGPRIVLDDHNEANVDARIREDAKIRRKTKTDGGMKVEVFSAAKLRRLGFRKVRVDEMGRVFDRGPFKP

SEQ ID NO: 2734 - protein, 1094 aa, unidentified
  REGION 1..1094: note = Description of Unknown: Cas Enzyme sequence
MTVRYRLGLDLGTNSIGWAAVALDAEGRPGRLLDGGVRIITPNDEAGRDPKSKASLAAGRRAARAMRRRRDRFLRRQKRLMEILTANGLMPADTAARKELEKLDPYWLRARALAEPLTLHEIGRALFHLNQRRGFSSNRITDADDAEGGAMKQGMAQLQEALEQAGARTLGEFLAKRHRRDREGYRVDPSGQRISKANGNDREASKGVRFRPHAEGSKLLYDFYPTRDMVAHELRQVWVEQAKTHTELTEPLREQLEHVIIAQRPLKKPRVGRCTFRPDEERAPRALPLFQRFRILSELAALEIERPGRPARKLTIPERDLLANLLGSQTSPVSFTKMAKALKLPDDADFNLARGGRKGLDPDKTAAILAKTGKGESFGKGWRSIPFDRQSEIVQRLLNEPDEDALISFLIEECDLSDEQAQAASSARLPQGHGHIGPSMLEELVDVLQNDSVEVVDPQTGEILPRPLTYDQAVVRLGSHHSHFTGERRERLPYYGEVLARHVIANPDAPEGSQERIGRVPNPTVHIALNQTAKLVNALIEAHGRPDEIVIELARELKQNRQQKDEAIRQNRSNETERARMREELASLGYADTPGNMLLLRLYFELPPDERVCVYSGEPISKEMLFSGAVDIDHILPRSKTLDDGFANKVLCTREMNRRKGNRAPADAWSAEELLIIHERSKRLFPRKAWRFAPDAMEKYAENNDFLARHLTDSQHMARLAKTYLGTLYGEDAAKRVWSTPGRLTAMLRGMWGLNGLLKDHNRAGADGADVKNRDDHRHHFLDAFVVACTDRGTLQRVATASARAEAMEIDRWAEKGAFPEPFEGYREQISDRIGTMVVSHKPDHGITPGRARERQATSGQLHEDTAYGRVDEQVNGKTYNLVTRKPIGALTKNEIGQVRDVRIREALQEVAYEADRDGIKLGEALARFGEENGIRRVRVLKTDKTAIALTHGDGRFHKTYVPGDNHRLEIFVAPDGNWTGEAVTVFDANRKDFTPAWQSMTPRPALIMRLHKGDLLEADFGEGRCIWRVVRLEPSAKRVRLVRDFDAGAYEERHKDAEDPFRWNFASYARLQAAAATRVRVDPIGRVLPAREH

SEQ ID NO: 2735 - protein, 1054 aa, unidentified
  REGION 1..1054: note = Description of Unknown: Cas Enzyme sequence
MTYRLGLDIGANSIGWCLLDLDAAVPPHPCGIRAIGVRVFPDGRDPKTSVSLAAARRLARQSRRRRDRYLQRRQALLNALIRNGLMPADPAARAAIATLDPYALRADALARRLEPYELGRVVFHLNQRRGFRSNRKTDRDNEDEKGKVRSAADRLTAEIARGGHKTLGAWLAARHARHADVRARLHGAGARAEYPFYPTREMVAAEFDAIWAAQSQWNPTLAPAARDELRTILFFQRDLRDPPVGRCWLEPNENRAPRALPSTQAFRIAQDLAHLAIRRVGEPDQPLTDKQRDLLDALLDAGRDLSFGQIRKQLGLVHGETFNLESRAREGLKGSETAARLAGGAKGKVKPLTTLWSGFDLTKRDAIASAIQDAESDEEAVAALESLGVPRVAAEAAAATTLPDGHASLSTKAILAILPHLRAGLVYSAAVQAAGYRHHSDDRDGVIHPTLPYYGEVLAERLGIGTGKPEDAKDPERFFGRAPNPTVHVALNQVRQVVNALIAQYGHPAEIVVEVLRELGQSAFERSRVEKEQKANKDRRAAWEEQLKECDQRVNGRNMAFMRLWTEQAADPKDRVCPYTGERISIERLFSGEVEEDHILPFALTLDDSFNNRVLAMREANRRKARQTPYDAFGASPDWPAIKARAALLPGGKAWRFAPDAMAKWQGEYGDDFQARLLTDSAYLSRLAGLYLRAICDPNRVWGVPGRLTAMLRDKLALNSATVLGKGGARKERTDHRHHAIDALTVDLIDRSLLQRVSTAARRAQETGRRLLDDLEEPWPGFVAEAAARVGGIVVSFKPDIAPLGALHNDTAYAAVEGARPREPNVAHRVPVTSFAGWKPADLDAAVPDPRLRDHIRAALGIEGKPAQAAALSQIPHAPGVSVRRVQVRERLDGTAEIADRRTGRPYKRVKLDANHCAEFWCLPATGGKPGKVVMVVVPMMQAAMDAEAKRLGRKLADRRPHPAARLLMRLHKNDVVAFGVGEVRRLLRVVKFSEGRATLAPLYEAGNLKARDADRNDTFKYINGSIARFREEAARKVQVDPAGRVRDPGPLDW

SEQ ID NO: 2736 - protein, 991 aa, unidentified
  REGION 1..991: note = Description of Unknown: Cas Enzyme sequence
MSLMNALIKFGLMPSDQAARKALEALDPYELRTRGLDMRLEPHHLGRALFHLNQRRGFKSSRKTLSDEKESGLIDAGINKLRDAMHVGRHRTVGEYLWSRHTRRNELGQVQAVRVRLQGTGKDEHYQFYPHRTLIEEEFDRLWRKQVEFHPDLLTSDAKTQLKHIVFFQRPLKPVVPGRCTLDPTERRAPLALPVVQRFRIYQELANLRIERFGESRALSLPERDSLFTKLERKPKLSFEQMKKALKLDSTHRFNLESPNRDGLKGDETGLKLARDRLFGKMWWDSPPEHQAKIVETLLGTDDSGTLFEIAQRDWGLPDLNARAVARVTLPEGHSSIGRTAIGKIVEIMMAQGLNYHHAAKAAGYEPSDFRGDGSMDALPYYGQVLERQVIGDTGNPADPPERQFGRFPNPTVHIALNQLRIVVNALIQHYGKPAEIVVELARELKQNKKQKDAYNKRVAEDTVRNEQIAEKLASLGVENNGLNRKRYRLWEQLGPPHDRRCIYTNQQIACAKIFSPDVAIDHILPFARTLDDGMENLLLCMASANRGKTNLTPHEWKGSSEEWHDILLRADKLPPQKRRRFSADAVDWWLREEADFVARHLTDTQWIARAAKQYLGGICPADRVWATPGRLTHLLRGKWGLNGILADVRRGALTNDPDSEEDAGQALGVPKNRNDHRHHAIDAFVVALTERGILNRVAHAAGQSSPDRVIEEMPSPWLGFRNELRESIGKVVVALRPDHGKQGPLHEATAYGPIKRPEDWKGHNIVYRSSFSELNENEIDRIRDQGLRSQVQAHLNGIKGGGALAGAALKAALAKFKDHQGVTPRHVRLTKKEQSLIPIRDRNTGCVYKLLTPGRNWCIDIFEQPNGSWKGAPVTLFEANNPGALNEKRKGHPAARRVLRIHKGDYLRLTHQSGYEIYRVFRLNARENRLYLAPHYEAGDLQKRHEKKIAEYRDDPFRWLLASYNTLKERGARKVSVDMLGRIQESGVSK

SEQ ID NO: 2737 - protein, 1146 aa, unidentified
  REGION 1..1146: note = Description of Unknown: Cas Enzyme sequence
VSDRKSRPWRLGLDLGTNSLGWCAFDLAKGEDGRQHPAGIRRMGVRIYTDGRDPQSGASLAQERRGPRGARRRRDRYLDRRADLLKALIRHGLMPADPTARKNLENLDPWRVRGEGLDRPLTLHELGRAIFHLNQRRGFKSNRKAERGRDDKEAKDSQDMKAAAKKLDAVLGSGHENARTLGEYLYKRHRATFDGTAWQPTTPAKAETVRSRPTTVKGRNTYEFYPLRSMIEGEFDALWAAQARHHPKLTAAMADELRDVVFYQRPLRPVDPGPCTLDPEEDLAKRDRRAPLALPIQQDFRILQELANLRLTHKTNTNVSRRLTLTERDAVYAALKRSEKVTFKRIRILLRIDDIWSFNLESEKRDHLKGDIVSVRLSRESAFGKRWYDGLGDVERQNIVLKLLDEEDPLEIVRIGVESWNLTPEEAEKVADTPLPDNYGRLGLKALSRIVPILRERADKDGGPIGFAEAVQAAGYTHHSDFRDGELLDELPYYGEALQRYTAQVRSDSAPAWEREFGRLANPTVHIGLNQLRKLVNALIEKYGPPEEIVVELARDLKRSLEEREEVQRQQTENQKKNDRRRETIDDIQKSQPGWKPPRDAMLRLRLWEELDTANVTNRRCVYTGKVISQRMLFSEEVEIEHILPFAQSLDDSPANLTVSLLAANRDKGNRTPFDAFGHSPGSYDWDATMLRVSTLPKNKQWRFRPDALDMVKSRIARANARLEGSLPKDALDDIEKTGGFLARQLVDTAYLARVTRQYLWKVCDPNKTWVIPGQMTALLRRKWGLNSLLSDHNQKNRTDHRHHAIDAYVVGLTDRWMLQAIQAAAGSTRSRIVDDMPDPWDGYRDELKAALGRIVISHRPNHGTQGQLHKDNPFGVVSFEEKTGMYVLKQRKPLESLNDNEIERVRDPQLRKALMDALGGVSSNLMDLRQAEISLAEAKRLRRKADFEELKHRVETLRKQRKGAKKEAAKALPMVLANFAKEHRIRRIRLETTESSVVRVRLEKSGKYKAQLSGENYCIDVYQQIDGEWGFEGINLFQANDPSFIPAWRQLAPRPKLLMKVRKGDLMKLEDKGREAVFRVVKLAPTNRSFWMCEHHESGNLQQRHDDPDDPFRWLFLNFGQLGARRARLVTIDIAGRVSDPGPQR

SEQ ID NO: 2738 - protein, 1125 aa, unidentified
  REGION 1..1125: note = Description of Unknown: CasEnzyme sequence
MATGFSQVGEAKWRLGLDLGTNSLGWAALSLSKGSPARPDGLLDLGVRIYSDARDPQSKESNAATRRGPRGARRNRERYLLRRAGFLRALIETGLLPADQAERHALEKSDPWILRARALSEPLTLHEVGRALFHLQQRRGFKSNRLTDKGSDEKGAVESGAETAREEMNECGAETLGELKGRPRQSIQEENRELPQGVRKPMPLARVRAESEGSKLAYSYYPLRSMIEVEFDAIWDAQARHHPDAMTDTARSSLWELLSFQRPLKPQPVGRCTFESEEERAPSALPSMQRLRIYQELNNLRVSRSSGEPQLPLKPDERDKLTVVALSKPKLSLTQMRKTLGLSSTATFSIEAGGRDFLDGDKTHDIITANRKSNSGSWAGWADLSPDEQEALAEILLGRVAPDKGSHPAVVETHQKVVARIAKGLGLTEGQARQLLEAKEDEALVAFLSERYGLEWSGAERIVSLRLPDGHGRLSRTAGAKVLAQLEAPDENGELRTYDRAVVAAGYFHHSLRGTGEVFDHLPYYGVVLEQSVAFGTGDPDDIEEKRIGKLANPTVHVALNQLRKVVNALIERYGPPAEIVVELSRDLPLGAVEKNKLEKRQRDNRQENEKRAERLAEFGVANNYNNRLFLRLWDELDALGRKCPFSGEHLSQDLLVRSMSGSGELEIEHILPFSRTLDDSFNNKALALREANRRKGSLSPWEAVERGIFDRETIERSLRDFPPAKAWRFGPDAMDRFENEERDFLDRQLNDNKYISRLAAQYLKSLGSKVWVINGRLTADLRHHWGLNAVLTGHNRAPADSEAEGVKKNRNDHRHHPVDAFVIGCTDPWMVQQAASEAKKVEEEFAAGQRDHRRLLAGIPDPFADYLLAVKEAVGRIVVSHKPDHGIQGKLHEDTNYGVVRTQAGETRLATRKSIAGLTPGEIKNIGDDRIRRELVALTEGLGDKERKQALIEYSERTGHKRVRVHKVQASFERIEHGPDSKGKRHVRAVIPGDNHCMDIVETSDGKWHGVAVTRFQAHKSGWQRNWRKVHPDALLVMRVRNGDLIRLENEGMERVMRVVRLNPSGNRIYLAAANEAGDYQRRHDDPDDDFRWDLAGIGGLKSRKARLVRVTPDGQLIDPGLPS

SEQ ID NO: 2739 - protein, 1131 aa, unidentified
  REGION 1..1131: note = Description of Unknown: Cas Enzyme sequence
LARGCDVAIGSLQVSALRWRLGLDLGTNSLGWAALSLNSENPPRRDGLLDMGVRIFSDARDPQSKESNAATRRGPRGARRNRGRYLLRRASFLGALIETGLLPADEAGRHALEKTDPWILRARALSEPLTLHEVGRALFHLQQRRGFKSNRLTDRGSDEKGAVESGAERAREEMNARGAETLGELKGRPRQSVQEENRELPKGARRAMPLARVRAESEGSKLAYSYYPLRSMIEAEFDAIWEAQARHHPDAMTDAARLSLRGILSFQRPLKPQPVGRCTFESEEERAPSALPSVQRLRIYQELNNLRVSRHPGEPHLPLTPDERDKLAESALSRPKLSLTQMRKALGLPSTATFSIEAGGRDYLDGDKTHDIITANRKSNGGNWPGWADLLPHEQEALVEVLLGRVAPDKGSHPAVVKTHERVVARIAEGLGLTEDHARQLLEAKDDETLIAFLSERYGLEWSGAARIVSLRLPDGHGRLSRTAGAKILAQLEAPDENGQLRTYDRAVPDAGYGHHSLRGTGEIFERLPYYGVVLEQSVAFGTGDPEDIEEKRIGKLANPTVHVALNQLRKVVNALIDRFGPPEQIVVELSRDLPLGAVEKNRLEKRQRDNRQENKRRAERLTEFGVANNYNNRLFLRLWDELDALGRKCPFSGEHLSQDLLIRSMRGSGELEIEHILPFSRTLDDSFNNKVLALREANRRKGSLSPWEAVARGIFDRETIEHSLRDFPPAKAWRFGPDAMDRFENEERDFLDRQLNDNKYISRLAAQYLRSLGSDVWVINGRLTADLRHHWGLNAVLAGHNRAPADSEAEEVKKNRNDHRHHPVDAFVIACTDRAMVKAAADEARKVEDELAAGRREDRRLLTGIPDPFDGYLLAVKEAVGRIIVSHKPDHGIQGKLHEDTNYGVVRTQTGETRLATRKPITGLTPGEIRNIGDDRIRRELVALTEGLGDKERKQALLEYCERTGHKRVRVHKVQASFERIEHGPDSKGKRHIRAVIPGDNYCMDIVETPDGKWHGVAVSRFQAHKADWQRNWRKVHPDARLVMRVRNGDLIKLDHDGEEKVMRVVRLNPSGNRIYLAAANEAGDYQRRHDDPDDDFRWDLAGIGGLKSRKARLVRVTPDGQLIDRGPPS

SEQ ID NO: 2740 - protein, 1124 aa, unidentified
  REGION 1..1124: note = Description of Unknown: Cas Enzyme sequence
MKWRLGLDVGTNSIGWAALKITDGIDDRGKPLGKPTQLIDSGVRIFSDGRDPKSKESLAASRREPRGSRRNRDRYLKRRTEFMNYLIKHSLMPEDEAARKELEKTDPWECRVHGLDEKLSLHELGRALFHLQQRRGFKSNRKTDKGSDEKGAIKLAEIKVLAAMQQAGARTLGEYLAKARIDDPKAAASTLVRARPTKVKNKNTYDFYPTRDMVEQEFNALWNKQRQFHGDALSDQARQELGDPKTGTLFFQRPLKPQPVGKCALEPYIEERAPKALASTQALRIYQEVNHLKLRQPGQPERKLTVEERNKIVANLMTSPKVTFDRIRKTLLKMPDASFSIESKKVKDLKGDQTAAALANKNRWGPKWRELPMNQQDAIVEILIGMEPTYGTDRDNPAFAPAVTSIASALNMDEAKAKQLLATNDEQKIIDWLISDFALSHERAEAIANAPVPAGHGRLGRTATTKVLSWLQSEQAEAIDPLKQETIYPPFTYDQSCRLAGYDHTPTPDGVVYDQLPYYGELLERSVAFGTGNKEHSQEKRIGKIANPTVHVALNQIRAVVNALAKRYGTPDEIVVEVARDLPLSAKGKKELDKQQTDNQKDNQRIATELEAMNQRNTYDNRVRYRLWEELNEKPQNRGCVYTGEQIGIDRLFSAEVEIEHILPRSRTLDDSFANKTLSMRDANRDKGQKTPFEAFGNSPGEYDWQTISARADNLPNNKKWRFGPDAMDRFNEEEKGFLARQLGDTRYIARLARDYLTKMAGPYNVWVTTGHLTSELRHAWGLNSVLAGHNQFESEAEDVKKNRNDHRHHALDAVVIAMIDRSLLQRVATAAGKAEERLERNWFKEWPDPVGWEGVFRDDVQASMNKIIVSHKPDHGVEGELHEGTNYGPITDPITGETRLAYRKELTGLTEAELGRIGDHKIRTELAKRLLEIDELGLPTKKEREKEIAAMLGKYSQETGTRRVRLHKVQADFEIIKHNGHQKAVIPGENYCVDLVETPDGKWHGVGVTRFAANRQRRLGSNTPLWKTQYPDAKHIMRVRKGDLLMLEKDGREQVMRVVKLQPSSRTFAMASHLDAGTFQVRHDDREDQFRWYFADFGKLKSRKSRLVHVDPSGKLYDPGPPS

SEQ ID NO: 2741 - protein, 1053 aa, unidentified
  REGION 1..1053: note = Description of Unknown: Cas Enzyme sequence
MPVPYRLGIDIGTNSLGWCALDLDHDGRPRNIRRIGVRIFSDGRDPQSGTSLAVDRRKARGARRRRDRFLDRRDALMRALVRHGLMPADAEQRKALETLDPYWLRALGLDEKLPPHHLGRAIFHLNQRRGFKSNRKTDRKQKDGDLKGMKGAITKLHDAIKESGARTLGEYLYVTFREGRSVRGSEDGSVGAHGAVRARPHVVKGKNEYDLYADRALYEQEFDQLWKRQVDLGASLADAARDEIRRIVFHQRPLKPVPVGKCALDPSDERAPLALPLSQRFRMLSELANLKIVAPDQSHRPLTRAERDRVLAQLEKTKELSFARIRKLLGELGTEFTFNLESEKRTCLKGDDTGIKLAHKDYFGLRWWSFPLDRQTEIVEALLDEEDEEALVARAMRDWGLSAQAARKVAAASLADRYGRLGRRALAAIVPIMAARVVRYHEAAKEAGYDHARLPDGEVFDRLPYYGEALPHAVGFGSGEDGDPPEKRFGRIANPTVHVALNELRKVVNALTDRYGPPAEIVVELARELPLGKEAREKKNKEQAENQRKNEERKALLTTDPEVNQHYGGLAVNAENLLRLRLWEELGPIHDRRCVYTGEQISIHRLFGPEVEIEHILPFKRTLDNSPANKTVSLRRANRFKGNLSPHEAFHAGTNGFDWEAILLRAQNLPKNKRWRFAADAMQKYEAEKDFIDRQLTDTQYIARVTREYLTKITNPYKVWVVTGRLTQMLRGKWGLDGLLSDHNRKNRFDHRHHAVDAFVVGVTDRAMLKQVADAADQHRDRLIDDMPDPWEGFREELRARLDKVLVSHKPDHGTGGKLHEETAYGLIRDPSKEDGATLVYRKALAGLNENEVERIRDKALRALVLVAIAPVKGNKVAVAKALAEFSAKTSIRHVRLTKVESSFVTVNYNGESAYKAYRPGDNHRIEIFELPNGRWDGEGVRLFDANHDDHRPAWQNTPGARFVMALHKNDLVMLDDEGVERLVRVVGTPATANNKTIWFAGHNDSGDFAKRHKDPDDPFRWLFVSYNQLKVRKARKVTLDHLGRINDPGRPG

SEQ ID NO: 2742 - protein, 1098 aa, unidentified
  REGION 1..1098: note = Description of Unknown: Cas Enzyme sequence
MGDFFMTWRLGLDLGTNSLGWAALKLELQENIYRPNGLIASGVRIFSDSRHPITKISNAAARRGPRGARKNRDRYLRRKANLMQVLIEFGLMPEDEAARKALHQENNHNLHETDPWMLRARGLDEQLTPYQLGRAIFHLHQRRGFKSNRKTDGADKEKGKVYDATKRTIEQLEDAGARTLGELFGRPRLDTWRENQQKKHGERTAQPLARVRKSGEGAKWQYEYYPTRDLIGKEFDVLWQAQKGFHPDILTDEAHARIRNRIIWQHELKPQPVGKCTLFPDTEKRASKAMPSSQHARIYQEINALQIRTAGRGSRPITLAERDRLAEELLRPSRNNARLSFKKIRKLMSDMSDYDSFNLESDRRDYLVGDETAAKLMQKNAYGPSWFDLDFDVQESIVSLLVTAEDPEALITELIDVHGLSPEKAEALADCTLPDGHSNLSTKAHQALLPWLRADVTVYSVAVEQAGFKSHSNFATGEVFDKGLPYYGRVLERQVAFGSGDPKDLDEKRYGKVANPTVHVALNQVRAVVNDLIKRFGCPHEIVIELARDLPLSAKGKSELDKRLRDNRAANEKRGQLLRDIYKQPNTYANRMRLRLYEDLEALGKCCIYTGQHISAQMLFSDEVEVEHILPFSKTLDDGYANKTLSMRQANRDKGQRSPHEAFSHSPNGYDWEEISKRAASLPGNKKWRFSADAMERFEEDSGFLQRQLTDTQYISRLTKGYLDALYPGDNAAGGRANNVWVIPGRLTSDLRWNWGLDSVLAGHNADDAEAAVKNREDHRHHAIDAVVVACTDRSMLQQAAKQAKQNEQSGKGSLMAGTPAPWPSFRADVEKVVRDIIVSHKPDHGYQSAMHNDTSYGIVKGPDGEPDKSGKRTVVNRKPLDSDSFKGIGDLSKIRDPLIRETLEEATYGLTGKDFKEALVMTANAMKPPVYKVRITENLSVIPMYEKGANRDTERPIKAYKGDSNYCYDIWIGPKGKWVGEVISSFDAYQLAQADPNWWRQKKGRDGQTLIMRLRKGDYLELTDQTDKRIYQIYKFSVREINLAEHFEANASARIRAKELPSIRAPLSWLQERDACLVTVSPSGILTRHKPPKPRDD

SEQ ID NO: 2743 - protein, 1058 aa, unidentified
  REGION 1..1058: note = Description of Unknown: Cas Enzyme sequence
MTKASSRPYRLGIDVGSNSLGWFVVWLNDKGEAVGLGPGGVRIYPDGRDPKSRESNAADRRVARGMRRRRDRYLQRRDKLMGLLVQHGLMPADEPARKALEKLDPYELRAKSLDDTLPISHIGRALFHLNQRRGFLSNRKTEKGDNESGAIKLAAAKLAELKREAGARTLGELLAARHRAGAPVRTRNIGTGTKVEYGFYPTRQLLLDEFDAIWDRQAPRHPQMTANARAAIHDAIFHQRPLKQPPVGKCSLDPADGPNDAEGFRCPWAHPLAQRFRIWQEVRNLAVVETGKSPVPLSAEDQNKVALALIQNSKLSFDKIRSVLKLPPEARFNLESDKRKEMLGDETAAKLAHKSLFGKAWRSFDLERQIEIVTKLLDEADEDVLVEWLVENTGLDEETAGRVANAFLPESHSRLGLRAIRKIVPHMEAGMNYANAAKAAGYDHALLPTGELSLNGYLPYYGEWLQDDVLGSGDPRDGNDKRWGRFPNPTVHIGLGQLRRVVNALVAEYGAPAEIALEMTRDFKLSPDKLVEVEKIQADNQRKNGRRADEIRKLGQAVNARNLLKMRLWEELNPYDPMDRQCPYTGEKISIAKLLSDEVDIDHLIPFADTWDDSAANKVVCMRTANRDKGKRTPFEAFGGNSSGPYDWTAISLRAAAMKGKAWRFGPDARRRFDVQGGFQARQLNETGWLARVALHYLAAVTDPRKIHVLPGKLTAMIRGKWGFNTLLPDHNFSDAKNRKDHRHHAIDALVAALTDRRLLHRMSSAYDDERQRIEIPPPWPSLRDDLDAKLKAMTVSHKADHGGGGKTSTSGALHEDTAYGVVKHPEKEGGANLVYRKGFRDLNDKEILRIRDVRLRELVVAHVEDEKKAGKDLKAALQSFTQRDIPGIVQPVRHVRLTKSEKPEYLVAIRDKNGAPYKAYSAGENAFVDIFETADGMWSGEAVSVFQANQGEHRPRWRDSGARFVMRVFKGDMLRLDHDGRSKIVRVVRLEPSQKRLRLVEHNEAGTFEERHNDPTDPFRWIFGTYERLKEGNAARIRTDELGRPWRVKPDEAARTL

SEQ ID NO: 2744 - protein, 1060 aa, unidentified
  REGION 1..1060: note = Description of Unknown: Cas Enzyme sequence
MKKGASRRYRLGIDAGSNSLGWFVVWLNDGGEPTGLGPGGVRIYPDGRDPKSRESNAADRRDARAMRRRRDRYLQRRGNLMALLIKHGLMPAEEAGRKALESLDPYELRAVALDKPLPPHHIGRVLFHLNQRRGFLSNRKTEKTENESGAIKVAAGNLQKRMQESGARTLGEFLHRRHLVREPVRTRNSSPGKKAEYDFYPIRQMLIDEYRAIWTRQAPHCAAMTAEAGEAIYNAIFHQRALRPPPVGKCSLDPATSKDDLDGFRCPWAHPLAQRFRIWQEVRNLAVDETGRPSRPISKEDGDRIALALLQSNKLSFDKMRALLKLPAEAKCNRESGRRDQLLGDETAAKLCHKSLFGKPWRSLPLDRQTDIVSQIEKDTDDEALVAWLTANTGLDEAAAERTASALLPEGHCRLGLRAIRNILPFMEAGLNYPGAAKAAGYDHAQLPSGELSPNGYLPYYGEWLQDDVLGSGDPTHTNDKRWGRFPNPTVHIGLGQLRRVVNALIAEHGPPEEITIEMTRDFKLAPEKLAELEREQATNQGKNDKRAAQIRSLGQAVNTRNLLKLRLWEEQNLHDPLDRRCPYSGEVISVERLLSDEIDIDHLIPFSDSWDDSAANKVVCLRHANRDKGNRTPFEAFGKSQGKPYDWDAISLRAALLPKSKRWRFDPDARKRFEAIGGFQARQLNETGWLARVARQYLAAVTSPNKIHVLPGKLTAMIRGKWGLNDLLPDHNYSDAKNRRDHRHHAIDALVAALTDRKLLYRMSSAYDEERQKIEVPLPWPTLRNDLDAKLTRMIVSHKPDHGLQAQLHEDTAYGSITQPEKEGGANLVYRKGFRDLNEKEIGRIRDPRLRGLVEAHVEREKSQGKDLKSALLSFAERQDIPGQPNGIRHVRLTKTEKAEYLVAIRDKSGRPYKSYSAGENAFVDILLSPGGKWTARATTVFQANQNDAEPAWQAEEGVAGFVMRVFKGDMLRIDHEGRSKIVKIIRLSPSNNVLYLVEHNEAGVFQARHDDEDDPFRWIFANFDRLREWNAERVRVDELGRLWRVRPDEAIRSLRREA

SEQ ID NO: 2745 - protein, 1061 aa, unidentified
  REGION 1..1061: note = Description of Unknown: Cas Enzyme sequence
MKGESTRPYRLGLDVGSNSLGWWMVWLNGEGVPAGLGPGGVRIYPDGRNPQSKTSNAVDRRLARGARRRRDRYLQRRKKLMALLIEYGLMPADEAARKELERLDPYELRAKALDEALPAHHLGRALFHLDQRRGFLSNRKTEKGDKEAGVIKEAAGKLQAAIESEHARTLGEFLYRRHRDRDPVRARNKSTGTKAEYDFYPTRQMALDEFNLIWDAQAPHDPAMTPEARAAIGDAIFFQRPLKQPLVGKCSLSPANDAKDVEGFRCPWAHPLTQRFRIWQEVRNLEITEMGKNSVRLTKDQGDLVARALFQNNKLPFDKIRGLLKLPPEAKFNLESEKRSDLLGDQTAAKLSGKDFFGKTWRSFSLAHQIEIATRLLETEDETRLIAWLTAEAALDSETAACVATVFLPNGHCRLGLRAIKKIIPLMESGMNYPEAAKAAGYDHAQLPTGEQSPTGYLPYYGEWLQDDVLGSGDGRDKNDKRWGRFPNPTVHIGLGQLRRVANELIREYGPPTEVAVEMTRAFKLSPLQLAKLEKEQAENQRKNDARRKEILAQGQADNARNVMKMRLWEELNPKDPLDRRCPFTGEVIGIRRLLSDEVEIEHLIPFQDSWDDSAANKIVSMRYANRAKGKHTPFKAFGDSPTIDGHHYDWDDIAQRAASLPKGKRWRFQPDARDRFNAIGGFLPRQLNETGWLARIAKHYFGAVTGPHRINVLPGKLTAMIRGKWGLNTLLPDHNYSDAKNRKDHRHHAIDAMVAAMTDRSLLHRMSSAYDEERDKIEVPLPWPSLRDDLDAKLKAMTVSHKPDHGLQAQLHEDTAYGAIKEPENEGGNLVYRKPFLTLNGQEIERIRDRRLRALVTAHIDTEKAEGKDLKSALQSFAARCDVPGQPNSIRHVRLVKPEKPEYLVSVRDKAGKPYKSYSAGEIAFVDIFEVHDGNWRGESMSMFKANQKNATMEWPAKFPSARSVMRVFKGDLIALDYNGRRTVMTVRRLEPSLNRIRLAAHNEAGNLDQRHADPADPFRWLMASYSTLKSMNAERVRVDELGRVWRVRPLEASRPAPPA

SEQ ID NO: 2746 - protein, 997 aa, unidentified
  REGION 1..997: note = Description of Unknown: Cas Enzyme sequence
MEALIRHGLMPADAKDRKALEALNPYELRAKALDGPLPAPHVGRALFHLNQRRGFLSNRKAEKKDDDKGVIKQAASRLKEAMAAENARTLGEFLARRHQHRRPVRARNRASGQKAEYDFYPTRDLLNDEFEQIWSAQSEHLPSMTPKAREEIEQVIFFQRPLKPPIVGKCALDPATRPFDEDPEGYRAPWAHPLAQRFRILQEARNLAVREAGKSERKLTKEESDKVVLALLQPTNAKAELPFDKIRYLLGLPSEARFNLESDRRPLLIGDQTAARLSDRKRFGKAWRSLPLKQQIAVIEMLVNEQDEKELVEWLKTTCGLDHETAQRVADTPLPDGHCRLGLRAINNLLPHMEAGLGYHEAAAKAGYDHAKLPTGEVLDRLPYYGSQLSDAVVGTGDPRDPKEKQFGFFPNPTVHIGLGQLRRLVNSLIRQYGAPTEIAVEFTRALKLSPKEKAEVRREQRRNQDKNNAWAAELAGLGIERNQRNLLKMRLWEELNPRDPLDRKCPFTGETISLRRLMSDEVEIEHLIPFKESLDDSAANKVVCLRHANRAKRKGTPYEAFGSSPTIDGFAYRWDEIIARAANLPRNKRWRFDPDAREKFDKMGGFIGRQLNETGWLARVAKQYLGAVTDPYQIWVVPGRLTSMIRAKWGLNSLLPDHNYAGVQEKAQDFLAATDDMEFSGVKNRADHRHHAIDALVAALTDRSLLWKMANAYDEQRDRIITDPPWDGMRDELKAALDRMIVSHKPDHGSQGKLHEDTAYGFVKEPEKEGANLVYRKPIESLNANEIERIRDRRLRDMVQQHVQAAAANGIALADALRELHRKTDDPHIKHGLRRVRLLKPEKPEYLVPIRDRRSGVPYKAYSAGENFCVEIYEMPDGTWGGEAITRFAANQQEYCSRWQKQHPAARRVMRIHKGDLLRLEHDGQSQVMVVHRLDAAAGRFKLAPHNETGNLDRRHATANDIDPFRWLMASYGTLKRLGAVPIRVDELGRVWRIQP

SEQ ID NO: 2747 - protein, 1065 aa, unidentified
  REGION 1..1065: note = Description of Unknown: Cas Enzyme sequence
MSKPLQYRPYRLGLDLGSNSLGWFVVWLNDQGEATGLGPGGVRIYPDGRDPKSKESNAADRRVARGARRRRDRYLMRRSNLMARLVAHGLMPEDASARKALESLDPYELRAKALDETLPAHHIGRALFHINQRRGFLSNRKTEKKKDSESGAIKVAATKLAEAMATSGARTLGEFFHRRHLVREPVRARNTSTGAKAEYDFYPTRQLLLDEFDAIWNRQSPHHSSMTDAARAEIHHKIFFQRPLKQPPVGKCSLDPAKKIEDKDGFRCPWAHPLAQRFRIWQEVRNLAVEETGQNKRALTKEEGDKIALALFQNNKLPFDKMRSLLNLSTEARFNLESEKRKELAGDETAAKLAGKALFGKAWRGLALERQIEIVEHLLDDENEEILIAWLMENAGLDHETAESVANAFLPDSHCRLGLRAIRNILPHMEGGMTKTQAEDAAGYKGIHRPDGEVSLNGRLPYYGEWLQDDVLGSSDPRDTVDRRWGRFPNPTVHIGLGQLRRVVNALVKEIGPPTEIAVEMTRDFKLSPQKLAEVEKEQAENQRKNERRDAEIRKLGQAVNPGNRMKLRLWEEQNLYDPLDRRCPYTGEVISIERLLSDEVDIDHLIPFSQSWDDSAANKIVCMRYANRAKGNRTPFDAFGNSPTLNGHRYDWEQISLRGNGLPKNKRWRFQPDALHRFDMQGGFQARQLNETGWLARVAQHYLTAITDPYKIHVLPGKLTAMIRGKWGFNTLLPDHNSSDAKNRKDHRHHAIDALVAALTDRSLLHRMSSAYDEERQKIDIPPPWESLRDDLEAKLKAMTASHRADHGVGGQLHEDTAYGTIKDPEKEGGANLVYRKGFVDLNEKEVARIRDRRLRDMVLAHIENEKTKGNDLKAALQSFAVQKDIPGLPNGVRHVRLTKTEKPEYLVPVADRNGNAYKSYSAGENAYVDIYETADGRWAGEATSVFQANQKHVLPRWRAAHPDAHFIMRVFKGDLIALDLNGVRTVMVAHRLDAAANRFKLAAHNETGNLDQRHTDDSDPFRWLMASYNTLKAMQAERVRADELGRLWRVSPEEAARGLGFDT

SEQ ID NO: 2748 - protein, 997 aa, unidentified
  REGION 1..997: note = Description of Unknown: Cas Enzyme sequence
MDALVRHGLMPADAKEQKALEALDPYELRAKAIDVTLPSHHVGRALFHLNQRRGFLSNRKAEKKDDDKGAIKQAASRLKEAMAADNARTLGEFLSRRHQHRYSVRARNRSSGAKAEYDFYPTRDLLVNEFEKIWEAQSKHHSSMTPKAHDEIEHIIFYQRPLKQPVIGKCTLDPAARPFDEDPEGYRAPWAHPLAQRFRIFQESRNLEIRETGWSAKKLAKDESDKIVLALLQPTNAKAELPFDKIRSLLGFPSEARFNLESDRRPMLVGDQTAARLSDRKRFGKAWRSLPLDRQIAIVEKLLNEQDEKALANWIEGKCEVDRETAARIADTPLPDGHCRLGLRAIKKLLPHMEAGLGYHEAAAKAGYDHAKLPTGEVLDRLPYYGEWLSDAVVGSGDARDRKEKQFGFFPNPTVHIGLGQLRRLVNGAIKEFGPPTEIAVEFTRALKLSPKEKIEVKREQRRNQDKNTARASELAQLGIEPNPRNLLKMRLWEELNPRDPLDRKCPFTGETISVSRLMSEEVEIEHLMPFKESLDDSAANKIVCVRHANRAKRKHTPFEAFGSSPMIDGFAYRWDGIAARAANLPRNKRWRFDQDAREKFDKMGGFIGRQLNETGWLARLAKQYLGAVTDPYQIWVVPGRLTSMIRGKWGLNSLLPDHNYAGVKDKAEDFLASTDDMEFSGVKNRADHRHHAIDALVAALTDRSLLWKIANAYDETRDRIITDPPWEGLRDELKAALDRMVVFHKPDHGREGKLHEDTAYGFVKEPEKEGANLVYRKPIENLNANEIERIRDRRLRDIVQQHVQSAAANGITLADALRQLHTKPDNSHIKHGLRHVRLLKPEKPEYLVPIKNRSTGEAYKAYSAGENFCVDIYELADGTWDGEAVRRFDANQKEYSSHWRTENPKPRFVMRVHKGDLLRLDHDGQSKVMVVHRLDAAAGRFKLAPHNETGNLDRRHATANEIDPFRWLMASYGTLKRVGATPVRVDELGRVWRIKP

SEQ ID NO: 2749 - protein, 1053 aa, unidentified
  REGION 1..1053: note = Description of Unknown: Cas Enzyme sequence
MRRLGLDIGTNSIGWCLIENDKRIVDIGVRIFSDGRDPKSGTSLAVDRRDARAMRRRRDRYLGRRSAFFSTLVELGLMPPDADEARLLAGQDPYILRKRALEERLSPHEIGRALFHLNQRRGFKSNRKADRKSSTGEDGKIAGGARALDQAMAEAGADTLGQFLAGRETRRVRLNGENQEYDFYPQRRHIEYEFGRIWEEQARFHPELLTSDARAALHRILFFQRPLKEQDVGYCTFAGLNGVPADERRLAKAHPLFQQRRLYEEVNQLRIVAAGAADRPLTIDERDTLILKLQDKKKVSFTSLARTIKLGEGERFNKESENRKDLAGDEIRAELSDKKRFGTRWLHFPLDEQVQIIEQLQDEEDPDVLLGWLKKEYGLDDAAAEAVANAHLPEGYGRFGETATRLLLDALKADVITYDKAAQAAGFHHSDQRTGEIFDRLPYYGEILMHEIAPGKEDYGDPLERRYGKITNPTVHIGLRQLEKLVNTIIAVHGRPDEIVVELARELKLNEKKKDEHRRRIRQDTDAAQKRSEKLRAADISDTGANRMLLRLWEELNPANPLDRRCPYCAEPISMNQLFTGEADIDHIIPYSRSLDDSAANKVVAHRRCNRAKGNKTPYERWGHEDHQWDVITTQIARLHKSKQWRFGPDAMERAAQGGDFLARQLTDTQYLSRMAGKYLRCLYPTKDSGRVDVIPGRMTAMLRRCWGLNSLLPDHNFVENEHSNAPKNRLDHRHHAIDAAVVTVTTRGLMNDIARSAGRAEEKELNRLFEDLPQPWPGFREELGERLSRVTVSHKPDHGRKSRPSRHRDVTAGRLHNDTAYGLTGEMTADGKIPIVVHRVPLMSLKPGDFIDPGRIADPVLRDALYEATRDCSGKQFEQALARFSRQHPLFAGIRRVRVREALNVIAIRDRQGRAYKAYKGDSNARFDVWRLPDGKWVSDIVSMFEAHRPDGSDRRPHPAAKKLLSLRQNDLLAIERDGGRIIARVVKFSGSGQIALAAAQEAGALKARDAAPVDQDPFKYILSSASGLKKLNARQVRVDPLGRVFDPGPRN

SEQ ID NO: 2750 - protein, 1048 aa, unidentified
  REGION 1..1048: note = Description of Unknown: Cas Enzyme sequence
MRRLGLDIGTNSIGWCLVEDEGESSQIVDIGVRIFSDGRDPKSGASLAVDRRAARAMRRRRDRYLRRRAAFLKALKQYGLLPAQENEAKLLADRDPYELRARALNERLDPYEVARALFHLNQRRGFKSNRKAERKSKDSEDGKIASGAKALDQAMAESGAETLGQFLAGRDTKRVRMGSDAQGYDFYPQRRHVEYEFDTIWQRQRPHHPALLTYEAKAALHRILFFQRPLKEQDVGVCTFVHSERRIAKAHPLFQERRLYEEVNQLEITTPGEPSRKLKLDERDRLILKLRGVKAASFDSLGRLLKLEPGQSFNKASETRTQLAGDEVHAVMADRKRFGDRWVHLSRDEQWTVVERVMEEEDPDALHAWLVGQWGLSKEQADAVGRANLPEGFGRLGPTATARILDELKKDVCTYSEAVERCGWHHSDDRTGEILARLPYYGELLTREIPPGSFDPADPPEKRWGKITNPTVHIGLRQLEKLVNAIIDVHGRPDQIVVELARELKLNEKDKEEHNRRIRRDTAAAESRGRKLEEEGVSNTGANRALMRIWEELNPANPIDRRCPYCGEPIGMRMLFSGEADIDHIIPYSRSLHDSAGNKVVAHRSCNRAKGNRTPYEKWGHDPERWGIISAQAARLHKSKQWRFGPDAMARVEKDGGFVARQLTDTQYLSRLAGCYLASLYPTKEEGSVYVIPGRMTAMLRRLWDLNSLLPDHNYGAVENRHSNAPKNRLDHRHHAIDAAVTAVTTRSLLMEIARASASAEDKDLDRLFEDLPQPGPKFREQLYDKLQRVTVSHKPDHGRKGLPPKSRDVTAGRLHNDTAYGLTGETAADGKTPIVVHRVPLASLKPADISNSDRIADPVLRAELHRATDGRAGKDFEAALAKFGKERNVRRVRVREPLNVIPIRNKQGRAYKAYKGDANARFDVWRLPNGRWVADIVSMFDAHRRDAADRRPHPAAKKMLSLRQNDMLAIEKDGAERQLVRVVKFSTIGTIALAAHNEAGALKARDAAPNDLDPFKYILSSAGGLKNLKARQVRIDPLGRIFDPGPR

SEQ ID NO: 2751 - protein, 955 aa, unidentified
  REGION 1..955: note = Description of Unknown: Cas Enzyme sequence
MRRLGLDIGTNSIGWCLVEEEGESSRIVDIGVRIFSDGRDPKSGASLAVDRRAARAMRRRRDRYLGRRAAFLQTLKRFGLLPADESEAKVLADRDPYELRVRALDERLEPYEIGRALFHLKQRRGFKSNRKAERKSKDNEDGKIASGARALDQAMAESGAETLGQFLAGRETKRVRMGSDAQGYDFYPQRRHVEHEFDTIWERQRPHHPALLTDEAKAALHRILFFQRSLKEQEVGVCTFVHSERRLAKAHPLFQERRLYEEVNQLGITTPGEPSRKLKPDQREKLILKLRGVKAASFDSLGKLIKLEPGQSFNKASETRTQLAGNEVHAVMADKKRFGDRWPHLSRDEQWTIVERVMEEEDPDALHAWLTGEWGVSEDQAAAVARAQLPEGYGRLGPTATARILDELKKDICTYSEAVERCGWHHSDDRTGEILARLPYYGELLTREIPPGSFDPADPPEKRWGKITNPTVHIGLRQVEKLVNAIIDVHSRPDQIVVELARELKLGEKEKEEHNRRIRRDTAAAEQRGRKLEEEGFSNSGANRALLRIWEELNPANPIDRRCPYCGQPIGMRALFSGEADIDHIIPYSRSLDDSASNIPGRMTAMLRRLWDLNSLLPDHNYGAVENRHSNAPKNRLDHRHHAIDAAVTAVTTRGLLMEIARASARAEDKDLDRLFEDLPQPWSGFREELHDKLQRVTVSHKADHGRKGLPAKSRDVTAGRLHNDTAYGLTGTVAADGKTPIVVHRVPLTSLKPADISNSDRIADPLLRADLHRATDGRSGKDYESALAKFAKDRNIRRVRVREPLNVILIRDKAGRAYKAYKGDANARFDVWRLPNGRWVADIVSMFDAHSRNSADRRPHPAAKKMLSLRQNDMLAIEKDGAERQLVRVVKFSTIGVIALAAHNEAGPLKARDAASNDLDPFKYILTSAGGMKNLKARQVRIDPLGRIFDPGPR

SEQ ID NO: 2752 - protein, 1114 aa, unidentified
  REGION 1..1114: note = Description of Unknown: Cas Enzyme sequence
VTKLTTLGIDLGTNSLGWCLIEMDDASGKAQKGRIVDIGTRIFSASDMAGRDAKSKESLAVARRQARAMRRQRDRRLRRKSRLLGELTGMGLMPGNRMKREKLKHDTDDGRGGDLSNGIYALRSRALDEALSPHELGWVLFQMNQRRGFKSNRKTDSRDNEAGKIAVGVSRLHSAMSTIGARTFGEFLHMRRLAGHSVRTRLRPEAMAEFDADPDARGEGYVFYPTRAELEDEFDAIMKAQAAYHPSILTDKNIAALRHTILFQRPLLAPKVGKCSYNPAETRLPKAHPLFQQFRLYKEVNELALIGADQNPVKLTKDQRDILVLKLRGAKTASFSSLRKLLKLGPEYHFNKETDNRTKLEGDVVTAALSHKDCFGPGWATKSIADQWTIIEQLRDEVDPDALREWLEEQAGLHGDRADAVMKVSLPEGYGRLGQSALTNLLDVLKRDTDGDGHVVTEAAAAQKVYGRTNAQDDPDRKAAKYLPKYQEVLTRHIPPGEGSISDPPDDRDPIYDRHMGRITNPTVHIALNQLRRVVNAILRKHGLPDYISIELGRELKLTDRQRDEVNQTIGKNTRDAQRRSDKLIELGQPDTGYNRLRLKLWEELNPNQPLNRICVYSGEPISVHQIFSSEVDVDHILPYSKTLDDGQGNKLLCFAHANRVKRNRAPADVGEWNDSYDEILSRVANLPKNKQWRFARGAMEHHAAKGDFAARQLTDMQYVSRMALSYLAALYPAEQADAVGVLRHHNRIRALRGRMTEMLRRKWALNDILYDHNITGSNPVKPKNRKDHRHHAIDAFVIACTSRSLIQKIASAAEEIERQGTVRVLSTIPEPWPGFRDQLRDRIIGSVVSHKPDHGTVSRSGDASGRSQTAGRLHNDTAYGLTGETDAKGSALVVHRVPLGSFRSEKDLAAIRDVHLRETLRQATRGLSGKAFENSLRALSRADRLNGSVNPYKGLRRVRIVEPLQVIAIRDRSGRAYKGYKGDSNHRFDVWQLPDGKWVAEVVSTFDAHQPDWSSTVRNACPIAKKVLSLHQNDMVAIERDGERQICRVVKFGSNGQITLAAHHEAGALKSRDADKADPFKYVSPTAGGLKKLQARQCRVDELGQIFDPGPRN

SEQ ID NO: 2753 - protein, 1044 aa, unidentified
  REGION 1..1044: note = Description of Unknown: Cas Enzyme sequence
LRRFAFDIGTNSIGWCVLDPKNKRIVDTGVRLFSDGRDPKSKQSLAADRRAARMMRRQRDRRLDRNARLMEVLVRHGLMPTDPGERKALEAEDPYDLRTRALDEALPPHHLGRALFHLAQRRGFKSNRKTDSDDETGVVKEGIAELERRMGQAGARTLGEYLHRRMKRRKSVRRTYLDRSLIKDEFEKIWSKQSALNQGLDQAARSDIENVMFFQRNLLAPEPGFCELDPTQKRAPKATVCFQQFRILQDLGNLRLVMPDRTERRLTMEERDALRVLLSVQNSATWSKMRKAIKADRFSRFNFEERDQKRKGLDGDRVSAPLSAALGKKWAALSLEEKDRVVLAMDAADTDERFDSFCEAESFTPEQAETLRGVKLPTGYGRLGVATLRKLVQIMEDQGLDYASACTEAGYHHSDQRPETLRDQLPYYGELVRSTVGDTANPDDAPEQRYGKVTNPTVHAGLNQLVKLTNGLIARHGRPDEVVLEIARDLKLSRKQKDEIKKRQKRETEANERIDGVLDEYKVERSRLNRQKMKLWEELTEGAIGRLCPFSGLPIGLSQLLSNAVETEHILPFSRSLDDSMANKTVAFVTANRDKGNRSPYDAFAHSPGEYRWEEILERAQRLPRNKAWRFAPNAMERLEHDGDFLARHLNDTRYLSRVAREIMSYVCRDVWVVPGQMTAILRGRWGLGSILPTSNLDPEYGPDSSVKKNRLDHRHHAIDAIVVGLTDRGLLGRIARANAREGMDALEISDPDGWDDFRGHVREAILAINVSHKSDRRLSGGRIQRGNSGSTSGKLHNATAYGLASAPDPSGYVVVVSRKSFDELEEGDIPKIRDKALRDALEVYVDGRRTDGKIGKKDFAAARESFAKRGWPIGRGRLRGVRLVERMKQDALIQIADPRSAKVYKAYKGDSNAYMDLLRLPNGRWTGCIFSTFEANHHEGGQPRWKADYPAAKRIARLFNEDMARVSHNGEERLVTIVKMSGQTIVMSDHTAAGPLKARDATRDDPYKYISMAASKLREARFRQVKVTVDGRVIDPGPLSARF

SEQ ID NO: 2754 - protein, 1058 aa, unidentified
  REGION 1..1058: note = Description of Unknown: Cas Enzyme sequence
MHYRLGLDIGTNSIGWTAVTVDASGQPSGVLGQGVRIFGDGRNPKDGSSLAVQRRVPRGMRRRRDRYLGRRSELMEALIALGLMPPDQAGRKGLEALDPYELRAKAVHAPLTPHELGRALFHLNQRRGFKSNRKTDKDADNSKIQPKIDELRHRITQSGAKTLGEYLHKRRLKGKMVRARPEAGFYPDRALYDEEFEKIRKVQAPYHTLRPSQWDDLKDIIFYQRPLKPVDPGWCLLEDGEQRAHRALPLAQEFRMVQEANNLRILILGEPAKRLTQQQRDKVLNDLRTKKELKLEQLVKLLKLPSGARINLLDENRKALKGDETASRLSHKDLFGKAWPSMPLERRTVIVRKLIETEKPEEIEHIAQSEWGLNESAAKKLAAMPLPEGFARLSEKAIAKLLPIMEEQGLNYAEAVAEVPEYGSHSDFRPDKALDALPYYGAILTRQVVGGDATKPKEDAVAHYGRIANPTVHIGLGQLRRVVNALVKAYGKPEEIIVELARDLKMNKEDKDNARKTNHENEIKNRRFEEQIRASGGVPSAHLLRKLRLWEEQAYGAIKVCPYTGATIPFEMAIDDRTEIEHILPFSKTLDDSMANKVLCLKEVNRVKRDSAPFEAFRTPQQVGKYHCVYDEILLRAETLPPNKRWRFHADAMERFVNEQEFLDRQLNETKYLSRIARTYLAHLYNEKAEGRLRVRAIPGKLTAMLRGKWGLNALLGDHNRAGGDIDDGPARKNRDDHRHHAIDAFVIAMTDQRLLKAISDLNSEADRKRLIEAVPLPWDDFTPDALRPHLEHIVISHKPDHGTFGDKGKTTGSLHNDTAYGLISPGKGGNWNVVSRSALKGVTKKSELESIRDAALRGALEALWDEVEKSGGKPGDFAKRAEEEGVVLSGRKMRVRRARMTEELNVVQIKDRKTGLPYKAYKPDGNAFADIYQLPNGRWTAVVVQRFHANQPDFNPGKLRPHPAAKKVMRLHIDDMVAMEDGERRRILRVVKMSGQTITMADHLEGGALKARDANKDDIFKYVSKSAGALKNLGFRKVGVDEIGRLTDPGPRRASAG

SEQ ID NO: 2755 - protein, 1087 aa, unidentified
  REGION 1..1087: note = Description of Unknown: Cas Enzyme sequence
MKYRLGLDVGTNSIGWWCVGLDADGAPAASIGGGARVFSDGRNPKDGESLAIQRRTPRAMRRRRDRYLARRSDLMDALIATGLMPADEAERQALVRLDPYELRAKAVNGAAKPHELGRALFHLNQRRGFKSNRKTDEPDDKSKIQPRIIELKQRIERSGAKTLGEYLWNRRRRGKMVRARPEAGFYTDRSLYEHEFDKIREVQAPHQTLRPEQWDELRKIIFFQRNLRPVDPGWCLLEKGERRAHRALPCAQEFRMVQETNNLRILAPGEPAKPLTREQRDRVLKELRTRKKLELDTLLKLLKLPSGARINLLDENRKALKGDETAARMKEIFGKRWLDMPVAQRTEIVRKLIETEKPDEIERVAQDEWGLDETAAKKLSHTGLPDGYARLSEKAINKLLPVMEEQGLVYADAVAEIPEYGSHSDFRSSRALDRLPYYGAVLERQCVGGDPTKPKEDEVAHYGRLANPTVHIGLGQLRRLVNRLIETYGKPEEIVIELARELKMNKEEKDKERQKNLKNKEANERREKDIRAAGGAPTPHLLRKLRLWEEQKYGAENVCPFTGSPISFSMAINESTEIEHILPFSKTLDDSMANKVLCLREANRAKKDRSPYDAFHANPTIGGRTYNYEEIKMRADALPPNKRWRFYPDAMEKFADEAKFLDRQLNETKYLSRIARFYLSHLYNEKDEQRLRVRAIPGRLTAMLRGKWGLNALLSDHNRLGGDGDGDDRPRKNRDDHRHHAIDAFVIAMTDQRLLQRISAMNSDADRKRLIDQMPPPWEGFTPDILRPQLERLIVSHKPDHGTFPWMAKTKSAKGKSQTSGSLHNDTAYGLIAPGKNGSGNVVWRKSLASLLTPKDMDAWLPRVRDHALREALIAEWKTFKNAKPSATEKPLEESNRKKKNAAGLFAEHAARVGVQLNGRKVKVRRVRVTDDVGVVPIKERKTGKPYKAYRPDGNAFADIYQLPDGSWKTVIIRRFDANQPHYNPATERPHPAAKKLFRIQIDDLCAIYQNEERRIVRVCKLSTESGKGHVYLIDHNESNVDARVRDKELKYFKESASSLKKKGFRKVGVDEIGRVTDPGPRTGKTG

SEQ ID NO: 2756 - protein, 1078 aa, unidentified
  REGION 1..1078: note = Description of Unknown: Cas Enzyme sequence
MTWRLGIDLGTNSLGWAALNLSELDGMLLPSGLKDSGVRIFSDGRNPKDKQSNAAKRREPRGARKNRDRYKRRRDRLMRQLIQYELMPADEKERKVLEGGRSISQGDSDPWILRFRAVRQEITPYQLGRAIFHLHQRRGFKSNRKTDRGDSESGKVYDAIKRTREKLAEEGVRTLGELFGKARAQIFVDNNKVPKGSRKPQPLARVRKSGEGNKWQYEYYPTRELIIDEFDIIWKKQKEYHGNLLSEEAHDDLRDTIEWQHPLKSPPVGKCTLLPEFARAPKALPSSQRARILQEVNNLRLMPAGKASYGLTAEQREMILESLITPSSKTAKKTFDQLRKLKGISIYDHFNLESEKRKDLVGDETAAKLMQDDRWGKSWFDLDLATQDELVDKLVNEENEEALVDWLCMTHGLDREQAYRVADCPLPDGYGNLSHEALARIMPHLEEGMIYSDAAIKEFGDHRPIGTGEIHDQELPYYGYVLERSVAFGTGNPEDPDEKRYGKIANPTVHVALNQIRAVVNDLIKRFGAPEQIVLELARDLPLSARGKSELEATQRKNREANERRAKELEDVYGGQPNTYENRMRLRLYEELEALGKRCVFTGQQIGPHNLFSPEVEIEHILPFSQTFDDSFANKTLSMRQANRDKGNRTPHQAFGDSPNGYDWEEISKRASELSNGKKWRFNPDAMERYEKFEGGFLARQLTDTQYISRLAKAYLESIYGGQGQKGSKNNVWVINGRLTADLRHYWGLNSVLLGDNLPEAEAQKKNRNDHRHHAIDAIVVACTDRSMLQKAAREAQQNEREFSDRLLAGTPPPWETFRMDVENSVRNIIVSHKPDHGFQDAMHNDTAYGIPKGEEGEPDKRGVRKVVTRKPLDSFDKPADLEKIRDHDLKLKLLEATQGLSGNAFKEALLLTANAMKPPVYRVRIEENLNVIPMKDKQGREYKAYKGDSNYCYDIWLDEKDKWTGEVISTYQAYQLSQTDKDWWRKPIGRQGQKLLMRLRKGDYLQLEHANETLIAQVIKFTPGTFALAEHNEANVDARTRDKQDELKFIFKSPSSLQKSFAKRVTVSPSGVVKIYN

SEQ ID NO: 2757 - protein, 1067 aa, unidentified
  REGION 1..1067: note = Description of Unknown: Cas Enzyme sequence
MAMRLGLDIGTGSIGWCLVEDGEIRDLGVRIFSGSPTGAGRDPKTGASLAEERRGARAMRRRRDRYLGRRSAFLDALVAHGLMPADPEAARQVASLCPYRLRRRALDEKLAPDEIGRALFHLNQRRGFKSNRRADRTAEPGEKGKIESGAEALDAAMETADARTLGEFLAMRLEAGDAARVRLNSDNQGYDFYPQRHHILNEFKAIWDSQKAHHPDLMTEAAHEALWRVIEFQRPLKAQEVGYCTFSGMNGVPADERRLSKAHPLFQQRRLYEEVNQLRVTAPGVADRPLSIDERDALILKLQDKRKVLFSSLAKTLKLQPGERFNKESENRKDLAGDEVRAELGDAKRFGSRWLHFTPDEQWAIIQRLQHEEDADALRAWLRQAHGLDEAAAQAVAAANLPQGYGRFGPTATRRLIAALKADVVTYDKAAEAAGFHHSDHRNDDEIDQLPYYGEVLARHIAPGKAEYGDPLERRYGKITNPTVHIGLRQLQTLVNAIITRHRRPDQIVVELARELKLNDKQKEEHKRRNRDNLAAAQKRSAKLLELGQVDSGANRMLLRLWEELAPDNFLNRCCPYCGETIGLAMLFSSEVQIDHIIPYSRCLDDSPGNKVVSHRRCNQAKGNKTPYEKWGPHKNPERWERISAQVAQLHRSKQWRFGPDAMERVERDGGFIARQLTDTQYLSRIAGEYLRRLYAEKGGGSARVYVVPGRMTAMLRRLWGLNDLLWDHNFVENEHSNAPKNRLDHRHHVIDAAIMAVTGRDLLGEIAKTAARSEEENLDRLFTDLPQPWPGFREELRARLQGVNVSHKPDHGRQGHPPRHRDTTAGQLHNDTAYGFTGEMMPDGRTPIVVHRVPLMSLKPGDLINPLRIPDDRLRDALWSATRDRTGKDFERALARFAASDPVFKGIRRLRVREPLNIIPISDRQGRVYKGYKGSANARYDIWRLPDGKWTADVISMFDAHQRNQDDRRPHPAARKMLSLRQNDLIAVERDGGARELLRITGFNQQGRLTLAPPNEAGALQARDAASNQDDPFKYIYLSGRSLQKYKARQVRIDALGRVFDPGPRE

SEQ ID NO: 2758 - protein, 1113 aa, unidentified
  REGION 1..1113: note = Description of Unknown: Cas Enzyme sequence
MLLMITWGSFMVWRLGIDLGTNSLGWAALELEKDCEAWKPVGLMDSGSRIFSDGRNPKDKQSNAAKRREPRSARKNRDRSKRRSARLMRQLVEFGLMPADMSERKKLEGGKNIPLCDSDPWILRARALNEKISPHQLGRAIFHLHQRRGFKSNRKTDSKDSESGKVYDAIKRTKEALEKKGARTLGELFGRPRLEAAKHNETAPKGKRGPQPLARVRKSGEGAKWQYEYYPTRALIIDEFDQIWQQQNQYHTDILTKEAHDHLRDTIEWQNDLKPQPVGKCTLIPEEERAPKALPSSQRTRIFQEVNALRYGPAGQAQGPLTLEQRNLIVDRLLNPTKFQHPSTKTGKLIFNKMRSILDLSDYDKFNTESKKRDHLMGDETAARLIQKDRWGPDWFDLDLATQDEIVDRLINEEEEDKLVVWLCTTHGLERNQALRVADCPLVAGHGNLSKMALDRILPHLEAGLIYSDAATIEFGDHRPMGTGEIHDKKLPYYGEILERSVAFGTGDPKHSDEKRYGKIANPTVHVALNQVQKVVNDLMKRFGAPEQIVLELARDLPLSAEGKKELEKTQRDNQDANDKRRKQLAEEFGQPDNYDNRMRLRLYEELEALGKRCVYTGEQIGGHNLFSSEVEIEHILPFSRTFDDGFSNKTLSMRRANRNKGNKTPFEAFGDSMNGYDWEQISLRAAELSPAKRWRFAPDAMERFENFEGGFLARQLTDTQYISRLAKGYLEAIYGGQGHAGAKNHVWVINGRLTADLRHIWGLNSVLRGHNEPESEAQKKNRNDHRHHAIDAIVIACTDRGILKRASDQAKKNDADWRNEIVAKDSLMGGTPPPWGKEGSQFRADVENSVRNIIVSHKPDHGIQGAIFQDSAMSMIAENEEEKTKGQAPLMRKYVPIDSIVRKNLDPSNKKSWTIVDPNIRLALSTLAEGKSDNELSSVIHDWSSRQTPNIGRLRLYKRENALPVTVQTGDETPFKYYNSGGNYCYDIWTNEKGKWTGEVISTFDAYQLDRKHAKGGKKWWQSSVGRSGQKLVMRLRKNDLLQIEHDGRILLVSVYKFTEGTINMAVHFEADVSARVADKSLPAIAKSPGSLQISNAKRVTVSPSGVVKIYQ

SEQ ID NO: 2759 - protein, 1107 aa, unidentified
  REGION 1..1107: note = Description of Unknown: Cas Enzyme sequence
MNWRLGLDLGSNSLGWAVINLTNADDGWLPCGIEDAGVRIFSDGRNAKSKASNAAERREPRGARRNRDRYKNRRRRLFNELVDFGLMPKDKVSQKDLETFDPWILRAQGLSQKIDVHQLGRALFHLHQRRGFKSNRKTDKSDSDSGKVADATKLTLERMQENNARTLGELFGQPRLDANEFNKTVPKGKREPQPLARVRKSGEGAKWAYDYYPTRDLIEHEFDELWKAQSKYHAGILTNDARDALKETLLWQWPLKPQPVGKCTLLPEEPRAPKALPSSQLARIYQEVNNLRIGHTGQIARPLGVDKRNILIDKLKTTGKPTFASLRNLLKIPSGQKFNLESEKRKDLKGDETAMVMKSDKRWGKEWLDLSLGEQDGIVLVLLGLEPLSENSPESFQKMHADIVQKVANSLSIEQAEAIFILEETDEKQIAKWLSQEYNFNQDRAKAIADANLPASYGMLSAKAIGKLLPVFKDEVIVYSDAVDKAFGTSHSNFETDDIFDKALPYYGEILTRSVAFGTGDPKDPLEKRYGKLANPTVHVSMNQIRAVINDLLKRYGPPEQIVLELARDLPLSAQGKKELESNQKKNQEANEKRAKELEEEFKVSNNYENRMRLRLWKEMDAMGRACVFTGAIINREMLFAADSPVEVEHLLPFPRSFDDGIGNKVLCVRKANRDKGNQTPFDAFGHSPDGYDWEAISQRAAELPYNKRWRFSENAWEIFEKDHKGFLPRQLTDTRYIARQARQYVCAIFGGQGSKGVENKVWSVNGRLTSDLRRQWGLDSVLAGHNSAIGDDVKKNRNDHRHHAIDAIVVALTDRSMVQQASKQAKQNHERQNNDLLSNLKDPWKDFRNDVVQAIGEIKVSHKPDHGVQGAMLKKRAMSIIPEKGKKSNTAPLVRKYVPLDTITSKILDAGNTKTWTVVDENIRRELNHRIAGKAEKEVKLVVLEWGKEQNPSVKRLRVYKRESVEIIEGYKAYSSASNYCFDISINQKGKWQGNIVNTFEAYQQKNKTNKWDWWKDMVDLDGKPIIMRIRKNDMLQITDEEGKTKLVRVYKFSGNDVNMHEHFEANHADRISKKDLTDIKMATSSLQKAKARRATISPSGVLKLY

SEQ ID NO: 2760 - protein, 1039 aa, unidentified
  REGION 1..1039: note = Description of Unknown: Cas Enzyme sequence
MAYRLGLDVGANSIGWCLLELDDHNQPVALRGIGVRIFSDGRSPKDKSSLATARRLARSMRRRRERFVSRRDGLMRALIRHALMPADEANRKSLEQLDPYALRARGTYESLTPYELGRALFHLNQRRGFKSNRKTDQSKDSDSGKIKTAVGKLRQNMGAKTLGEYLHSLRQQDAHSQGSVRARLNGKGAQAEYELYPDRTMLAEELDRLLLFQAAHHPDVLTDAAQQDIRRIILFQRDLKPVEPGKCTFVPTDDRARWALPLAQENRILQELNHLRLQAVGEPERALDLCERETLAAKLMQKEKLSFDDMRKALKRPNVQFSHESVKRAYLLGNKTAFALAKKNGFGAAWHEFDEAIQTEIVERLFAEEDEKLLINWLCDTFGLDMDQAKAVSAAPLPDGYGHLGHTALSRIVPILRREVTSYDKAVIAAGFPHHSDFRTGEINARLPYYGIVLERYVAFGTGEKNDSLEKRIGRIANPTVHVALNQLRKVVNAIIKTHGPPAQVVVETARGLPAGAQKLAEIAREQKENQDANDKRRARLSELGQIDNYENRLRLRLWEELNPRDPLDRRCVYTGEQISIRRLFTDDVEIEHVLPFSRTLDKGFANKTVSLRRANRLKRERAPYEAFHDMQEWPAILARAEALPANKRWRFGPDAMARFEAEEGFLSRHLTDTQYISRICREYLSAVCDARDVWVTPGRLTSLLRGKWGLNALLSKNGVKNRNDHRHHAIDAAVVAVTDRSLLQQIATAAARAEERDLDRFIDDMPWPWEGFREAVATAVDNIVVSFKPDHGTQGCLHESTAYGIVTKPEAEDGFNIVSRPLKPFVDFSESELKRIRDLKLRQQIFARWKTEKQRGLTLRQALAVMAKRAAEGGIEANGLRRVRLLGKEEKLIKLNDSTKSAYKALKPGENHHVDIFEPSEGIWRAETVSFFDANRKDFRPSWHSHFPTARLVMRLHKDDLIKMQHVGRERIMRIASIWQKQVVVAEHCEGGATDKRDKDAADPFNLFRPAFATLRARKTRRVCVDELGRVRDPGPPA

SEQ ID NO: 2761 - protein, 1086 aa, unidentified
  REGION 1..1086: note = Description of Unknown: Cas Enzyme sequence
MGIRYAFDIGTNSIGWAVWRTGRDPKGIFGEKDAPLELLGAGVRLFKDGRNPKDGQSLATMRRIPRQARKRRDRFVLRREALVVALIEAGLMPADEKERRALADLDPYQLRAAGLDKALTPHEFGRAIFHLHQRRGFKSNRKTDKKGDDKEKGKIAAASAALRQKLSDENARTFGEFLWRRHRDSEAKRRAALEAHDPAKGKPDLRTTTLRKSTRIRLEGQGATALYKFYPTREMLHHEFDALWESQAKYHPSQLTAEAKEKIGGILFRQRELKPSRIGLCTFEYAAGEHRLPKALPSVQAREIYERLGHVRLSTGAGTDRPLKPSERDDLATALLYSGLTKIKVGKTTGLTFTEMRKALKLGGEVRINFEEMGEKGLADLRTNRLLLQDDHYGPRWRTLPWADKDAFVQKLLEATDDEQLVARLMAEDGLNEQQARNAASIPLPDGYSRLGPTANAAILDALIEERDADGFVVTYDKAVRRAGEKLGKNWHHSDERDGEIFDALPYYGKVLQRHILPGTMDPADRKDEAKFYGRIMNPSVHIGLNQLRRLVNALIERFGPPDQIVVELARELKMSAREKDQEQRRNRDNREANEKRAKKLEELGQDNNGENRARLKLYEEQQRAGGGVALCPFTLNAIGCRQLFSPEIEIEHILPRSRTLDDSAANKVLCFRAINRIKRGNTPWEAFHADPKWPDIVANAEKLPPNKRWRFREDAMDVFEARTSGKMDKVTLEQMGLSTGFQARHLNETKHMSRLAKAYLGKICNPDAIYVTPGGLTGLLRGKWGLNSILSDDNRKDRTDHRHHAIDAITIGAMTRSLLLELNTLAGKAEQSDYDDVVGRVPWPFDDFRDAVRTVVERIVVSNKPEHGKQGALHEDTAYGIVSDKAAAGEIGNLVRRKQLVDLTPGEVDRIRDAALRNGVQAAVAPFRDAKGKLPKANEKDYQAALKAFADDHKMRRIRVGKDDISALAIHDHRTGKGYKAVAPGENYCVDIVQMRDGSWKGFAATVFEVNQKGCGPNWCARKSSLRQRRSNGPVRTRFRSGRWPSGSAPAIRKISKRGPRSAISPRCSAKAFIATATATAPTPC

SEQ ID NO: 2762 - protein, 1075 aa, unidentified
  REGION 1..1075: note = Description of Unknown: Cas Enzyme sequence
MKPSTIVERSRFAFDLGTNSIGWAVYRLDQDGRPSELLDCGVRLFSDGRNPKDGQSLAAMRRIPRAARRRRDRFIQRRDWLMTLLIRHGLMPEDEAARKALEKLDPYDIRGRALKERLEPHEIGRALFHLNQRRGFKSNRVADNKGKTSEQQKEQGKIATAADALREKLKAGGFETLGEYYASMPAGPTRQTRTRINGKGTSAAYDVYPQRDMIEHEFDRIWEIQSAHHPELMTEEARRAIRGEGVLGIDAWERMTDDQRKTAQGAIFYQRPLKRPVVGRCTFFPDEFRLAVAHPTAQAFRIYQELANIEITEGLERPRKLTLAERDLLAVSLLAGEDLTWGKFRKALDLGGAARINLEDGGRDRLKGDEIMARLGGKKGRLRRIWPNLSIERKAELIDRLLFETETGDLTAWLIETVGATPEEAASAAGFRPPEGHLRVGLTAATGVVEELKRGAPETGEVIRYPEALARAFPDRHHSDLRSGEVFDKLPDYREVLERHTIGGTGDPADPKDKRQGRVPNPTVHIGLNQLRRVINALIDLYGPPEQIVMELARDLKRSKDDKDKIQRDNKKNEEANRRRAHDLEDAGERVTPENIRRLRLWEDLGPLPRLCTYTGKPISFAQVFSDEIEIEHILPFSRTLDDSMANRTLAYREANRGKRNQAPETAFHGADYEAIQQRADALPRNKAWRFKPGAMERFDAEHRGFLDRQLNETRHLSKLAKEYVVGITGDQNAVWVVTGQLTALLRARWGLNFSNIKDRNNHRHHAIDAATIGVIDRGLLNEMSRRAGVKEEGDELAAITKDVPEPPGFVAAGRNFRDNVRERVQALIVSHKAEHGKGGALHEDTAYGLVDPARGEDGNLVYRKAIDSLTAPEIGRIRDLNLRARLTEVLEALGGKTASAKALSEALTEFGKDNRIRRVRLLKTEAGVVEIKDRKTGAPYKALVPGANHCMDIVEGADGIWRGHAATVFEVNQSSFVPIWKSDPDSRLAMRLHKGDMVELEDRDGVRRVKRVISINPSKNRFYLAAHDDGGELQKRNDNDQDPFRWDLAVVSKLKERGCVRCDVSAAGKINPQV

SEQ ID NO: 2763 - protein, 1060 aa, unidentified
  REGION 1..1060: note = Description of Unknown: Cas Enzyme sequence
LTNSYILGLDLGTNSIGWSAVTVDSKGNPNGILDMGVRIFSDGRDPQSKASRAVDRRIARGARRRRDRYLRRRANLLENLVILNLMPEDENASADVEQMDPYEIRARALDSPVSAFELGRALFHLNQRRGFKSNRKSDAGQSDAESGVTWESITELRARISESGSRTLGEYLSRRKRKGQTVRAHAYTQGLYPDRSLYENEFDAIRNSQEPHHTLNETQWDHLRQIIFHQRPLKPVEPGWCLFEEGEYRAPKALPIAQDYRIVQEVNNIKVRQPGDHSERFLTPEERGLCIKHLRTKTALKFDQLVKLLKLDPDTDVNLGRGGRDALKGDETSARMRRRATKKRAAIFGSAWDDIPTDKRTEIVRTLIDEEDLESVISTAQKEWSLNEESAVLVASMQLPAGHMNLSETAINKLLPHMETEGMLFHEAVGEVTEYSHHSDFRPDTAYDQLPYYGQVLSQHVSGGNPQSEEEDEVTRFGRITNPTVHIGLNQIRRVINKLISIHGKPEKITVELARELKLPPARVNEMNKRNRDNEAANEERTRSLEEAGIHVTGDGIRRLKLWEEQGPPGARICPYTGEIISFQKAVSAETEIDHILPRSRTLDDSYANQILCIAGANRQKGNRSPFEAFGTDKSRYSAMTTYAQNLPANKKWRFMPDAMDRFDDQGQFLDRQLNETMYLSRIARTYLAHLYNEKEEGRLRVHATPGRLTAKLRKGWGLDSVLDEIAGVPKADQGNGGKSRDDHRHHAIDAFVVAVTSPGILQLMSKAAEQIPNQDYGPLSKIAAMLPPWKEFTRETLKPYVEGIVVSHRPDHGTRLVEGKTSGQLHNETAYGLVEDLGDGNWLVAVRKALSNFARRAQLEAVRDPALKQALLNLWDATVAKGLKPADFAEQAANGVNVGGKSTKVRSVRVTEKQRVIEIRDPDGKSYKGYKPDSNEYGELWRLPDGKCQLSVVRRFDANSNSTDSSINRPHPAAKKMMRLQINDCVKSDENPKTLLRICQIKSAGVVVMAPLHEANVDARSRKGDIKYTNKNGSQLGREGFRKVGIDELGRVLDPHQTR

SEQ ID NO: 2764 - protein, 1138 aa, unidentified
  REGION 1..1138: note = Description of Unknown: Cas Enzyme sequence
VITSPSRKSIPWRLGVDLGTNSLGWCVFDLSKPDADGRRQPIAIRRIGVRIYSDGRDPQSGASLATERREPRSARRRRDRFLDRRATLMHALIRHGLMPAEPAARKALEALDPWRLRGEGLDRGLGLHELGRVIFHLNQRRGFKSNRRADRGKDEKSEKDTQDMKSAIRALGSVLDGVTAGRRTLGEYLYTTRRAEQAADGTWLPKTPAVADTVRSRPKVVKGRNAYDFYPGRAMVEAEFDALWAAQARHHPDLTDAARNEIRRIVFHQRPLKPVEAGPCTLDPEDTRAPLALPIVQEFRILQELANLELVHKRNPLQRRRLTLAERDVLLAELRTTEKLSFTAMRKRLRIEAIWAFNLESEKRDHLKGDVVGKRLADAKGFGPRWRGTLTDAQRQEVVQALLDEEDEDALVRRGVEEWTLTSEAADYVANIGLPAGYGSLGLKALSQIVPILRTEAGEDGGPIRYSEAVARTAYRHHSDFRDGEILDELPYYAEVLRRYVAPVRSESAPEWERAFGRIANPTVHIGLQQLRKLLNALIERYGHPEEIVVELARELKLSLEQKERIQKDQAENQKKNDLRREKLAEIGQDARGDRLLRMRLWEELNPADANDRKCVYTGEQISMRRLFSDEVEIEHILPFTRSLDDNPSNLTVSLRKANRHKGNETPYEAFHTNPTIDGKPVDWDALMLRVSSLPKAKQWRFRPDAIEIVQSRLKREAAKEGGGLSQEMLEDIERTGGFLARQLVDTAYLARVTRQYLWKVCHPDKTWVIPGQMTSLLRRRWGLNSLLSDHNLKNRADHRHHAIDAAAVGLTDRSMLQRIATAAANARERLIDDMPDPWEGFRDDLKRKVAAIVVSHRPDHSPKGRLHEETAYSLVKDPEREGGNVVTRKPIDGLSLNEVDRIRDPQWRAKLKAALGPLLGDEAALDAAKARMAEARKRKDARALELAKENVERIKREIKQAKKSGVRDFKAALAKFGEDNGIRRIRLVKPEAAVVIIKGRDGTPYKAYSLGDNHRVDVFARPDGSWGREIVSVYDANQDEFAPRWQAEDAANRLVFSLHKNDLVRLDAGGEDKVMRLVSIWEKYLQLAGHAETNLAERYRDGEFKWTFANYDKLRDMRVRKVTVDLLGRLRDPGPPR

SEQ ID NO: 2765 - protein, 1053 aa, unidentified
  REGION 1..1053: note = Description of Unknown: Cas Enzyme sequence
VKYRLGIDLGTNSIGWAAVQLNEKLSPTQLIDVGARIFSDARNPKDKSSNAAQRRGPRGLRRNRDRKLMRGLRLMNALIDAGLMPDKPQDRKALEADDPWVLRALALDTPLSLHQVGRALFHLNQRRGFKSNRKADGEGDGVVHDAITRTQASLSEANARSLGELFGRARLAQIAKNKTLQHGQRKPLPLARVRSRGEGAKLSYDYYPQRDMILAEFDAIWAAQALHHSEMTMDVGARLRSIIAYQRPLKPQPVGTCSFLEDQPRAPRALPSMQRFRILQDVNNLRVGGTGESLRDLSAAERETLVPFLATPSSKTGKRTFDQIRRKLGLSASERFNMESAKRSQLEGDLTAARLMQDDAWGPAWLDLSRQDQDRIVLRLLEEESEEALQGWLIQEYGLDSEAARKVSKARLPDRYANLSQMAVERLLPHLEAGLRYDQAATLEFRSHSLRGDGEVHETGLPYYGEVLTRQTAHRTENPKNDEERFGKVANPTVHVALNELRKVINDLIKHFGGPPEQIVLELARDLPLSAKGLKELERAQGDNQKANEQRRKQLSEHRQIDTYENRLRLRLYEEYESAVGLPVQCVFSGKPISFSDLFSANVEIEHILPVSRTNDDGFANKVLATRQSNRDKGNRSPHEAFGSSPVGYDWEGISQRADDLPSNKRWRFGPSAMERFQSEAGFLERHLNDTRYIAKLSKEFVEAIYGGQGAPGQPRSVWVVPGRMTADLRHYAGFNGLLSDDNKKNRTDHRHHAIDALVVALTDPSMVKRAADLAKREDRIEQHDVMKALAEPLKRYRRSLEDRLGKLTVSHKPDHGFQDAMHNDTAYGVTGDRDSSGQMLLVTRKPIESFEKFEQLAQIRDPDIRERLESATLGLSDKTSFAAALKAEANSKFPPIGSLRTITPMKDESFVVIQHGEGHEKAYKGDGNYCYDIWVDEQGKWTGEVITTFEAYQLSRNDPDWWRSALGRGGQSLEMRIRKGDMLELDGPSGRQRVVVYKFSNGKINMADHNESNASGRVRAKELQMIQKAPSSLQKSRARAITVSPSGRLKRH

SEQ ID NO: 2766 - protein, 1092 aa, unidentified
  REGION 1..1092: note = Description of Unknown: Cas Enzyme sequence
MLYRLGLDVGSNSIGWCAVKLAPDEGHSEKAPRYRPSGVLDAGVRILTPNDEAGRDPQSKASLAADRRAARSARRRRDRFVRRQKRLMQVLIEAGLMPADESARKALEKLDPYWFRAAALDGRLEPYELGRALFHLGQRRGFKSNRLADSDDNEKSAMKTGMRDLQEALDSNDARTLGEFLAKRHRRDKHGNRVGGREPESVRFRPTAQGAKNLYEFYPTRDMIESELDEIWKHQRPHHTLLTDDLLKKLKRIIIEQRPLKKPIVGRCTLRPDPNTTEQYGLKIDLGERAPKAHPLFQRFRILQDVSQLMVTRPGRVSRPLTLQERDAIVGKLMSQSGNNIDFEKLRKAANFPDDARFNYELSGRKGFPPDQTAAKLGMNKAFGKQWRSFSRGRQIEIVERLLSTENPDKLTGWLQAECSLDAEKAEAVSETRLPQGHGAFGRGVLADLVKVMETESVEDHDRNTGEVYARPILYSEAVQKLDLHHSDLRGSGDAARLAYYGEVLPRHVISKPDAPKGSQENIGRVPNPTVHIGLNQMRKIVNALIDEYGPPTEIVIELARELKLNKKRKDEIQRENRENERKNADRKAWLEKLGVADTHDARLRLRLFDELPADERVCVFSGKPLSVEKLFDGSTEIEHILPHSQTLDDSFMNKVLCMREANRTKGNRAPAEAWSGEDLQEIVERAERLFQKKAWRFQPDAMKRFEADGGFLARQLIDTQHMARLAKTYLEQVCGQVWAPPGRLTAMLRAKWGLNSLLPDHNFTDANQPKNRKDHRHHAIDAFVVACTDRGLIKRMADASKRAEEIDLDRLFPKDGFPEPYEGFRDDLFARIETLVVSHKPDHGLPPGAQDNVHVTSGQLLQETAYGLVDEEIDGKRYNLVTRKAIDALTKNEIGRVRDAKLRTELRQVAEKAEAAGKKLNEALADYGQKHGVRRVRLLKTEKSIRVVQHGNGFEKAYSPGENHRVEIFELPNGAWAGEGVAVFDANQPGFNPVWRAENSSSKLIMRVHNGDLIEGDFGEGRKVCRVYRLEPSAKRIRLAYHNEAGSIDQRHNDSEDPLRWIFGTYARLKEAKARRVRVDVLGRIHPAKDK

SEQ ID NO: 2767 - protein, 1074 aa, unidentified
  REGION 1..1074: note = Description of Unknown: Cas Enzyme sequence
MKYRIGVDLGTNSLGWAAVMLKADGDADALHPGPLLDLGVRIFSDGRKPKDKSSNAAQRRGPRGMRRNRDRKLIRKAAMLRVLTEYGLMPPTQSERKALESDDPWILRTRALDEKLTAYQVGRALFHLQQRRGFKSNRKTDGEGDGAMFDAIEDVKSRLYTEDARTLGELLGRERLKQSEANAKAARGARKPLPQTRVKATANGTKMVYDYYPDRALILDEFEAIWAAQAPHHANVTAEAKAAIRHIIEFQRPLKVQRAGKCTFLPEEPRAPKALPSAQYARILQEVNNLRVGARGDVARELNENERATLIDFLMRPSSKSAKRTFKAIRKTLNLPDSQTFSLESRKRDHLVGDLTAARMMQKDAWGEAWFNLPCLDQDVVVAMLLDAQHFEDWEQDGKTMQGFGPWIIEKFGLNEEQAKAVYKTNLPDAFGKLSKAALDRIIPLMEKGARYDEATSRDFGDHRTLGTGEIFDEALPYYGEILNRHTTFEKDDPKNDEERFGRVANPTVHVALNELRKVMNDLMKRYGAPEQIVLELARDLPLSDRGLRELESLQRKNQDMNDERRKTLETLNQADTYENRQKLRLYEEALKSFGGAAVCVFTGAPISQTELFSDWVEVEHILPLSKTLDDSFSNKVLSLRRANRIKGNRAPYHAFGHNPDGYDWEQISLRAAALPDNKGRRFDPDAMENWESRGGDFLARQLNDTRYIARLGKTFVEAIFGGQGIRGQARQVWVVPGRLTSDLRHYAGFNHLTGLSGGNRKDRTDHRHHAIDALVVALTDHAMVKRAADLAKREDAVEHGEIMQAMAEPLKHYRKSAEDRLSKLIVSHKPDHGFQDAMHNDTAFGITDHRDDKGQRILVTRKPIDSFTTTKQLEAIVDPILRETFMMATAGLSGKSFNEALLQAAASIPPNGVNRVRIHTPMKDSSFVTITHGPNGEHAKAYKGDGNYCYDIFMGDKGKWSGEVITTFQAYQSSQTDKDWWKKRVGRDGQKLIMRIRKGDMLEVDFNGVRRVVTVFKFSNGQINMAEHQEADASARVRAKDLMRIQMSPSSLQKNNAVALSVSPSGKVRRRPA

SEQ ID NO: 2768 - protein, 1049 aa, unidentified
  REGION 1..1049: note = Description of Unknown: Cas Enzyme sequence
MKYRLGLDIGTNSIGWCLMKLGKGTGDGEASNRGNDELGPTGVIAMGARIFSDGRNPKDKTSLAVARRVARQMRRRRDRYLRRRKKLMQALIRHRLMPEDSAKRKVLELLDPYELRATGLDSSLTPHEFGRAIFHLGQRRGFKSNRKTDNADHKESGKIKQGVAALRAAIEESDARTLGEYLWHRHKDHVSVRARLRGDSKKDEAYELYPHRDMVAEEFDELWKRQASHHPGLLTDAARDEIRDILFFQRALKPVRPGKCTLEPGEERAPWALPLAQQFRIFQELNNLRVEMPGQGSRPVTIAERDRIAGDLLKGRRRTFEQIRRYLALDAEAAFNLQSDRRKHLDEDKTTKILAGKGAFGAAWHGFDVATRTEIVERLLSEQIEERLIAWLMAEYDLDAEAAEKIANARLPEGHTRFGRTALGKIVPIMRESVVTLDKAVVAADPRYHHADFRDGEIHDRLPYYGEVLERHVAFGSGEPGDPEEKRIGKLANPTVHIGLNQLRKVVNALIAEFGHPEEVVIELARELKMNKEQRDRIRKEQTDNQKANDARRARLIEIDQRDTGENRLRLRLWEELNPDNPLDRRCIYTGEPIGIPRLLSDEVEIDHILPFSKTLDNSFANKTVSLRRANRDKGNRSPYDAFHSSPPGYDWQKILGRVSSLAKNKRWRFDPDAMERFEEEGGFLDRQLTDTQYLTRISRQYMTAICDPNKVWAVPGRLTAMLRGRWGLNSLLSDANLKNRVDHRHHAIDAAVVAVTDRGLLQRIATAAARAEERRLERLLENMPEPWDGFRDDLRIALDRIVISHRPEHGIQGRLLEDTAYGVVADPAKEDGYNLVYRRPIAGLNANEVARIRDRAIRERLQRHIFEAEATGLSIKDALASFSKETGIRRVRLLKKERNTVPISTPDGKPYKSYSAGDNYCIDIIEQPDGKWVGKVITVFDANQPDLKPRRRSNHPDGTHIMRVHKGDLLRMDYGGIESIMRVVKLNPTSDRLWLCRHLDSGDLQKRHDDPDDSFRWALISYNSLKKSGARKVSVGVLGVRVRDPGPP

SEQ ID NO: 2769 - protein, 1077 aa, unidentified
  REGION 1..1077: note = Description of Unknown: Cas Enzyme sequence
MRYVLGLDLGETSLGWSVIETKDGTPFRFVDFGVRIFSDGRDAKTKEPLAVARRTARGMRKRRDRFVMRRETLMNRLIKYGLMPADEAERKVLVNDVKNNKERNDQYNPYFLRAKALDEQLTPYELGRALFHINQRRGFKSNLKTDKNDKEAGAMKEAIKETRQRMTEAGARTLGEYLYLLNKDKASTQDFVPVRAKSVVIKGKASYPLYPDRAMYEDEFRQIMAKQGLLKEIEDDLFHVIFDQRPLKQPEIGFCQFEEGERRAYCAFPAYQQGRLLQQINQLKILYDDDERFLTPEERAVLYRYGAHDFSALDKKKKLLTWAAAKKLLKPFGVNPKVSFNLESEKRKGLDADTTAAQLSDEKCFGAAWFSFDKTKQNEIVALLLNAQDESELIEELKDKYALSPEQAEAVAQVSLEDGTASLSLKALEKINPFLLQGQPYHQAVESAGYTFSLKTKDKLPEYYDKFINPETGEIYNELPYYGQALPKQVICGTNAAADKNEPEKYFGKINNPTVHIALNQVRKLVNALVERYGHPESIVVELARELKLGKKAKDDLNKLQTENTKDNDRIAKELERLGVKNSYDNRMKYKLWEDSADDPSQRCCPFCGKPISVERLFSDEFEIEHLLPFARSYSDARTNKVISCRACNREKGNRSPWEAFHADEKRWNEILGRVERFSTKHDENRNRAKKFREDAFQDLDDVLARMLTDTQYMAKAARQYLCFAAHPSKVYGIPGRLTSQLRHHWGLESLFPEDQKDRTDHRHHALDAFIVACTGRGTLQKYATERNDYSAEMPQEKAPHLPYPDFRLRELQDAFDRMVISHKPDHGNPQKAIRSGKTVAKLHEETYYGFAGEGDKKGTWKLIQRLPVSEFKTEADLDVIIDQSGTADKIRALLDGKDKSEHEAIIQKYFADRNTRKVRTYRERNKDVVLPFKDKNGKPYRYAIYGGNAYAEIYCPDRGKNAGKWQIEIIPNYCAHQKGFVPNWRHTDAHAKLIMRLHIDDMVAYEKDGKTIIARVKKMGSGKVYVRENRIAKEEGDKLSWAAYASGMQERNLRKITVTIDGRVIDPKRPKGQKDG

SEQ ID NO: 2770 - protein, 1051 aa, unidentified
  REGION 1..1051: note = Description of Unknown: Cas Enzyme sequence
MTYRLAYDLGTTSLGWCALDLDKNGNPCGILDMGVRIFPEGRDAQSKEPLAVARRGSRGAGRRRDRYLGRRRRLMDYMIEIGLMPKNKAERKALELKDPYELRARAAHEKIDIHELGRALFHINQRRGFKSNRKADGKDNEGGAIKKGIAELQHALMASGLKTLGQFLYEKHKNREGVLARPETKGSKNEYDFYPAREMYEREFDFILETQQEFHPELTDDVCRKLKEIIFYQRPLKPQPVGWCTFEGKEKRARLASPAVQRFRILQEVNNLEIDQLEETDPWLTHEDREKVVKALEKKKEMTFTAIRKLLGLSGDVKFNLEAAENRKSLNGNTTNFLLSNKECFGEAWYDFSVEQQEDIVGFLMDEPDLEQVIETLVRDYDVSLEQAEKISYAPLKDGYGRLSLKAINKILPELEKGFKYADACKEAEYHHSDFRTGEVFDKLPYYGQALEAAVIGGSYAESDKGDPEKFYGKINNPTVHIALNQVRKLTNAIIDIYGPPYEVVIELAREMKYGRDRLIEHNKNQKKNRERNEKINAELEKLGITPNYKNRLQFKLWEDLSADPTKRCCPFTGKQIGINDIFSSEFEIEHLLPFSRSYNDSLANKVLCHKNTNRIKGNKSPHEAFGHTPEWGDILARVENMPFNKRWRFKEEAWDIAKGKNEDMIARQLTDTQYMTRIAQKYLSFVVPQQKGECRVYGIPGQLTALMRRKWGLNNIFDDESEKKDRSNHRHHAIDAFVAGCTTRGMLQAVSRANENDRDRVIIPEPFHDFREQLQDKAESMVISYKPDHGNARQAVQKGKTVAGLHLDTAYGLAGVGNSKKGTMIYVTRKALSGFTKRKDIEAVADPVWRQALLNVIAECKDGSAEFKAAIADFSQKRKVSRLRVHVERSPETMIPVYQAYEKGEEGAKPYKYYSLGGNYCAEIYEIKHGKDAGKWGIDIISNFHAHQKDFIPKWQREHPTAKKIMRLQINDMVAYEEDGETKICRVKKMTSGLIYLRDHRIAAEEADKLSWAASPGQFQKKNARKISVDITGRVKDPKAALTQNKEKAA

SEQ ID NO: 2771 - protein, 1219 aa, unidentified
  REGION 1..1219: note = Description of Unknown: Cas Enzyme sequence
MKKRILGLDTGTNSLGWAVVDRDETNNYQLIKRGDLIFQEGVKVEKGNESSKASDCTQHRELRKQYFRRRLRKIEVLKVLVRHNLCPYLSDEQLHEWHVHKIYPKSDEFMLWQRTNDNEDKNPYYYRHLCLHEKLDEGVIEDRYILGRALYHLAQRRGFLSNRLDNNEDENEKGAVKVGITELTKEIEKSGCEYLADYFYKIYSNPDNHERIRTRYTDREEHYEKEFQAICQKQELDDELDDELTKALYFQRPLKSQRRGVGRCTFEPRKPRCADSHPDYEEFRMLSFINNIKIQSPNDLELRSLNSEEKSKILHCFYRISKPNFDFEDIAKVLAGKNNYQYFKDKGDKAYKFNYRMTQGVPGCPITAQLIKIFGDDWKNTIAELYLRMETKNGQKTIDNAVNDIWNALYSFSSKDKLKDWAKENLQLDDDTAKSFSKIKLSHSFAALSLKAIRKIIPFLRKGMIYSHAVEMANIPSIVGCYVWNNEEKRDFIIKNVETFLEDRDQPTKDFCIKDFLQDNFDLKPDATDKLYHPSMIDVYQDAKQVNGIYQLGSPRTNAIRNPMAMRSLHEIRKVINQLLKEKIIDNNTEVHVEYARELNDANKRKAIADYQLSLDKKHKKDAEEMVKLFKEETGQAITPNKNDILKFQLWEEQGHLCLYTGKQIGLTDFLGNNPKFDIEHTIPRSVGGDFTLENLTLCESKFNRDVKGAQLPSQLSNYQDILPRIEKWKEQYINLTKQIDRCMTFSGMAKEIKDRIIQKRHRLQMERNYWRGKYEHFTMTEVPEGFSLRQGAGIGLVSKYAGLYLKSLFHDSTDRHKGNVFTVKGTTTAEFRKMWGLQNHYEKKSRDNHCHHCIDAITIACIGKYEYSKMAEYYHNEELFDEGKGIKPQFKKPWPTFTQDVLNLENNLIVVHSTPDNMPKKAKKYIKTKQEKLLAQGDCARGSLHNETYYGAIEKDGEIKYVIRRPITSFEKDTDLNSIVDGTVKEIIMAAVEGKNFKEAIAQLIYMNKEKGILIKKVRCYVSGVKKPLHIRMMRDLSQKDYKRNYYVANDTNYCMAIYEGSVKNKLKRDFEIVNNLEASEYFKKSTDRNDFPNLFPIISLKHNFPFKSLIKVGTLILLYEKDPKEIDFDNLKDINKRLYKVTGLSSMEVKGSNYGVINIRHHQEARQSKDLKSKNGAFVNGEDYRPAITMLHSQFNALVEGYDFKINILGEIEPINR

SEQ ID NO: 2772 - protein, 1208 aa, unidentified
  REGION 1..1208: note = Description of Unknown: Cas Enzyme sequence
MKKRILGLDTGTNSLGWAVVDSDEYGNCNLVKYGDLIFQEGVKIEKGIELSKASERTGHRALRRQYFRRRLRKIEVLKVLIKHGLCPFLSDELLHDWHVHKIYPKTDDFMLWQRTSDNENKNPYYYRHLSLHRRFNLDRQDERFMLGRALYHLAQRRGFLSNRLDSTPEQETGKVKTGIADLTHEMEAAGCEYLGDYFYQIYSDPDNHNRIRTRYTDREQHYEKEFHAICKMQQLPPEMVEELEKALYFQRPLKSQRKGVGKCTFEPKCPRCADSHPDFEEFRMLCLLNNVKIQTPYDLELRYLNQEEKDRITPLFYRTSKLNFDFEDIAKTLAGKGKYQYFKDEGGMPYKFNYRMTQGVAACPLTAQLIKIFGTDWKNALAETYRLTDTQGGQKTVAQMVDDVWNVLSTFESKDKLQQWAQKNLQLDEEQAKRFSEIKLSHGFSALSLKAIHKILPFLRQGYIYSHAVVLANIPAIVGEEVWQDADKQRFIMKNVLDILQCQDQATKDFCIKDFLLNNFNLKPGEADRLYHPSMIETYRDAGQKDGIYQLGSPRTSAIRNPMAMRSLHEMRKVINQLLKEKIIDINTEVHVEYARGLNDANMRKAIADYQRSQDKKHQKYVTSIKELYLHETGKSIDPTETDIRKYELWEEQSHKCLYTGAEIGIADFLGDNPKYDIEHTIPRSVGGDSTMENLTLCDSRFNRDVKKARMPSQLANHEEILTRIEGWKKRYEELTRQIDKCRTFAGMAKDMKDAVIQKRHRLKIERNYWKGKYERFTMTEVPEGFSRRQGAGIGLVSKYAGLYLKSLFHDPQNRSKSRVFTVKGTTTAEFRRMWGLQSEYEKKSRDNHCHHCIDAITIACIGKKQYDEMALFYHDEELYDDGRGKKPQFRKPWPTFTEDVLNLEKSLIVVHETPDNMPRKARKYVRTTRGKFLAKGDCARGSLHNDTYYGAIERDGEIKYVVRKALASFEKESDLDNIVDDTVKEIVREAVRGKNFKEAIAQPVYMNKEKGILIKKVRCNAPKTLKIFSVKPCRDTSFHQYKKDIYVANDRNYMMAIYEKGADKKIGFEIVKNIEAANFYKKSMDREDYPCLVPQTKNGAKIKYCLKRGMAVLLYQNDAEEIDFNNMEDIIKRLYFITGLGLDGSYGMVTLTHVQEARDKLEPKKGAFKMGEIYRPKINLRQTQFQGLIEGIDFNISILGDIKPINK

SEQ ID NO: 2773 - protein, 1217 aa, unidentified
  REGION 1..1217: note = Description of Unknown: Cas Enzyme sequence
MKKRILGLDTGTNSLGWAVVDSDEYGNCNLVKYGDLIFQEGVKIEKGIELSKASERTGHRALRRQYFRRRLRKIEVLKVLIKHGLCPFLSNELLHDWHVHKIYPKTDDFMLWQRTSDNENKNPYYYRHLSLHRRFNLDRQDERYMLGRAFYHLAQRRGFLSNRLDSTPEQETGKVKTGIADLTHEMEAAGCEYLGDYFYQIYSDPDNHNRIRTRYTDREQHYEKEFHAICKMQQLPPEMVEELEKALYFQRPLKSQRKGVEKCTFEPKCPRCADSHPDFEEFRMLCLLNNVKIQTPYDLELRYLNQEEKEKIVPLFYHTSKLNFDFEDIAKTLAGKGKYQYFKDEGGKPYKFNYRMTQGVAACSTTGQLKRIFGDNWKETIAETYRLTNTRKGQKTVAQMTDDVWNVLSTFESKDKLKCWAQVNLQLDDDQSKRFAAINLSHGFASLSLKAIHKILPFLRQGYIYSHAVMLANIPAIVGEEVWNDADKRSFILNNVLTFLQYEDQTTKDFCIKDFLLNNYNLKPGAADKLYHPSMIETYQDAKQQGGVYQLGSPRTNAIRNPMAMRSLHEVRKVVNQLLKEKIIDQNTEVHVEYARGLNDANMRKAIADYQRSQDKKHQKYVTSIKELYLHDTGKSIDPTETDIRKYELWEEQSHKCLYTGAEIGIADFLGDNPKYDIEHTIPRSVGGDSTMENLTLCDSRFNRDVKKARKPSQLANHEEILTRIEGWKKRYEELTRQIDKCRTLAGMAKDMKDAVIQKRHRLKIERNYWKGKYERFTMTEVPEGFSRRQGAGIGLVSKYAGLYLKSLFHDPQNRSKSRVFTVKGTTTAEFRRMWGLQSEYEKKSRDNHCHHCIDAITIACIGKKQYDEMALFYHDEELYDDGRGKKPQFRKPWPTFTEDVLNLEKSLIVVHETPDNMPRKARKYVRTTRGKFLAKGDCARGSLHNDTYYGAIERDGEIKYVVRKALASFEKESDLDNIVDDTVKEIVREAVRGKNFKEAIAQPIYMNKEKGILIKKVRCYARRITSPLNIRQHRDVSSKDYKQAFHVANDTNYCMAIYEGMVKGKVKRDFELVKTIDAATYFKDSTCRTDYPTLVPDKSNRELPFKTMLRIGTMVLLYEETPTEIDFSDKIDLARRLYKVTGLSYLATKSGDYGRITLKCHQEARQSKDIKSENIAFKMGEEPRPAIMLLHTQFRALVEDIDFHINALGEIELINS

SEQ ID NO: 2774 - protein, 1208 aa, unidentified
  REGION 1..1208: note = Description of Unknown: Cas Enzyme sequence
MKKRILGLDTGTNSLGWAVVDRDEYNNYTLVKHGSLIFQEGVKIEKKVESSKAAERTGYRSLRKHYFRRRLRKIEVLRVLIKHNLCPYLSEELLHAWHVHKTYPKTDDFMLWQRTSDNDDKNPYYYRHLCLHQKLDLERQDERYILGRAFYHLAQRRGFLSNRLDSTPEQETGKVKTGISDLTREMEVAGCEYLDDYFYQIYSDPNNHERIRMRYTDREQHYKKEFHAICEMQQLSQDLVTELDKALYFQRPLKSQRKGVGKCTFEPKCLRCAESHPDFEEFRMLSFINNIKIKTPHDLELRCLSLEEKAKVQNLLYHNIKSNFVFEDIAKVLAGKGQYQYIKEIGDKPYKFNYRMTQGVPACPTTAQLIKIFGDDWKDAIAETYRLNNTRFGQKSVAQMVDDMLNVLSTFSSDSKLQLWAEKNLQLNEEQCKKFAGIKLSHGFASLSLKAIHKILPFLRQGYIYSHAVEWANIPTIVCEEIWNNIDKQRFIVRNIQDMLLFQDQCTKDFCIKDFLLNNFELNTGAVDKLYHPSMIETYKDAEQKDGIYQLGSPRTNAIRNPMAMRSLHEMRKVVNKLLKDKFIDFNTEVHIEYARGLNDANMRKAIADYQRGQDKKHQNYEKSIKDLYFQETGKNIDPTETDIRKFELWEEQSHKCLYTGAEIGIADFLGDNPKYDIEHTIPRSIGGDSIMENLTLCDSRYNRDVKKAKMPSELANHEEILTRIEGWKKNYESLTYQIDKCRTHAGMSKEQKDPIIQKRHRLKIERNYWKDKYERFTMTEPPSDFSRRQGAGIGLISKYAGLYLKSLFHDPKNRNKSRVFTVKGTTTAEFRRMWGLQSEYEKKCRDNHYHHCIDAITIACIGKKQYEDMASFYHDEELYDDGRGKKPQFRKPWPTFTEDVLNLEKSLIIVHDTPNNIPKKARKYVRTANGKFLAKGDCARGSLHKETYYGAIERDGKIEYVVRKALTSFEKEADIDNIVDDTVREIVRNAVRGKTFKEAIAQPIYMNKEKGILIKKVRCKAPKVLKIFSVKPCRDTSFHQYKKDIYVANDRNYMMAIYEKGADKKIGFEIVKNIEAANFYKKSMDREDYPCLVPQIKNGAKIKYCLKCGMAVLLYQNDAEEIDFNNMEDIIKRLYYITGLSLSESYGMVTLTHAQEARDKLDIQKGAFKMGEVYRPKINLRQTQFQGLIEGVDFNISILGDIKPLNK

SEQ ID NO: 2775 - protein, 1217 aa, unidentified
  REGION 1..1217: note = Description of Unknown: Cas Enzyme sequence
MKKRILGLDTGTNSLGWTVVDRDEYDNYTLVKHGGLIFQEGVKIEKKVESSKAAERTGYRSLRKQYFRRRLRKIEVLRVLVKHNLCPYLSEELLHAWHVHKTYPKTDDFMLWQRTSDNDDKNPYYYRHLCLHQKLDLERQDERYILGRAFYHLAQRRGFLSNRLDSSPEQETGKVKTGISDLTREMEAAGCEYLGDYFYQIYSDPNNHERIRTRYTDREQHYKKEFHAICEMQQLSQDLVTELDKALYFQRPLKSQRKGVGKCTFEPKCPRCAESHPDFEEFRMLSFINNIKIKTPRDLELRCLSLEEKEKIRSLFYRVSKPNFDFEDIAKALAGKGQYQYIKDVSDKPYKFNYRMTQGVPACPTTAQLIKIFGDDWKDAIAETYRLNNTRFGQKSVAQMVDDMLNVLSTFSSDSKLQLWAEKNLQLNEEQCKKFAGIKLSHGFASLSLKAIHKILPFLRQGYIYSHAVELANIPVIVGQEIWNDTDKQGFIIRNIQQMLQCQDQTTKDFCIKDFLLNNFELNTGAVDKLYHPSMIEAYKDAEQKEGIYQLGSPRTNAIRNPMAMRSLHEMRKVINLLLREKIIDSNTEVHVEYARGLNDANMRKAIADYQRAQDQKHQKYQNSIKELYLQETGRNIDPTETDIRKYELWEEQSHKCLYTGAEIGIADFLGDNPKYDIEHTIPRSIGGDSIMENLTLCDSRYNRDVKKAKMPSELANHEEILTRIEGWKKNYETLTYQIDKCRTHAGMSKEQKDPIIQKRHRLKIERNYWKDKYERFTMTEPPSDFSRRQGAGIGLISKYAGLYLKSLFHDPKNRNKSRVFTVKGTTTAEFRRMWGLQSEYEKKCRDNHCHHCIDAITIACIGKQQYEDMASFYHDEELYDDGRGKKPQFRKPWPTFTEDVLNLEKSLIIVHDTPNNIPKKARKYVRTANGKFLAKGDCARDSLHKETYYGAIERDGEIKYVVRKALTSFEKETDIDNIVDDTVREIVRNAVRGKTFKEAIAQPIYMNKEKGILIKKVRCFAQGITRPLNIRQQRDISLKEYKQTFHVANDTNYCMAIYEGLVKNKIKRDFELVKTLDAVTYFKDSTCKVEFPTLVPSKSNAELPLKSIIKIGTMVLLYENTPAEIDFSDKIDLARRLYKVVGLSSMVISGYAYGIMLLRYHQEARQTKDLKSKNGRYKNGEQYRPLIGLLHTQFDVLVEGFDFHINALGDIELLNR

SEQ ID NO: 2776 - protein, 1219 aa, unidentified
  REGION 1..1219: note = Description of Unknown: Cas Enzyme sequence
MKKRILGLDTGTNSLGWAVVDRDEESGEYALVDHGVIIFQEGVKIEKGIESSRAAERTAHRALRRQYFRRRLRKIEVLRVLVAHNLCPHLSDEELHEWHVHKRYPRNDDFMLWQRTSDNEDKNPYYYRHLCLHRQLDLHDIGDRYILGRALYHLAQRRGFLSNRLEQTDEKETGKVKDAITGLSDEMRAAGCEYLGDYFFRLYSEQGNRVRLRSRYTDREEHYKREFHAICRKQGLDEQLTKELERALYFQRPLKSQRQGVGKCTFEPRCPRCADSHPDFEEFRRLCFLNSVRVQGPYDFSPRPLDADEIRYIGHFFYRKSKSNFDFEDIAKAIAGKNNYQHMRDKGNKPYKFNFRMTQGVADCPTTAQLKKVFGDDWRQGIAETYTLNTRKDGTLKTAREMADDIWNVLYSFADKEHLVAFAKDKLQLDDEKAEKFSKIRLTHNFASLSLKAIRKILPFLREGMIYSHAVAMANIPSIVGEYAWEEKKDFILENVKTYLEDKDLATKDFCIKGFLQDNFSLDPGAAERLYHPSMIETYQDARRNEAGVYQLGSPRTSSVRNPMAMRSLHELRKVVNALLKAGTIDENTEVHIEYARELNDSNKRQSIMRYNKELENRHKQYEEEIKKLYKEETGKDIVPTEAEVQKFQFWEEQEHICLYTGKRIGIADFIGANPKFDIEHTVPRSVGGESTMENLTLCESRFNREEKKAQLPSALANHDEILVRLEPWKEKYEELSAQIDRLHTNGGMDKAQKDRILQKKHLLRLKRDYWRGKYERFTMTEEPEGFSRRQGAGIGLVSKYAGLYLKSLFHKKGDRNKSNVYVVKGSSTAEFRQMWGLQSQYEKKSRDNHIHHCIDAITIACIGKAEYDKCARYYREEEAYDAGRAKRPQFPKPWPTFTEDVLGIEQSLLVAHDTPDNMKKHARKTVRTPRGKFLATGDSARGSLHLDTYYGAIEREGKVRYVVRKPLSSFTSEKDLDQIVDETVKQVVKDAVAGKKFAEAIKEPIYMNKEKGIRINKVRVFVPSVTNPLHIRKQRDVSRKDYKQQFLVANDLNYMLAIYEGEVKGKPKREFEIVNNLEAADYYKQSMDRGDWPDIVPERSTKNGFPLYCKLKTGTHVLLYEKTAAEIDFANYKDLDKRLYKVSGMSSMTISGSKYAVINLRYHQEARASKDVKAKNGAYKNGEEHRAAIIMLHTQLKALVEGKDFRISELGKITPINI

SEQ ID NO: 2777 - protein, 1204 aa, unidentified
  REGION 1..1204: note = Description of Unknown: Cas Enzyme sequence
KMEKILGIDTGTNSLGWAIVEKRDEEYKLLEKGVNIFQEGVKIEKGIELSKAAERTEHRSTRVRYYRIKIRKIRLLKILSDHQLCPSVSSQELSLWRHRNIYPKNELLLQWESTDDEADKNPYTFRYKCLTEKLDLTDPTQRYILGRALYHINQRRGFLSNRKSEDSEEDGTVKTGINDLTQAIENAGCKYLGEYFYHLYHKGEKIRNHYTARNEHYLKEFKAICEKQQLDDSLVKELENAIFFQRPLKSQKGLVGHCVFEPKKTKCPASHPLFEEFRMLQFVNNIKIQTPHDNELRPLNEEEREKILPKFFRKTKTSFAFEDIAKELAGKNKYAYYKDPKGKPYLFNYHMDTSVSGCPLTAGLKDIFGEDWINSVSEVYDKAEGKSQQQIMNDIWHVLFDFSDKEHIEAFGRNHLQLNEEDAKKFSNIKVHSDYASLSLKAICKILPYLRMGLIYPIATFFGNLEEVIPADIWGIKENRKQIIAELLTAISDKDNNPADERTTEQCIKDYLTIHLKVSKETTNKLYHPSMIESYPHVPENENKLGSPRINSVRNPMAMRSLFRMRHVINTLLAEGKIDRDTTIHIEFARELNDANKRQALYRYNRENENERKKAKDEIIKLYKEATNKDIEPTDTDILKYLLWEEQKHKCIYTDEEIGISDFIGENPKYDIEHTIPRSVGGDSTMMNLTLCNSKFNREIKQTSLPSQLSNHEDILLRIEEWKKKYEDLDKRIRKTRTSSSMSKEQKDRKIQERNYLKLRRDYWYGKYQRFVMSNVPEGFSRRQGANIGVISKYGRLYLKSYFNKVFVVKGLATSDFRKIWGIQDIYSKKERVNHVHHCIDAIVIACIGPGEYNKLAEYYHDEENHKWYGASKGRFDTPWPTFATDINKIQQEIIVAHHTADNMAKKGKHKILLKGKKVWANGDTARTSLHLDTYYGAIEQDGVVKYVVRKPLDENFKESDVKNIVDETVKEIVQNAINEHGNLKKAIAAGIWMNKEKGIAIKKVRCFTPSVTRPLHIRQQRDLSPKEYKQQFHVMNDTNYAMAIYIGRDKKGKEKRAFEMINNLDASRYFRSSNDKEAVGHNLVPLSKKDYPLTYVLKKGTMVLLYGNTPEEIQECTKEELIKKLYKITGLSSTVINGCDYGSITMQHSQEARPSGELKAKNGAYKNQENFRSKITMYHTQIKALVEGYDFNINDIGEIKMLR

SEQ ID NO: 2778 - protein, 1201 aa, unidentified
  REGION 1..1201: note = Description of Unknown: Cas Enzyme sequence
MERILGLDTGTNSLGWAIVNKHDDGHYELLDKGVDIFQEGVNREKGVESSKAAARTEKRALRVRYYRIRLRKIKLLHILSENHLCPPLSNEELSLWRHKKIYPKNELFMEWQATDDRTGKNPYHDRFVCLTQKLDLTNLQNRYMLGRALYHINQRRGFKSNRKDLTKEDKDAGTVKEGISVLSQEIKAAGCTYLGEYFYHLYEKGEKIRKHYTAREEHYLKEFTAICERQELDAELIGKLEHAIFYQRPLKSQKGLVGHCVFEPKKTKCPVSHPLFEEFRMLSFINSIKIQTPSDAVMRPLNDEERTKIKSLFYRKSKRNFDFADIAKKLAGKSKYAYYRGGNAPFLFNYFKDSNVSGCPVTASLRDLFGDDWLDSVKEVYDRVDGKTDLQIINDIWSALFFYTDKDKLAEFGKRHLQLSDDDAKKFGAIPLDDGYAALSLKAITKILPYLRSGMIYSHAAFMGNLEEVLPSGIWDDSVRREEVIQELIRTISSYSRHSDDRTLEQCLKDHLSVKYGVSDERLEKLYHPSMIEMYPKVPLDENKLGSPRNNALRNPMAMRSLFQMRHTINQLLKEGKIDRNTTIHIEFARELNDANKRIALAQFTRDNQKEHDNCRKKIIELYRDATGQTIEPTETEILKYQLWEEQNHICLYTGKQIGITDFIGPDPSYDIEHTIPRSKGGDSTRMNLTLCSSKFNRDVKKTMLPTELPDHELILHRIENWKKKYEDLDSQIRKIRTWSGMEKEQKDKKIQRRHLLQLQRDYWYGKFHRFEMTDVPEGFCRRQGVDISVISKYGRLYLKFFFDRVFIVKGLATSDFRKIWGIQDIYSKKERVNHVHHCIDAVVIACMGPGEYSKLAAYYHDEENHEWYGMSKPHVDLPWPSFVTDMKDIQNEIFVVHHTNDNMAKQGRRVRRKDGTMSVPCDSARVQLHLDTYYGAIEQEGNIKYVVRKALDANFKESDIKNIVDDSVREKVLDAVKRLGFKEAMASTIWMNEDKHIPIRKVRCLVPSVTRPLSIRQHRDRSEKEYKRTYHVANNSNYAMAIYVGRDQRGKEKRAMEIVNNIDTAKYFKASFDRVAFGDTFIPLKKNDLPLAFVLRKGTMVLLYENDSDEVRECTHEELVRRLYKVTGIATMVIHGNTYGVIELTYHEEARPSTEVKGKNGAYKAGEELRPKIIMLHTQFKGIIEGVDFILSDTGEIKIK

SEQ ID NO: 2779 - protein, 1199 aa, unidentified
  REGION 1..1199: note = Description of Unknown: Cas Enzyme sequence
LGIDTGTNSLGWAIVEQQGEGYKLVDKGVNIFQEGVKIEKGIESSKAAERTTHRSARVRYYRIKVRKIRLLKILSDYHLCPPVTSAELSQWRLRNVYPDNELLHQWEGTDDKSDKNPYTYRYKCLTEQLDLTDTTQRYILGRALYHINQRRGFLSNRKSEDGDGEGAVKSGISDLTKEMEAAGCHYLSEYFYHLYHKGVKIRGHYTARNEHYLNEFDAICEKQHLSEELAKKLKNVIFFQRPLKSQKGLVGHCVFEPKKTKSPASHPLFEEFRMLCFVNNIKIKTPQDDELRPLTEEERKKILPKFYRKSKPDFDFEDIAKELAGKGKYAYYRDPQGKPYLFNYRMDTSVSGCPVTAGLRDIFGEDWVNAICEVYDKAKGKTLLQIVNDIWHVLFDFSDKEHLIEFGKKHLQLSDEEAKKFGNIRLSSEYASLSLKAIGKILPYLRGGMIYSLSAFFANLGEVVPADIWQEESNRPQIINGILEAIARRDSNELDHRTTERCIKDYLIAQYEVTEKETDKLYHPSMMEAYPRVPEGVNQLGSPRISSLRNPMAMRSLFRLRHVINTLLAEGKIDRDTTIRIEFARELNDANKRQALARYVKENENERKKARAEIVQLYKGETGKAIEPTDTDILKYQLWEEQDHRCIYTDEQIGIADFLGPNPKYDIEHTIPRSAGGDSTKMNLTLCNSRFNREVKQTLLPSQLANHQEILLRIAGWKERYEELDKRIRRIRTSSSMTKQQKDQKIQARNLLKLRRDYWYGKYQRFVMTKEPEGFSRRQGTDISIISKYARLYLKSFFNRVFVVKGLATSDFRKIWGIQDIYAKKERVNHVHHCIDAIVIACMGSVGYSRLAQYYHDEENHKWYGSAKGHLAAPWETFQEDMNKIQREIIVSHSTQDNIGKSGRRRIRLKGKKVWVDGDAARASLHNDTYYGAIERDGKIKYVVRKALDDSFKESDVDKIVDDTVRGIVKEAISACGSLKEALAQGIWMNKEKGIPILKVRCFTPSVTRPLNIRHQRDVSAKEYKRQYHVTSETNYAMAIYVGHDKRGKEKRAFELVSNLDACDYYKESNNKEVQGYHLVPPTKNGYPLTYLLKKGTMVLLYENTPDEIRDCTKAELVRRLYKITGFSSMVVGGNEYGTLTMLHSQEARPSSSIKTKNGAYKQNEEFRSSIAMLHTQLKALVAGRDFEINDLGEIKWLK

SEQ ID NO: 2780 - protein, 1187 aa, unidentified
  REGION 1..1187: note = Description of Unknown: Cas Enzyme sequence
LLVDSGVHIFTEGVKEEQGKEVSKAAERTSYRAMRRGFYRRKLRKIRLLRILSELGWCPALSPELLSQWRLKKVYPATPEFMQWLGTDDDNAITPYRFRVICLHEKLDLTQEAQRYILGRALYHIAQRRGFRSNRKDQSNDDEKGKVKEAISGLSQKIKDEGCEYLAEYFEKLYKEGKRIRNQYTSRDNHYVEEFHAICRRQELDEDTVNRLEHVLFDQREPRKHTVGHCLFEPTKSRCKITHPDFEEMRMLQTLNQIRMKTPDDDMLRPLWDEERKAIIPLFQRKSKSNFYFDDIAKKLAKPYIKRYGEKCYGYYKTDGDKDILFNYPMDMGISGSPFTAGMVAALGPDWKAVIDARYAKGEGKKIDDKVNDVWHALSFFDNDEKLEVWLETNLGIEADTAKKVAGIKMVSAYASLSHKVIRKILPYMREGMIYSYAVMLANIDAVLPAYVRDNDDMRKAAVDMAVECLNEYDKKACECTMYQWLKNFLAEKYHIDHKTLNRLYHPSDLETYPHVRPDEQDRMRLGSPRISSIRNPMAMRSLHRIRHVVNALLDKGMIDRDTEVHIELGRELNDANMRAAIRRQNNANKQIKAKAAAEISKHFKNFGSSESDMTKALLWAEQVRDIDILKCKLWNEQHAICLYTGKQIGLSDIFGPNPKYDIEHTIPRSRGGDSAMENLTLCDSRFNRDVKKTKLPSELANADEVMQRVAFMKEKADDLQKQIRRCCTNAYMDKSIKDRIIQKRHFLEMQQAYWRNKYRRFEMTEVPEGFSRRQGATAGIVARYARLFLKSLFDDVSIVKGAATADFRKAWKLQSEDEEKSRENHTHHQVDAVVIACIDRGDYQRLAASYHLNGYADRERPSVPEPWEGFVDDMRRIQAGTLISYDFTDNAPKQVRRRIKFTGSHHIKGPKPSHISESDTARLRLHMDTNYGAIERDGEVKYVVRNSIGSLKQKDIKDIVDSVVRQKVQEAYDAKGDAAFSEPIWMNEAKGIQIKKVRCFAPDVKNPLNVRKNRDISRHEYKRTGHFLNDGNYCIAIYEQILPEGSTTKAKRSFLIVNNLAAVSYFKISNRAELYPSVDENGYRLKAVLHQGDSVLLYEKSPEEIYNASAAELCRRLYIITSMEADGRINFKQAQLSQSGRKKKEDDKLGFFCPYMRINAKSLNALIQNQDFTIDVIGKIKFLKHD

SEQ ID NO: 2781 - protein, 1071 aa, unidentified
  REGION 1..1071: note = Description of Unknown: Cas Enzyme sequence
MRDEGEGYRLGLDVGTNSIGWAAISLGDGGEPRGVLDMGVRIFADGRDSQSAASNAADRRTKRGERRRRNRYVDRRRRLQNALAELGLEPSDKSERALLESLDPYDLRARALDEALSPSELGRALFHLNQRRGFKSNRKSNRKTDGGDEAEKSKMRERMSKLGERLRASGARTLGEYLAARRRVGDTVLARPDEEFYPDRAMLESEFDAIRDAQTPSHDLSVDDWARLRDLIFYQRPLKPVDPGLCRFEEGEKRAPRALPSFQEFRILQDVNNLRVTVGTEPERDLSESERERVLNRLRSGRDVKLTEKDGKPVLKHVGLRLPTGAALNLSAGGRAKIAGDETAAKLGKPKLFGKRWAALPLDERDEIVRFLLDAEDPNAVVDKARSDWGLDADQAEAVALVSPPSGYGSLSEKAIRKMIPHLERGEMYSDAAQSAGYDSHSDFRNADARGELPYYGEVLTKAVVGGDPSRDPNERGEAERYGRVSNPTVHIGMNQLRRVVNALIAAYGKPREIVVELARELKMDRERKLVYERRRRENERANERHKEALESEGLRDTRDNLRKLRLWEEQGDVQARFCPYTGDQLSFKMVASAQTEVDHILPFSRTLDNSVANMVVCVAGSNRVKGDCSPFEAFGNSPAGYDYDAMLARAAKLPGNKRWRFQPDAMERFENEERGFLDRQLSETSYLSRLAREYLACLYDASEGLKVRVLPGFLTALLRHGWGLNGMLGESSDGETRGKQRDDHRHHAIDALIVANTTQGLLQRFSEAAGRSGGDVLTERLASLVPDLWDGFSRECLKERLDKIIVSHKPDRGTAGANGGTSGKLHNATAYGLIEPLEDGETTHRKPVSEFKERAYLKKVRNDGLKAELMALWDEVHAEGGTAADFAERAKRVGVSRRNGRRRVGSVRVVENLRVVPISDQSGRPYKGYKTDGNEFADIWRMRDGSWKIVVVPTFHANHPDFDIERFRPTTSKGKHRGKPDPVAKRVARIYKNDMCALGEGDERRIVRVRKFTAASICLDDHNEANVDARERKKEIEDARTSAKKLREQGFRPIRVDAIGRVLDPGPFPP

SEQ ID NO: 2782 - protein, 979 aa, unidentified
  REGION 1..979: note = Description of Unknown: Cas Enzyme sequence
MKRIWGFDLGTASVGFAVIEHDEPKGEGKILKIGVRVFPEGVTEKTKEPRNWERRNARLARRQFRRRRWRKRALRATLVDAGLLPESEREPRPHQTRGDFFLSSEKGRDPYELRAKGVHEKLEPYEIGRALFHLSKHRAFAGSRKFDSSKAGDKKQEREEKGIEQEIKSHKEKMGARSLGEYMQQDFKAPNPKRGHHFHRKMVEDEFARIWDTQSKFHPALLNAEIKKRLDQIIFFQRPTFFRMKTVGKCDLEPSEDRCLKADWHAQRAVMLQMLNSIRFSGDRRLTSDQRGTILSRAECKGKVSFASLRKVKVLGLQNELFNFEIGGKKDMLGNATEQKLAGVFGDAWKDLPARDKIRDEIARRLWQVEYRLVGNKRAEIRDWKEIAAQREKFAKEAERDWSIAAEQAKALSELSLPDGHAMHSKRAILNMLPYLEQGLRYDEAKAKAYPQPPPAGAPAERLPPPREIRNPTVMRTLNELRNVANNLLRVYGRPDLIRVELGRDLKMPREKRIKLIYEQRGNEAEREKAKAALAEHNLPPNGLNLEKWLLAEQQGWRCPYTGKSISWDGLFRTGLFEVDHILPRSRSFDNSFGNKVVCDRDANKEKDKRTPYEAWGKAPDKWVEILKFLDDIEKYTQKNARPFTRGKSARIKTLDYPAAGSEDFTNRQLVDNAYASREAREYLSALGVKVEPANGRATWTLRHLWGLNEILSDSPEKNRDDHRHHAIDALVVALTSPAFVKRASEFYAAGRWLTDENRSKEQTEHLKKRFAEPWKAIHADAERAAEEIIVSHRAQRKVSGALHDDLPWGDTGEDVVSGKIAYRLYSQRKDGKAVRQRIQPALMRAIGPDRSAFVPTNSNHHMVIYRDAAGKLKYQVVAMFDAAMRVARREPIVNRAPEPGATEVRSLCIGDMIERQTDDKKSYWVIKALWPNGKQTTIQPHNAAREVDKYSPTTAKLFREGARKVVVDPIGRVFPAND

SEQ ID NO: 2783 - protein, 1020 aa, unidentified
  REGION 1..1020: note = Description of Unknown: Cas Enzyme sequence
MELRYSLDIGTNSIGWCIYEIDGNNNPFRMVDAGARVYSDGLEPKSETSKASARREQRSARRRNDRVNKRKKELMTCLVRHKLMPDNEEERKKLEFLDPYKLRYDGIKIQLPPFEVGRAIFHLNQRRGFKSNRKSDAKNSENGVVKDSINSFKSRIESAGCHTAGEYLYTLRKENKPVRGRRHGTAAKDLYDTYMDRAMAEFEFNEIWVRQKSFNPAVFSESAYHDIKDAVFFQRPLKPVKVGKCPFIRSEERAQRALPISERFRIYQMINDIRIINPDMTAVPLNESQRETAAALLFSQKEVKLDKLKLKLGLGGADKLNFEHTDKLKGDEIASVLGSEKLFGKRQWQGFDIRKRTEIVKDILDDKKTDEQLREYLKANFTLSDEQLNRIINAPLPDGRMRYCEEVLNRLTAHMEKGLNLYEAMEQENYETGIKADGSYDKLPYYGQILINQIGTGTEEPEDHEEIRYGKIANPTVHRGLRQLQRVVNRLIEKYGKPEQIVVELARDLKNSKDQKQKIIRQQAENKKINDNYAEQIKELGHNVTRENLDKMKLWNEANHTCPYSGQTISMTMLFSPEVEIEHILPFSRTLDNSMANKTVSMRRMNRVKGEQSPYEAFAHTAEWESILGRAYDLPDNKRWRFAEDAMSMYEKEGGFLGRQLNETRYLSKMAKLYLGSICSDTWVVTGSLTSMIRRYTGLIGLMANDGTKNRKDHRHHAVDAMAIGLIDRSMLQKISRIASGDGYYGHEKLDSLYMDYAPWKNFYHDAKAVYDNIVVSHKQEHRKTGGFFNETAYGIVDNDEGGNNLVTRKSLENINFTNYSDIRDKKIRNDVKDVVDDLLREGLPKKDAEKELRTRLNKFSETTGINKVRILVTNESIEKVKDKTGKVYKAYTTGEYHHVDVFKKPDGKLDYESASYYDVSNKKYMPRWKREKNNKLVLRLHKKDIVKVGDEKQLYIVLKIQPSPSNKNFMIAPISVGSKIKEIETDKTIRKFVSFSNITKQRIHKVFIDEIGEVKLLRY

SEQ ID NO: 2784 - protein, 1159 aa, unidentified
  REGION 1..1159: note = Description of Unknown: Cas Enzyme sequence
MGYKFAFDLGSTSCGWSVVEIDENQNVIGFEDMGVRIFPDGRDDKTKEPLSVSRRNARTSRVRHNRILERKEKVLNLLKENNMDNFILNPQRHKKDENNPYKLRADAVSKQIPLSELGRVLFNLSLRRGFKSNRKENKTDEGGKLKKATEELKEKLNNQTLGQFLWQRFQDNRINGEEKAGKTRFSEQFVGTKIKDDSLYPTREMYQDEFEKIWTEQSKYYSILTDELKQKFNNAIFHQRPLQAQERGFCMFEDGEHRIYKAHPLFQKFRVLQTVNQLKIISKDDPNLSDEQRNKLVETLLKTFDGVSSSKSLLGTLSFDKIKKKLELPSKSTKFNLEDSKREKIYADTTSFLMSKEDCFGSKWFDLSIEEQGEIVSKILDSSIEDDKIKTYLKKYNLSEKQIDNILVQPLEEKTGSLSEKAIKKILPYLEQGQLYSDACKSAGYNHSFFDDNIKMLSELPYYGDILKKSCVCDKNGIYKITNVSVHIALNQLRFIVNELIKKYGNPDSVAIEVARDLKEGTQGLNDIKKEQEKNTKDNEKFKDRLKSHGIEYPSREDILKLKLYDTLPMVNCNKVCIYTGNIISEDEAVKSPYIQIEHILPFSRTFDDSISNKTLSFAEANYYKGNRTPYEAFHESKDGYDWGGILERAKNLPTNVRWRFDKDAMEKFDKNGGPIARALNDTRYMTKMAILYLKHICNKPSDCYGLPGQMTALFRERWGLNWYKNKDQDEMYRASHIHHAIDAFTVACMTRGNLQHISENANKIESQYLNGKTLKEEGKILSNTSYKERQKALFKDISPFPNFKMEKFMEKCKNIIISYKPKLKNPKDTKSTIGALHEDTAYSLLDLKKGKDDKYTSTTAIFQVREFAKVKEKNNSGLQEKDFENINDKTLEMFYKDYLNGKFEEFLEYCKNNKIKKVKLKYEKDIQNMIPIFRSKQERDEYYKSYENWYVFQGRSPLSETKQEKEIRKQKEDDLLLDLQHKAKKAYKWFVGGNNFCAEIYQINPNDKIYTKDQGVWKTEIVSNYMATLYKGEPLWRKKYPTARRIMNLKINDMVIGEFRQDDINLPQGIKDLVIAKCIRQHSDTTSILFRVKKMSGSSIYLRPDFITTEKADEKSWKASVSSLQKYKARKVYVSPAGELKDPGFNDKWSKQNDTKHN

SEQ ID NO: 2785 - protein, 1034 aa, unidentified
  REGION 1..1034: note = Description of Unknown: Cas Enzyme sequence
MKRLGLDLGSNSIGWCLLELGPDGEPVAIFKTGVRIFSDGRHPKKLTSLKATRREARSTRRRRDRFIRRQKCLIGELVRSGLMPQDKSKREALAFRDPYPIRKRALDHQVHPHEMGRAIFHINQRRGFKSNRKTADNEAGVVKQSIAELESRLMQKKARTLGEFLADRHETKKTVRARRLGTKSADLYEFYPDRSMLEHEFETLWAKQAAFDPGLYNEDARQRIKDIVFFQRKLKPQEVGRCTFLPDEKRISKALPSFQRFRIYQELANLAWIDESGVVHPVTASLALRDRLFGELETKRKLTFKSMRAILRKEGIVDYPVQFNLESDLRDHLIGNLTSCIMRDPKKMMGEAWDRLDEAAQDQLILTLQDENLEDDEVRTRLVETYGLSDDVAEACLDARLPDGHGALSKEAIDRILPFLRDHGLIYYDAVKEAGFGEANLYDPHAALGDRLDYYGRALAGHVMGASGKPEDRDEQRYGTISNPTVHIALNQIRAVVNEVIRLYGKPDEVVLEIGRDLPLGADGKRDLEKFQREGLEKNQRAREELAKLGFADSRESRQKFQLWEQLAKDPTDRKCPFTGKMIALSDLFTDKVEIEHLLPFSVTLDDSMANKTLCFREANREKGNRSPFEAFGSSPDGYDWQEILERSKTLPGSKRWRFRSDAMERFEAEGGFMERQLNDTRYISRYTTEYMSTIIPKNKIWVVTGRLTALLRGFWGLNSILRGHNTDQDRQPKKSRDDHRHHAIDAIVVGMTSRGMLQKVSKAARRSEDLDMTHLFDDRIDPWEGFRDEVKKHIDGIVVSHRPRKKIQGALHNDTAYGIVEHVKEGASLVVHRVPITSLGKEGDIEEIRDSLIKSALLNETAGLSGKSFKEAVRKWCDAHGIKSLRILEKVSVIPIRNAKGEVYKGYKGDGNAYMEIYEEPQTGKWKSEIVSRFDAHQPGYIPAWRAAYPTACLVMRLRINDLIRFADDGVIYKLQKMSGGTLTMAPHTEANVNDRNKDKSDPFKYTLKSASSLQSAGARKIHISPTGLITEE

SEQ ID NO: 2786 - protein, 939 aa, unidentified
  REGION 1..939: note = Description of Unknown: Cas Enzyme sequence
KKLMIGNVGTNGEFLADRLKLKDENAITFRELLDNLKKLKDENAGTNGELLDNLKKLMDENTITIGELLADRIQEGHTVRARRLGPKAADLYELYPDRSMLEKEFDALWQAQAAFNPSQYSEDAKDEIKGIVFFQRKLKPQEVGRCSFLPDEYRIAKALPSFQRFRIYQELNNLAWIDRAGVAHNITKNLALRDRLFSELEKKKKLTFKAMRGILRKEGIVDYPVIFNLESDLRDHLIGNLTSCIMRDPKKMLGPYWDELEEDQQDEFIHLLLDETMDDEEVRKTLVEEHQLSNEVVEACLDARLPDGHGSLSKKAIDMILPVMRDQGLIYYDAVKEAGLGEANLYDPKAPLSDTLDYYGKVLSGHVIGGSGKPEESDEKRYGTISNPTVHIALNQIKAVVNELIRLYGKPDEIVLEIGRDLPMGADGKRELQKIQKEGLEKNQRAREEITRLGYIDSRESRQKFQLWEQLASDPTDRCCPFTGRMISLSDLFSDKIEIEHLLPFSATLDDSMANKTLCFREANREKGKRSPFEAFGHSPEGYDWEAILERVKNLPYSKRWRFRPDAMQKFEEEGGFLERQLNDTRYISRYTKEYLSTIVPQNKIWVVTGRLTSLLRGFWGLNSILAGHNTADDQPQKKSRDDHRHHAIDAVVVAMTSRGLLQAVSRSSRRSEELDLAHLFKDRIDPWEGFRDEVKEHIDGIIVSHRSRKKDQGALHNDTAYGLVEYKSDGASLVVHRVPVTSFSKTEDINKIRDPLIRSSLLDETAYLSGKDLEQAVQNWCEQSGIRSLRILETISVIPIRDRNGEAYKGYKGDSNAYMEIYADPQSGRWQSEIVSRFDAAQPRFITRWRKAHPAQKMLMRLRINDMMLFGDTGQIFRIQKMSGSNLTLAPHTEANVDARNRDEEDPFKFLHIAPSRLQERGAVKIHISPTGLISEGR

SEQ ID NO: 2787 - protein, 1332 aa, unidentified
  REGION 1..1332: note = Description of Unknown: Cas Enzyme sequence
SHYLPFDLSTIEEARNALGTSNIPEDWVVYYLRKKALSEKISLNELVRIIYMMNQRRGFKSSRKDQKREEDADDIKYPLFEKWIQLLFVEDIREISEERGLKLLEIKTAEITGQIKRRNIPNWKGTTIELEVSKKTLKSGEISYSFSAPDPNDWVNKKAALEESIKSSGYYVGEYLLHQLAKDKNYRIRQRIVDRYLYIEEFRAIWQKQSEFHPELNDVSKIPDISRVLYRHNLEKQKELNANDILYLLQNDIIYYQRPLKSQKHSIAHCKLEVKYDDQGTSYGIRVAPKSSPEFQEFRIWHTIHNLRILKQESEVNGKTQIDVDCSSQVLSNEAKGRLYQLFDSRAKVSTSSILRELKLSEKEYRLNYPSDKEFLGNETKSIFRKVFKEHGIKEAGEILLADSKKRAKLWHIIYSLDDTKNIQSTLRNPKHGFNLTESVIAHLSKIPDLPKQYAAFSSKAINKMLPLMRCGQYFDPENIAEPIKDRINKIINGEFDVNINDETRKKLAALTDIQFFQGLPTWLASYVIYGRHSEKETEGKYTVSTEMDILKLIPNNSLRNPIVEQIIKECLSLVKDIWERYGHPDEIHIELSRDLKKTAEERKKTDNQNKINEAERRRIRTILRELPYGNPDSLADIDRLKLWEETGNEIARVGAVKFSKEPTKSEIEKYKLWGEQNHISPYTGKVIPLSKLFTPEYEIEHIIPRSRYFDNSFVNKTICETYVNDFKGHRTARNLIETDGGRTVTHKGHTFTLLTPEAYYDHCKQTFRGPKHRNLMREDIPTDFIQRQLNDTRYITRKLAELLYPIAKEKEGIVFTIGQITNELKDKWGLNRVWKEILRPRFERLQEIIGEQLIDLDEKTNNIHFKKDYKRVDHRHHSLDALVIACTTREHIRYLNSLNATEESCKYRYLVKTRYSDFVLPWETFTKDARRQLNEIIVSHKNRNRLVNKAINKYTKWVQKPDGRCVKELIRQEKGQLLSVRKSMFKEPLGKILLREYREVSIKQAIAAQWEFLTSKNRNTAPQIADKQLRHNISELIKNSGFDLNETEKFLKKHPIKDIEGNIVAKIKILEFKEYAAKRVGLDTTFTKDKINKIPNFEHSWLAKLLLEHLQEFNDEPGEAFRGEALDLLTRRAGRPINKVTIYEEIGKKRNFAGKLVEADKGTNIFFAIYEHLQTKERIINEDSSIPMLDAIERLSNKWPVADDKQGYKTIILSPNDLVYVPEEGENVNIIDWINEKGRLQRRIYKMVSCSKNTCYFIPHFISGLLLAYESKTKKGEFGSLNKSEKSFDEIMIKNVCIKIKVDRLGNIIEANGKKIVQPALAEQRSYESVI

SEQ ID NO: 2788 - protein, 1445 aa, unidentified
  REGION 1..1445: note = Description of Unknown: Cas Enzyme sequence
MKKILGLDLGTNSIGWALVQLGQFGKEGSIVGMGSRIIPMDGDAMQKFQSGNPVSKNADRRMARTARRLKQRFKLRRSRLIEALKTLQWLPADFPSDFKSYAENNQDKPFSISHYLPFAPSTIGEAQKALGTSNIPEDWVVYYLRKKALSEKISLNELVRIIYMMNQRRGFKSSRKDQKREDDADDIKYPLFEKWIQLLFVEDIREISEERGLKLLEIKTAEITGQIKRRNIPNWKGTTIELEVTKKTLKSGEISYSFSAPDPNDWVNKKAALEESIKNSGYYVGEYLFHQLAKDKNYRIRQRIVDRSLYIEEFRAIWQKQSEFHPELNDVSKIPDVSRVLYRHNLEKQKELNANDILYLLQNDIIYYQRPLKSQKHSIAHCKLEVKYDDQGTSYGIRVAPKSSPEFQEFRIWHTIHNLRVLKQESEVNGKTQIDVDCSSLVLSNEAKGRLYQLFDSRAKVSTSSILRELKLSEKEYRLNYASEKEFLGNETKSIFRKIFKEHGIKEAGEILLADSKKRAKLWHIIYSLDDTKNIQSTLRNPKHGFNLPESVIAHLSKIPDLPKQYAAFSSKAINKMLPLMRCGQYFDPENIGEPIKDRINKIITGEFDVNINDETRKKLAALTDIQFLQGLPTWLASYVIYGRHSEKETEGKYTVSTEMDILKLIPNNSLRNPIVEQIIKECLSLVKDIWERYGHPDEIHIELSRDLKKTAEERKKTDDQNKINEAERRRIRTILRELPYGNPDSLADIDRLKLWEETGNEIARVGAVKFSKEPTKSEIEKYKLWGEQNHISPYTGKVIPLSKLFTPEYEIEHIIPRSRYFDNSFVNKTICETYVNDFKGHRTARNLIETDGGRTVTHKGHTFTLLTPEAYYDHCKQTFRGPKHRNLMREDIPTDFIQRQLNDTRYITRKLAELLYPIAKEKEGIVFTIGQITNELKDKWGLNRVWKEILRPRFERLQEITGEQLIDLDEKTNNIHFKKDYKRVDHRHHSLDALVIACTTREHIRYLNSLNATEESSKYRYLVKTRYSDFVLPWETFTKDARRQLNEIIVSHKNRNRLVNKAINKYTKWVQKPDGRCVKELVRQEKGKLLSVRKSMFKEPFGKIHLREYSDVSIKQAIALQREFLISKTRNIAPQVADKHLRHTINEIIKNSEFDLNEADKFLKKHSIKDIEGNTITKIKILEFKEYAAKRVALDSSFTEDKIKNKIPNVEHSWLAKLLLEHLQEFNNDPTEAFRGEAMDLLTRKAGRPINKVTTYEKIGKKSNFAGKLVEADKGTNIFFAIYEHLQTKERIINEDSSVPMLDAIERLSNKWPVADDKLGYRTIILSPNDLVYVPEEAENVSIIDWTKEKDRLQRRIYKMVSCSKNTCYFIPHFISGLLLPYDSKTQKGEFGSPNKSEKSLDEIMIKNVCIKIKVDRLGNIIEANGKKIVQPALTEQRSYESVI

SEQ ID NO: 2789 - protein, 1047 aa, unidentified
  REGION 1..1047: note = Description of Unknown: Cas Enzyme sequence
MQWRLGSDLGTNSFGTAVFSLENGDVDDLLHLGSRIFSDGRDPKSLASSNMDRRAARLASRGFERKRRRKQSLLNLLNQLGLVPADKTARSLQAQLDPYALRKKGLDHDLTATEFGRVLMNLNHRRGFKSSRLDAGDDEDFGLIATGIETLTKALVETKCRSLGEYLYQRKIDKQTVRARVVVNGKDKSYPIYPSRELIAKEFDLLWERQSKHLALTDAQRETVHQRIFYQRPLKPMIPGSCTFFPQEPRAAKAQPLAQRFEIVQKVNNLRYDNGQGQQSLFLEQRLQLIEALARKGEMSFTAVRTLLKLPRNCRINLESEVLKKLPGSPTAKRLSELGCFGEAWWDLSQIEQQSVVTELLSHKETDELSGWLTDHFGLTAEQARKTATVRLPQGHLRLSLLALEKIVPFMEQGEAVDKDGCVIPVTYDKAVERALDLNHSILTDNSRFDRLPYYGKVLERFCVGGIGGDSEYEKDAEKRYGRIPNPTVHVALNQVRTTVNELIDRFGGPPSQVVLEMARDLPLGAQAKRDLLKEQSQNKKANDSRDEQIRAAGLIPSAVLRLKLRLWEELDARDPLGRCCIYTGRHISLAQALLAETEIDHILPYRLTLDDSAANKVLVFREANRSKARRTPYQAFGPGTNEAGIQSWEDIKAHADRLGRKSWRFSADAMVVFEKNRDFLDRQLVDTQYISRLARDYLACLFDGEPNARPVWVIPGRLTSMIRGKLGLNHLLAENGAKNRDDHRHHAVDAFVAGVTSRSFLQRIATAAARTDEARIEKLLTEMPVPYAKFDVAKVQAMVDGIIVSHKVDHGRNGQLHEETAYGIVDPKTHDGFNLVRRKPLISLSDKEIDRVLDPSIRQRLRDAVPSGLDKKNFADALLRFSQTSGISRVKVLVKEANPVTIKDRDGKAYKAVIAGDIQRIDVWQVPGEDAPRFIGVTRFDANRKDLPPDFPRPHRNARKIMSIFKGDSLAFEENGQRRLMKVVRIRPSARDFMLSQHNAAGKSDQTGEFYGFSRLVKLGFRKVHVSPTGVVKDGGPQLSASPATA

SEQ ID NO: 2790 - protein, 1037 aa, unidentified
  REGION 1..1037: note = Description of Unknown: Cas Enzyme sequence
MLGAYFVRKRRKKGLSSKVHFVFLVLSLRLKRWLRFVLRIILGTKERQTQGKSNNALHQVCYTAEDIWHFCYDAEDSGKVRTFAEETLGWDEKKAAELVRLWSAIPQGYAMLSQKAIRNINRMLLFGLKYSDAVLLAKLPDILELSDEDIQTIIKKAQQLEEVVNEEKRIGNIVNSLIANYKAESLEDRFADHNYEYQLDESDEREIIKHIENNIGKQRWELMDADEQISILEGVRSGYQAFFARHKRTFVELPQLGKRLVELLSKEYPSVTEKQWERLYHPSQIAIYRPILLDKSDEKRRLGNPDIGAIKNPTVMRTLNNLRRRVNQLLDDGVLMPDETRVVVETARDLNNANEKWALEKYQEIRRKENDKIKKILEEFYPQFSNITSTDVDKARYVIEQCEEDNYTSKKESGTYSKNIQKYKYWLEQGGQCLYTGRIISLSNLFDSNAFDLEHTIPASVSFDNSDQNMTLCEAHYNRFIKKNNIPTAMPNYEEDVTIDGKLYTAIKPRLEKWKKRIKRLSKNVEYWRTQARRTQMKDHKDECTKEKLLWQMELQYWRDKLQRFTILEVTDGFKNSQLVDTRIITRHAILYLKSVFKKVEVQRGSTTAEFRKILGVQSVEEKKDRTLHSHHAIDATILTTIPTAGKRERILELFYKVQEKERRLKNCSGDAYEGLKQDLEGLQAKLKKEVVDCKLGGEISQLGNFINDKIIINHCVKDQTLTPSHKRLRRRGRIVGGKEHPIWQTGDTLRGEIHAESYYGAITQYAKDKDGNVLFNNGKPKIDPTLWYVIRRKPTYFNDWKPLEKDIVDKNLFKLMKEQFPDGTSFEDACKQGFYMIKKGKDKKHNIKTHRIRHVRCYAVKTALKIKEQIYKSTKDYKQYFYAAVGDLYTMCCYTNGKNKEYRIYSLYDIAQHRKSGIEDIPEFITDEKGNRLELSYKLRKGDMVLLYEKTPEELYDMDPVNLKRRLYKVNSFENDGLRIIMTNHMVTNKEKGESIKAYSQIPQTVRCAVNTLKFLIMGDHNDFIIKSNNIIFNHR

SEQ ID NO: 2791 - protein, 1189 aa, unidentified
  REGION 1..1189: note = Description of Unknown: Cas Enzyme sequence
MLGAYFVRKWREKGLFSKVHFVFLVLSLRLKRGVRFVLRIILISEKQGIGTIFYKRPLCSQRGNVGKCTLEPNKPRCPIGHPLFEKFRAWTFINNIKAKSPDADSAEPLPMDMRINIYNKLFLSRVKADFKFEEIRHFIEKQWGVALSKDDKTINYRDDTSVAGCPITARMIKVLGEDWENFQVIGTKERQTQGKSNNALHQVCYTAEDIWHLCYDAEDPEQVRTFAEETLGWDEKKAAELVRLWSAIPQGYAMLSQKAIRNINRMLLFGLKYSDAVLLAKLPDILELSDEDIQTIIKKAQQLEEVVNEEKRIGNIVNSLIANYKAESLEHRFADHNYEYQLDESDEREIIKHIESNIGKQRWELMDADEQISILEGVRSGYQAFFARHKRTFVELPQLGERLVELLSKEYPSVEKREWERLYHPSQIAIYRPILLDKSDEKRRLGNPDIGAIKNPTVMRTLNNLRSRVNQLLDDGVLVPSETRVVVETARELNDANAKWALEKYQKTRRDENAQIKKILEEFYSKPNGITDTDVDKARYVIEQCEEDNYKSKKDIGTYSKDIQKYKYWLEQGGQCLYTGRIISLSNLFDSNAFDLEHTIPASVSFDNSDQNMTLCEAHYNRFIKKNNIPTAMPNYEKDVTIDGKLYTAIKPRLEKWKKRIERLSRNVEYWKVQARRAQMKDRKDECTKEKLLWQMELQYWRDKLQRFTILEVTDGFKNSQLVDTRIITRHATLYLKSVFENVEVQRGSTTAEFRKILGVQSVEEKKDRTLHSHHAIDATILTTIPTAAKRERILELFYKVQEKERRLKNCSGDAYEGLKQELEGLQAKLKKEVGDCKLGGEISQLGNFINDKIIINHCVKDQTLTPSHKRLRRRGRVVGGKEHPIWQTGDTLRGKIHKESYYGAITQYAKDEDGNVLFNDGKPKIDPTIWYVIRRELKHKKSAQDTGFASWDDLEKVIVDKNLFKLMKEQFPEGTSFKDACEQGIYMIKKGKDQEHNIKTHRIRHIRCHTSVRSALKIKEQTNKSAKDYKQYFYAESGDLYTMCCYTNGKKKEYRPYRLYDIAQHRKSGIEDIPEFITDKKGNRLELAYKLCSGDMILLYENTPEELYDMDPANLKQRLYKVDRFESESSRIYLTNHLIANGEVGHSIKDYNQMPPTVRCGVNTLKFLIMGDHNDFIIKSNNIIFNHR

SEQ ID NO: 2792 - protein, 1441 aa, unidentified
  REGION 1..1441: note = Description of Unknown: Cas Enzyme sequence
MTQKILGIDLGTNSIGTSVRNTDLGNNLVDQLEFFSSDIFNASVNGEGVNGGKGGREYSLASSRSAKRRKRRLYEHRRYKLWATLDLLIKNNLCPMTPESLEQWRTYDKKKKLFRQYPIDDKAFHSWIILDFNGDGKPDYSSPYQLRRELVSVQLDFNQAIDRYKLGRALYHIAQHRGFKSSKGETIAEQEKQEDDSKKDKKKALAEEHVDAIKASEEKHSKGLSTYMQEHNLKTVGVAFAQLEDEGIRIRKNSEYKAIRSQHQDEIKEIFKFQKGLSEQTQLLDTLISEKQGIGTIFYKRPLRSQRGNVGKCTLEPHKPRCPIGHPLFEKFRAWTFINNIKAKSPDSDSAEPLPMDLKINIYNKLFLSRVKEDFKFEEIRYFIEKQWGVALSKDDKTINYRDDTSVAGCPITARMIKVLGENWENFQVLGTKERQTQGKSNNALHQVCYTAEDIWHLCYDAEDSGKVRTFAEEILGWDEKKASELVRLWSAIPQGYAMLSQKAIRNINRMLLFGLKYSDAVLLAKLPDILELSDEDIQTIIKKVQQLEEVVNEEKRIGNIVNSLIANYKAESLEHRFADHNYEYQLDESDEREIIKHIESNIGKQRWELMDADEQISILEGVRSGYQAFFARHKRTFVELPQLGKRLVELLSKVYPSVEKKQWERLYHPSQIAIYRPILLDNSDENKRLGNPNIGAIKNPTVMRTLNNLRRRVNQLLDDGVLVPDETRVVVETARDLNNANAKWALEQYQEIRRKENKKIKDILEEFYPQFSNITSTDVDRARYVIEQYEEDNYKLEKEIGTYSKNINKYKCWLEQGGQCLYTGRIISLSNLFDSNAFDLEHTIPASVSFDNSDQNMTLCEAHYNRFIKKNNIPTAMPNYEKDVTIDGKLYTAIKPRLEKWKKRIKRLSRNVEYWKVQARRAQMKDDKDKYTKEKLLWQMELQYWKDKLQRFTILEVTDGFKNSQLVDTRIITRHATLYLKSVFKNVEVQRGSTTAEFRKILGLQSVEEKKDRTLHSHHAIDATVLTTIPAAAKRDRILELFYKVQEKERILKNYSGDAPIGLKQDLEGLQEKLKKEVEACKLGNKLGQLGSFINENIIISHNVKDQTLTPSRKRLRRRGRVVYNKKRENDNDKNPIWQTGDTLRGEIHKESYYAAITQYAKDKDGNVLFNDGKPKIDPTIWYVIRRELKHKKSAQDTGFASWDDLEKVIVDKNLFKLMKEQFPEGTSFKDACEQGIYMIKKGKDQEYNIKTHRIRHIRCHTSVRSALKIKEQLNKSTKDYKQYFYAESGDLYTICCYTNGKKKEYRPYRLYDIAQHRKAGIEDIPEFITDEKGNRLELAYKLCSGDMILLYENTPEELYDMDPVNLKQRLFKVDRFESKSFRIYLTNHLIANGEVGHSVKDYSQMPPTVRCGVNTLKFLIMGEHKDFVIKSNNIIFNHR

SEQ ID NO: 2793 - protein, 1277 aa, unidentified
  REGION 1..1277: note = Description of Unknown: Cas Enzyme sequence
PVIIFVDDKNSGGHFMTTRYCIVFPMMDDGSAYPELALLGMGSRIINLSPDEKSSFANGKGETVCSQRTSMRTARKCLDRYQMRRNFLQTELKKLGMFDSEKTLLELDPLATWQLRANAATPGHKLTLKEIGRVLLHINQKRGYRHAKDDSNDASQRDYVANINQRYSNLKEKGVTVGQYFASELKKSELSTSKGGHCYTYRIKENVLPRQAYKEEVEQILNVQSKFYPEVLSANVVKKLIDTIFFQRQLKSCKHLVSICEFETRQFLDHNGKQVNVGPKVAPRTSPLAQLTRIYEAVNNIVLVNYANKQSKTNKQSSLFDEFEIKSKDARLMLFEYELNQEERLRVVDYLLKGEKLTETALLKILGLKKADGFRWEGAPKNGMPGDTTYSKLKEAVANVPDAEETLLRFNVETGYGELKDVRTGEILPQIKMTEGCNGGNPEPMYLKEPLYKLWHTVYSSSTREELSKAMEKVFGITEEKVIDNLYTIDFVKPGYSNRSSKFMRKILPLLMNGMKYSEACSAIGVNHSNSITKEENGVRELVDCLPNLQKGVLRQPVIEKILNQMINVVNSIKEQFGEIDEIRVELARELKQSKDQRAKATIDIASRERENTKISKILEENGIRSSRRNIQKYRLWEETGKRCIYCGRVLSLNEYFDSGEGEIEHIIPRSLFFDDSISNKACSCRNCNKAKSQMTAYDYMISKGELEFNQYLSRVDQLYKDKKISKTKLSRFTTAKEEIPTDFLDRDMRQTQYISKKAIEILRTTCRNVYASSGAVTDFLRHAWGYDMILHNLNIRRYEKADLVKEVEIKHGDHKYKEFRIKGWSKRLDHRHHAIDALVIALTRQGYIQRLNNLNSERDLMTMELEHSRDEYDRKFHLLEQWSKERPHFPVDQVADAVDKIAVSIKSGKKLATPGKRYIRRNGQRIKVQEGLVIPRGSLHQDTVYGQIKVVKHNVNVKESFASPEKIVNHRIKAAVEDRIRLFNNDIEKAKKSLTKSPLKIILKGKEIEINTVDVYEELYATRKSIDSLTKPAIEKIIDPVVKHVVKRRLAEYGGDEKKFKQSLEEKPITIGQLNRPVKSVRLWSNDKMIAVRKDASGKGIGFAMPGNNHHVAFYEYEGKVLSLTLQFANAIKRIKLGIPSIVKAPDEAWQVLENLPDTNDIREVAQNLPPYGSRFIRSLKMGDMFILGLSEEDAYDAFENQDMKVLSSHLYRVQKVSLNDYNFRLHTWTSVDAKNVVADTNMGAYLRIGSYGTLMKQNPIPVNVNNLGQIIRKDD

SEQ ID NO: 2794 - protein, 1457 aa, unidentified
  REGION 1..1457: note = Description of Unknown: Cas Enzyme sequence
VLNKAVGLKLIQPFCHNKKRSGEMGMPHVYTCSVGLDLGAKNTGVFVVARGENEPIDAKHCKALTIMSTENFTYDMRHRTAVRHRIRSGKRSKLARRLIRLALKQQLDKAKIVVTPKAFENILEAVFSLMKRRGYSRIESEVDLSVLDSLKPKVFAAYQGLSDYFSVDGFLLAIWDGIKQDVDVLMEAQKVLPTQEDFEVYLREQWFGESDEDAVKKYKKGLSAMAEDAKAVLSFSTTGHLPRAKYLEAVKDDIRRDSRLTSAVQAFGGAERFWSFIGNIVNLQLRALRWYFNNPEFEKGDLWDEKDLKKSIVRGFKYLHPATDKKQQYADLIRTLENATDIVDCLCTLDPIRTIPPYEDQNNRRPPEDQTLLLNPYSLNRRFPGKWLPWVGKFVRQNPDIGEGLEDIVKQIDRTSRRAVNGVVPLKEMYYLAAYTLQRILDRTKELDEYGLRHLVKVLERGRKLTDGRLSQRTRKSVALLTSVVGSQNVEDFVRFASDYYKEVETAKCGMWFEQGDSLLECSGLHPPAKKKILSTLVANILQVSKETAERFIEQIWNKDLEGKPAAWYCEKIEETRKEKGNGFQRSYSCTLAELALKPMKTKRNKEGNLVFSKDPFIRVKQRVDLVADFIGSELDLNEGHVEKFRNPFSLAQLYTLIETERNGFSKTCLAVHAENAWRMNITEINSERYAQCSRLPADSVRPFDGVVRRVLDRHAWELTKVLRDEIQSKVDFRGGEIRVPFLVERNSFEFSISVNELKKRDAKKFERAKDASEKAEDKQWADKDSRIKQASQGICPYTGAVLGDDGEIDHIISRSESLKAFKTVFNSEANLIYATKIGNQTKGGQRYTLANLNSDYLKKIFGTDNRNEVQNKIETEVKALIEDGKLKYFDLLTPWQQTCVRHALFLTPNPDADVNIQECIVDALNNKIKTIVNGTQAWFVRQVMTKLQCELAGWLSERGNSLKFKAWACDTGSIRKLRLAIAKEFPQFLKTDFQSAASHTMDAMCAYACLSDVELARDFMCGDASLASIKFAAKVKALHPETCQIIRVERKAADEKKDFASCAIFKEGILGENFLPLIAKDGNVYIGFDGNRLKSKEAEADVANRVQVTLKKGRNPELLLRALEPFFNKPVEADLQKKTTYLIEKRKALEFLYDKEAKPNAEREALKQVLFGLLYYTVRKDVIGSLSPAKGKEFAKEGDLLAAGNFEITVKFKFLDTNISGKIELPAKRDWQKLLNAPEIKARLGQPKDDYDFLPYIAALRGVRRSSSLEHKRCRRVFSLPVLAAASGMVHIRRTSILGKSVGQAYSTNTIYAGFQKTNGLVDWNKPVPLGIFDRKNLGLEAEFADDPNNVVPMSHWKQVLDGDIKIWICPGTKLRRYVRVNLPWKDFAEWIDADALGYRVPTDLPGDVAVKGFTDKVPPDILSMIGMPRSSIAVEFAGERIQFCFEDGTKKKPKL

SEQ ID NO: 2795 - protein, 1412 aa, unidentified
  REGION 1..1412: note = Description of Unknown: Cas Enzyme sequence
MKKILGLDLGTTSIGWAVINEAENEHEQASIVRTGVRVIPLTVDEQTDFEKGRPLSTNADRTLKRGMRRNLNRYQDRRAHLLLLLKQHGLITEDTLLTETGSNSTHSLWALRADAANNPIPLEAFARVLLAINKKRGYKSNRKAKDEDEGQAIDGMTIAKELYDNDLTCGQYGLNRLKAGKRHIPDFYRSDLKAELERIWKKQREFHGELLPHVLLEKIGGKNQKATWAILKEPWGLVGEKRTTSGFDRKVEDYQWRADAISRKLTLEELAVVIQQVNGAISTSSGLLGAISDRSKQLIIQDLTVGQFLYKQIQADPHTRLKGQVFYRQDYLDEFERIWEVQKEAHPQLTPELKHDVRDTVIFYQRRLKSQKGQLAVCEFEGVKKPVIDENGQPAMTKDGKPKMRKVGPRVCPKASPLFQEFRIWQVLNNVELTYEGKDGTGDERSENGIVRKGKAWCLGQEYKAKLFAELSWTKELTAADALKAIGLKPKEWKVNFKKLEGNRTNQKYMEAFGAMLAVTGHDDVNLEELPAEERASTVEAVLNTLGVDTGILHFDATLAGKEFEQQPAYALWHLLYSYESDNKSRTGNERLIKQLRDKFGFNRECAEILCKVHFEDDHGSLSARAIKKILPHLKQGEIYDVACELAGYNHSHSVTADENETRELIDALEILPKGALRNPVVEKILNQMVHVVNKVIAVYGRPDEIRVEMARELKKSAKEREEMTKSIDAANRAHDAIRGEIAKLHPFNTGVRITRNDIIKYKLYQELSVNSYRTLYSDVEIIKEKLFSKEYDIEHIIPQARLFDDSFSNKTIELRSVNLKKGNATAMDFMETEYGPDSEQVAEYKARAEKFFKKESPGKFKKLLMKEADIPDGFIDRDLRNTQYITRMALGLLRQVARTVTPTTGSVTDRLRQDWQLINVLQELNWDKYEKAGLTYTEKDKDGGDVRKIKDWTKRNDHRHHAMDALAVAFTRPSHIQYLNYLNARRDEDHEKHKRILAIENKETYFDSKNRRQFKPPMPLDQLRAQVKQHLESTLVSFKAKNKVATRNVNKSKTKNGHFRKVELTPRGQLHKETVYGKKRFYTITEVKVGPSFGADMIAQVAKASHRQALLLRLHAVGGGDPKKAFGGKNALAKNPVWLDDQHKEQVPEKVKLVQMEEQFTIRKDITPDLKLDKVIDGRAKRLLQERLHRFGGDAKKAFSNLEEDPIWVNGKNGAQLKRVTITGVSNAEALHVKRDHHGKPILDADGREVPTNYVQTGNNHHVAIYRDAEGNLQEQVVSFFEAVTRRLHGLPVIDRSLNADQGWTFLFTMKQNEMFVFPNKEKGFDPSTMELMDPKNALTIAPHLYRVQKISTKYYVFNHHLVTQAVDGDMLKKKALNGVTYQFKWTPDSLDGAVKVRMDHLGRIVHVGEY

SEQ ID NO: 2796 - protein, 1413 aa, unidentified
  REGION 1..1413: note = Description of Unknown: Cas Enzyme sequence
MKRILGLDLGTTSIGWAVINEAETDSEQASIVGTGVRVVPLTVDEQTDFEKGRPLSTNADRTLKRGMRRNLDRYQDRRSHLLHLLKEHGLITEETALTETGSNSTHSLWALRADAANNPIPLEAFARVLLAINKKRGYKSNRKAKDEDDGQAIDGMTIAKELYDNDLTCGQYGLKRLQDGKRHIPDFYRSDLKAELERIWNKQREFHGELLSHELLEKIAGKNQKATWAILKEPWGLVGVKRNTKGFEQKVEDYQWRVDALSRKMELEELAVAIQQVNGAISSSSGLLGAISDRSKQLLIQDLTVGQFLYKQLQQDPHTRLKGQVFYRQDYLDEFERIWEVQKEAHPQLTPELKHDVRDTVIFYQRRLKSQKGQLAVCEFEGKKQPVIDENGQAALTKNGKPKMRKVGPRVCPKSSPLFQEFRIWQVLNNVELTYEGKDGTGDDRSENGIVRKAKAWCLGPEYKARLVAELNWTKELSATDALKTIGLKPKEWKVNFKKLEGNRTNEEYLKAFGQMLAVTGHDDVDLEELTSEQRAKTVETILAALGVDTEILHFDATLTGKAFEQQPAYLLWHLLYSYESDNKSRTGNERLIKQLRDKFGFNRECAEILCKVHFEDDHGSLSARAIKKILPHLKDGEIYDVACSLAGYNHSHSVNAEENEARELIDALEILPKGGLRNPVVEKILNQMVHVVNKVIEVHGRPDEIRVEMARELKKSAKEREEMTKSIDAANRAHEAIRSEIAKLHPFNTGVRITRNDIIKYKLWEELKENGFKTLYSGTEIPKEKLFSKDYDIEHIIPQARLFDDGFSNKTIELRSVNLEKGNATAMDYMETKYGPDSEQVAQYKARAEKFFKKDSPGKFKKLLMKEADIPDGFIDRDLRNTQYITRTALGMLRQVTRTVTPTTGSVTDRLREDWQLINVLQELNWDKYEKVGLTYTEKNKDGDVVRKIKDWTKRNDHRHHAMDALAVAFTRPSHIQYLNHLNARRDEEHKKHKVILAIENKETYVDSKNRRLFKPPMPLDQLRGQVKQHLESTLVSFKAKNKVTTRNVNKSKTKNGHFRKVELTPRGQLHKETVYGKKKFYVTTEVKVGPSFDQATIARVAIKSHRQALLNRLHAVGGGDPKKAFGGKNALAKNPIWIDEQHKEQVPEKVKLVQFEDQFTIRKDITPDLKLDKVIDGRAKRLLQERLHRFGGDAKKAFSNLEDDPIWLNGRNGAQLKRVTITGVSNAEALHTKRDHHGRPILDADGKEIPTNYVQTGNNHHVAIYRDAEGNLQERVVSFFEAVTRRLHGLPVIDRKLNADQGWTFLFTMKQNEMFVFPNKEKGFDPASVDLTDPANAAAVAPHLFRMQRISTKNYLFNHHFETEAVDGDVLKKKKELSTVTYRFIQSTPPLEGIVKVRTDYLGRIVHVGEY

SEQ ID NO: 2797 - protein, 1453 aa, unidentified
  REGION 1..1453: note = Description of Unknown: Cas Enzyme sequence
MKMILGLDLGTASIGWAVVNEAEQEDERSELVRTGVRVIHYGDNLKKRNPKTGKISDVTDVEEAFNSGQGISPNMGRTQKRGMRRNLDRYQDRRSHLLYLLKEHGLINEATELAETGKGTTHTLWGLRADAATKPIALEAFARVLLAINKKRGYKSNRKAKDEDEGQAIDGMSIAKELYDNDLTCGQYGLQRLMAGKRHVPDFYRSDLKAELQRIWNKQREYHGELLSHELLEKIAGKNQKATWAILKEPWGLVGEKRTTKGQDKKVEDYQWRVDALSKKMTLEQLAVVIQQVNGGISTSSGLLGAISDRSKQLMLQDLTVGQFLYKQIQDDRHTPLKGQVFYRQDYLDEFERIWEVQKEAHPQLTPDFKRDVRDTVIFYQRRLKSQKGQLAVCEFEGKKQPVIDENGKPAMTKDGKLKMRRVGPRVCPKASPLFQEFRIWQVLNNIELTYQGKDGTGAERSENGIQRKGKAWCLGAEYKARLFAELSWTLELSAADALKAIGLEPKEWKVNFKKLEGNRTNHKYLEAYGAMLSASGHDEVDLNELSAEERAQTVEEILGALGVRTEILHFDATLAGKAFEQQPAYALWHLLYSYESDNKSRTGNERLIKQLTSKFGFNRECAEILCKVHFEDDHGSLSARAIKRILPHLKEGQIYDVACDLAGYNHSHSVTAEENEARELIAALGILPKNSLRNPVVEKILNQMVHVVNKVIEVYGRPDEIRVEMARELKKSAKEREEMTKSIEDATKAHGAIRKEIAQYHPFNTGVRITRNDIVKYKLYQELKDNGFKTLYSQTPVVPEKLFGKEFDIEHIIPRSRLFDDSFSNKTLELASVNRDKDKATAMDYMEDKYGPESEQVIQYKARVERFFKKTSPAKFKKLMMKGSEIPDSFIDRDLRNTQYITRTALGMLRQVARTVTPTTGSVTDRLRQDWQLINVLQELNWSKYEKAGLTYTEKNKDGDVVRMIKDWTKRNDHRHHAMDAIAVAFTRPSHIQYLNHLNARRDENHKKHMVIQAIENKETEVDSKGRRYFKPPIPLDELRELVRKQLESTLVSFKAKNKVTTRNVNKSKTKNGHHRKVELTPRGQLHKESVYGKQQFYATKEVKVGPSLDQSTIALVAKKSHRQALLLRLYAFGCDPKKAFGGKNALDKNPIWLDEHHKEQVPEKVKLVQMGSQYTIRKPLTPDLFKDSKGNDDFLARVVDVHDGAVVNALKAHYERTRIEVEAFNLTVTNTKEKRKVLETAFSNLEGNPVWLNKAKGIRVNRVTVSGVTNAEPLHIKRDHHGNALLNAEGKEIPSSYVQTGSNHHVAIYRDAQGNLQEQPVSFYEAVARRLQDPPLPIVDRAYGADKGWTFLFTMKQNEMFVFPNKEVGFDPATVNLLDPKNAVFIMPHLYRVQKIASKNYTFRHHLETDVENRKGLNGVSYQSQLGLNAIGGIQKVRLDHLGRVVHVGEY

SEQ ID NO: 2798 - protein, 1427 aa, unidentified
  REGION 1..1427: note = Description of Unknown: Cas Enzyme sequence
MMRLEDEKGPSLRALGKSNCHLRGARRHFWQSRILTRSVVLTGNQDVLTVAQIGDKMKLRNIEGDYNIGLDLGTGSVGWAATGIDGELLTQNDKPAWGSRVFPSGETAADTRLKRGQRRRYERRRWRLDLLQRFFEDDMAVVDPAFFIRLKQARLLREDRDESCRDYHSPLFISGDAERDYYKRFPTIYHLRAWLMTTEKKADLREVYLALHNIVKHRGNFLHQDNPNLSATAANMEESVERLCLELEDRCAALDIPCACDAASIRQVFEDPSLARAGKSESVSKLFGFDKDSQKTMGKGISRAIVGYKVDFATVLGCEFEDSAFSLSDDEKVDGALAAIPDDAMGLFDAIRAAYSSYVLLGILSSGDDSPITSGALSSASGRTVSFCKVREYETYKADLALLKSLVRTYVPEQYEGFFRGELIAGTSHYDPAKAKGYTRYDLTHKVAYADFFKEVKSLLDKTDAVTDERYKDMLGRFEEERFLRRLKTSDNGSIPYQLHLEEMDAILKNQGKHYPFLLENLDKIESLVSFRIPYYVGPLTQKNAALDHNGQARFAWATRKPGKGDEPVYPWNWEEVIDKGHAAHAFIQRMTSDCSYLIGEGVLPRNSLMYEEFCVLNELNGARYSVDGDDWRRFDYADRMGIMDDLFRQRRSVTYKMVEDWMRANRGWARVHVRGGQGENKFESSLLAYRFFCKDVFKTDELSPSLIPMVETIILWSTLFEDRSILKEQLIRNFSDRLSPEQIKIICKKRLTGWGNLSERFLAEIKVETDCGPRSIMDILREGSPVGGEQGRTMVLMEVLHDERLGFEVKIEEINAERIADAGRLEVGDLPGSPALRRTVNQAVRVVEEIVRIAGKPPVNIFIENTRDEDLSRKGKRTKRRYDAIKEAVNAFKKENADLAQELKDFKPADFDDERLALYFMQGGKSLYSKAPLDVTRLSEYEIDHIIPQSYIKDDSFENKALVLKSENQTKTNQLLLPQGVRVKMASYWQELHRCGLMGDKKLRNLMCSDISERRIKGFIARQLVETSQIVKLVKIVLENRLPESRLVPIKASLSHELREAKHYYKCREINDFHHAHDALLAAEIGRFLLLRHAGMYDNPIGYAHVVKDFVRVQADEAKRTGRLPGSAGFIVSSFLHSGFDKDTGEIFKDTWDAEFECERIRKYLNYRQVYLSRMPEETSGAFWDATIYSPRGKMKLSLPLKEGLDPSKYGGYSSEKYAYFFCYYAKDKKGKRIIDFAPVPVSRAAGGQVDIEAFGREVAEERGYAFESIARAKIAVKQLIEVDGCRLFITGADEVRSAVPLAYSQDDTHLMTRLFAGSDTDCDRLFCQMMAGIERFDKRLYDNLKLKSRASAFPALGDENKKLVLKGLTALSSASSNKEDMRPIGGAKTAGQLKIVFRNVLSNQGITFIDQSVTGMFERKTYIGL

SEQ ID NO: 2799 - protein, 1374 aa, unidentified
  REGION 1..1374: note = Description of Unknown: Cas Enzyme sequence
MKLRNIQGDYNIGLDLGTGSVGWAVTGVDGELLTQNGRPTLGSRVFPSGETAADARLKRGQRRRYERRRWRLDLLQRFFENDMADVDRTFFIRLKQARLLREDRDESCRDYHSPLFLTVDAERDYYKRFPTIYHLRVWLMTTEKKADLREIYLALHNIVKHRGNFLHQDNPSLSASAANMEDSVEQLCLALEDRCITLDIPCSCDAASIQRVLEDSSLSRAEKSESVGKLFGLDKDAQKTMGRGISRAIVGYKVDFAAVLGCEFEDSSFTLSDDEKVDAALAAIPDVAMSLFDAIREVYSAYVLLGILSSGNGAPISSGSLSSVSGRTISFCKVREYEVYRADLALLKSLVRTYAPSQYDAFFRGELIPGTCNYDPTKAKGYTRYDLVHKVAYADFFKEVKSLLDKTDAVTDERYKDMLGRFEEERFLRRLKTSDNGSIPYQLHLEEMDAILKNQGKYYPFLLENLDKIESLVSFRIPYYLGPLTQKNAALDHHGNPRFAWATRKPGMEDEPVYPWNWEEVIDKGHAAHTFIQRMTSDCTYLIGEGVLPRNSLLYEEFCVLNELNGARYSVDGDDWRRFDYADRMGIMDDLFRQRRSVTYKMVEDWMRANRGWARVHVRGGQGECKFESSLSAYRFFCKDVFKTDELSPSIIPMVETIILWSTLFEDRSILKEQLVRNFSDRLSSEQIKIICKKRLTGWGNLSEKFLAEVEAETDCGPRSIMDILREGSPVGGEQGRTMVLMEVLHDERLGFEDKIEEINAERIADAGRLEVVDLPGSPALRRTVNQAVRVVEEIVHIAGKPPVNIFIENTRDEDASKKGKRTKRRYDTIKEAVNAFKRENADLARELKEFKPADFDDERLALYFIQGGKSLYSKAPLDVTRLSEYEVDHIIPQSYIKDDSFENKALVLKSENQTKTNRLLLPQGVRVKMASYWQELHRCGLIGDKKLRNLMCSDVSERRVKGFIARQLVETSQIVKLTKMMLENRLPESRLVPIKASLSHELREAKHYYKCREINDFHHAHDALLAAEIGRFLLLRHAGMYDNPIGYAHVVKDFVRVQADEAKRTGRLPGSAGFIVSSFLHSGFDKDTGEIFKDTWDAEFECERIRKYLNYRQVYLSRMPEETSGAFWDATIYSPRGKMKLSLPLKEGLDPSKYGGYSSEKYAYFFCYYAKDKKGKRLIDFAPVPVSRAAGGQVDIEAFGREVAEERGYAFESIARAKIAIKQLIEVDGCRLFITGADQVRSAVPLAFGQEETHLVERLLSGAPVGPRVRDSLFNQMMVGIRRFDRRLYDNLKLDDRSAAFERLGEEDKDLILKGLLALSSASNNMADMRPIGGAKTAGQLKIVFRNVLSNQGITFIDQSVTGMFERKTYIGL

SEQ ID NO: 2800 - protein, 1186 aa, unidentified
  REGION 1..1186: note = Description of Unknown: Cas Enzyme sequence
MRQILGLDLGVGSIGWSLITVNDNETLGSIKDMGCRIVMTNKEATDFTQGKGVTACSVRTAKRSARRSLDRFQQRRNLLSSLLRQTEMMPDDHLLSQLSPLELWKLRSDAATAPLSLPEIGRVLLHINSRRGYRRLRGEQADEPNSKKASEYLQAIKDRYAELRLNNETIGEHFYKMIAKNVVTNPTTGTQFYNYRIRNKTFPRNAYLEEFNKVMECQKQFHPETLTDVFIEQLRHAIFYQRPLKSCKHLVSLCEFEKRSIIGANGKEYFTGPKVAPRTSPIAQMCKIWESINNITLTNNRNRIKRNKVRTPSLFGDDWRDEYEYPISKEQYRELYAFMSTHEKMKAADVLKILGLKKSDGFATPAQLRAGLQGNTTYTRLYKALEDYPDAEKLLIFNPTLEDSELVNSDTGEVLMQLSEDSIKEQPLYKLWHLIYSIKDDDELKNALRKQFNIYDEEVLDRLAMIDFVNDGYTNKSNKFMRKLIPQLISGLHYSDAVDYINICRGIDRNEKPQQLDKLELLKKNEMRQPIVEKVLNQMINVINSIVATYGKPDEIRVELARELKMSKDNRVAIQNVINSREKEAASIIEKIQAYGIRATKSRIQKYRMWQESGERCIYCGKVIGLTEFLNGIEAEREHILPQAVFFDDSFSNKVCSCRECNHKKGKLTAYDFMKSQGDDVLENYISRVDDLYRDKTISKTKHDRLLTAGDQIPTDFLNRDLSLTQYITKKATDILSRITPKVTTTTGSVTDFLRHQWGYDMILHNLNFERFDKCGQTEEIVIDNHGEKHTEKRIKGWGKRCDHRHHAIDALVVALTRQSHIQRLNNLNAERDEMSKEVTTLNRQWNAKKSLLEKWIAIQPHFDVDVASAAVDRIAISIKPGQRLSTTSKRYVQRGGKRKLVQKGIITPRGALWEETVYGKIRAVDGSEAIVVRYPVESLKCKDLYSVVDDNIRALLQQRAKQCDNDDKTFKQSFAKEPLYTDAAQSCQLRTVRCFTGLDASKLAVVAKSANNNIGFAKAGNNHHIALYTDTKGAIHEIVVPFWLAVERKKYGVSSIIVNPQEELDKIHQSDKDIPEAILNTLPNAEWQMMLTLQQNEMFIIGMSDEEFDSAMQNDNLAELTAHMYRVQKLTNGDYFFRRQTSTSSDTKKTEFENGNVFRIRSLNKIKDYNPIKVKINLIGKIEKV

SEQ ID NO: 2801 - protein, 1390 aa, unidentified
  REGION 1..1390: note = Description of Unknown: Cas Enzyme sequence
MAKKILGLDLGTTSIGWAYVIEADQPFETSSIINLGVRVNPLTVDEQTNFEKGKPVSVNADRTLKRGARRNLQRYKLRRDNLIKILVENNLITTSTIIAEDGKGTSHQIIKLRALATTTAINLGDIARVLLHLNKKRGYKSSRKAKNEEDGQAVDGMGIARMLYEENITPGQLCLNLLREGKKHLPDFYRSDLEMEFNKVWMFQKQFHSEILTDEFRKEIEGKGQRATSATFWNVYKFNTAENKGTREEKKIRAFEWRSKAIHTKLSKEEMAYVITEINNNINNSSGYLGAISDRSKELFFNKLTVGQYLFKQIEKNPHSRLKNQVFYRQDYLDEFETIWQTQCKFHPSLTNELKDEIRDVIIFYQRKLKSQKGLISFCEFESKKIEIEKDGKVVTKTVGLRVSPKSSPLFQEFKIWQNLNNLKIQNKATKEVSEFDLEAKGLLFEELNLKGNISKEKALQILGYQPKDWDLNFSSLEGNRTNQALITAYFKMIDLEGHDEIDWELQRPSEIKEIIIKFFAAQSIDISILSFDAEKQGKDFEKQVAFKLWHLLYSYEGDDSISGNEKLYQLLQEKFGFKREFGIILGNITMQDDYGSLSAKAMRKIIPYLKAGHPFAKKDEEDKIASATALAGYNHSSSLTKIENEKRLLKDKLEILPKNSLRNPVVEKILNQMINVINAIIANPEMGKPDEIRIELARELKKNAKERAEMTTNIEASKRAHEKITDILIKEFGIKNPTRNDIIRYKLYEELKVNGYKTLYSNSYIPREKLFSKEFDIEHIIPKALLFDDSFSNKTICIRQENLDKGDRTAFDYMENLGKEQLDTFVSRVEAAASAKEDSITKAKYKKLLMKASEIGEGFIERDLRESQYIAKMAKEMLQEICRSIISTSGSITDRLREDWGLINIMQELNFEKYKKLGLTEIIEKKDGSTKERITDWSKRNDHRHHAMDALTIAFTKHNHIQYLNYLNARRNERHKMHGNVMAIEAKETELKIDEDGKRKRKFKMPMTHFRSEAMHHLEQVLVSFKAKNKVATKNKNRIITGKGEKIKIELTPRGQLHKETVYGSLQQYAAKEEKIGPKFTEELINKVASPKYKAALLKRLKENENDPKKAFSGKNSPEKNPIIIDNSNTQKVPEKVKLVTLETAYTTRKEITPELKVEKVIDIGIRKILEARLATCNGNAKEAFVNLDKNPIWLNKEKGISIKRVTISGVNNVEPLHYKKDHLGNLILNSEGKPFPNDFVSTGNNHHVAIYKDEQGNLQESIVSFYEAIERINQGQPIINKLFNIELGWQFMFTMKQNEIFIFPNDGFYPAEIDLINPLNRSLISPNIFRVQKITTKDYFFRHHLETNVEMNTTTKNIAWKREGLKGIESIVKVRINHLGLITKIGEY

SEQ ID NO: 2802 - protein, 1111 aa, unidentified
  REGION 1..1111: note = Description of Unknown: Cas Enzyme sequence
MTPLSQLPRYRIGIDVGENSVGLAAISYDDDDHVIEILSALSYIHDGGKLSGTDKAPLSRLAGAGVARRTRRLRRRARSRLKKLNLYLAEQSFPPELDSQTYEVWHARYQLIHGFIENEVERNSKLALAIRHIARHRGWRNPWWTFLQVQRAAEEKSPSTSLLKMWENVATKYKFPDDEICSVGVLGFLGVTQGNPNRRLRHSTAEDRKSRENVFFDRVMAEDNFSELSAILVEQKVDSQVSTQILKLVFEQKMPHVPKDRVGDDSLDPSQKRSTRAGLEFQRVRMLNAISNLRIVDAGTNRPLSPEEFEETLTFLTNWKDKSTKPNQSDVAHLLGLNPAKVKFPTWDENQGSIAFFDQTSLEIVNKFSEKDPLGAWWRRANFIEKSDFVDFVIDNSEESHEDDASYLHLLEEESTAEALGGLTLTSGRAAYSRKTYQRILLVMEEQHCSERDAILQVFQIKDDWQPPLPDINDPIEHPTVDRVLTVVRRFAMACNAKWGIPESITVEHVRNAFIGSSALAGLKYDVAQRTLKNDQIREELGASSSGRIRKADLRRYKQIQRQNSQCLYCGTTLIFESCQLDHIVPQADGGSNKEENLVAVCTHCNKSKAALPFFTWANSGVKPDVSLEGSVTRLKTWDRGKQSKTQWSRFLKNVEARLLLTSEDDSLDERSLSSTAYAALEVRNRLTSLYVNTLSLPLVKCPEIRVYSGAINSIARRSSGIDDFLQLRGKTEKNRLDRRHHAIDAAILTTINDSVAVTLAKKNWIKRSEESTGGKTTRWKEYDGSSPQYVQNYHHWKTTCASLADEVKRSIDSDKIAVVRPLRIGPSSGEGAVHDDTVRPLEVVDANQGLTSEQVRRLSHPTLLNKVWDQLESDMSLTPENAVRVLGEKVKLFSGTAAQIAVRGGSCQIGNSVHHARIYAFRKKDGFNFGWIRVFAGEFPHIGFSKDGVDVLRQPIPYGSQAMLKANPTLLKLIQSGEAKEIGWITRNDEVEFDFSEKALIPGESDDGILSSFMRIYPEKRWIITGLGSAVELKISPSILSSEGLTKEHPELATSIISRRSYVRPSVNQFLLWPNLKIIRRSILGVPRWNDRGLPYSWEPLKVAQEIFGD

SEQ ID NO: 2803 - protein, 1012 aa, unidentified
  REGION 1..1012: note = Description of Unknown: Cas Enzyme sequence
MEPKLEKFILALDLGTSSVGWAVVELSETGEPKDLVNLGVRHFVEVTTSDKRKVKNEERREARSMRRNIARSRLRREAVMKTLKKSGMVPDVENPFSGPAASYWPYECRAKGVKEEISLHELGRAFYHLAQRRGFFSNRGAKLAALHEDEEIKQMLLEDVEADPDESQESAQNTGEVLRAIAELENELEGRTLGEYFYEKLKAGEKVRKRYTLRSMAEKEFELLYEVQSQYHPRILTDALRTRLRHAIFWQRPLKPQKFLIGKCSLEPTKKRASKALLITQRFRIWSDLANLTLTDRTTGERRTLTLQEKEQIAGCLEEAKKMTWTQIARMLGFRAQATVEFNLTKTYKDGLQGNHTWVLFNRVAPGLWNNLDETGKRELIEIILTAEDRGSLFKTLRSKYSIDKKIAYELAVRELPAGYASLSSKAMEAMLKELKMGKSRSEAQVACGYEPWSEDIPAAKKISAPPAREDISSPRVRKALNQTRKLVNAIAKTYGRPSCIRIEMARDLSLTKKEREELEKAQKVGAKENTEANESLTRMGIQNPTRVDRIWYRLAKQCGWICPYSGKTIPQRPSATSEYAIEHIVPYELCLDDSFNNLTLCHREWNELKGKRTPYQAFGGSPDWPAMVERVDGLRGLGSGRKKALFKSENDPDVDKMVSRQLNETRWIAREAAQYLRPIADRVECTKGGATYMLRMHWGLSESLSGSPEKNRDDLRHHAVDAVAIAFTSLSTFQKVTRTRKESGKKIAPLSKDVVPPAPSWLVPRLKKLLATVVVSHETTRGILGAFHEESVYGKRKSGEYHIRKPLAKLTESEIERIVDPHLKEAVKRQLNGAVGASAANRIALALANGVPYCGQVARRARIHVRIKNASMLEVPADNPTKFMLLGNNHSVSIWENEENGTRVGVFRTMLDAARAVRNKKAKCPADLAPPGKGFRFIMWLCANDTIEFEGALYRVQKIDPNSNRLCLRQIEAATVLDDSQRLLKSINLLHCDKLEVDMLGRIRIVPEGTQ

SEQ ID NO: 2804 - protein, 1107 aa, unidentified
  REGION 1..1107: note = Description of Unknown: Cas Enzyme sequence
MTGSTYRIGVDVGDNSVGLAAIEVDESGIPLSILSALSFIHDGGLSPGTAKAPVSRKATAGTARRTRRLHRRRRARLEKLDEVLVGLGWPVPDSEQPQSYDAWIARDKLASGRIEDEAERLRLLALAVRHLARHRGWRNPWLSVDQLQGLPVPSENFTAMRKAAAGRLGVEEDSLRTVGQLARGALRPSSPIRPRTWERDGKRALALDIQPVLMHRVPQEDQLAELRLILDIQGIPESTSDDICRAVFIQVKPHVPSGRVGRDSLPGMEDQPRASRATLEFQQFRVWSTVANLRIADGETRRLTAEEQGLLVTRLLDWREPEPPNWTEVAEMLDIHPRKLRGKPSVDEFGSTGVPTDRTSAKVEGKFGKSTPIGRWWREASSVARAELIDYISDPTDADHSEELSQVLAGLDEAERDKLESLQLESGRCPYSRASLSRLVDRMKADQCDLHTARKLEFGVGDDWRPEPETFSNPIDHPTVAIISKTVHRFLLYCTEKWGLPEQVVVEHVRSSFLGPSGRAEYLHELKSNTRRRDAAKLELKTQGIERPTNSDIRRRECIQRQNSQCLYCGAAIRMSNSELDHIVPRKGGGSNRSDNLVAVCHECNSAKSNLPFAVFAARSGRAGVSLDEATARVKEWNRDNLTARQLAQLKRRVIQRLKLESDAELDDRGLESTAYAARQMRERITDFMRERTPAGAEPPGVLVFPGAVTASARRAGGVDAMLRIRGKGTKDRFDRRHHAIDAAVQSTITPFVAEVLAERSRMRASHLLTGDEPGWKEFEGNDAAHQLEYRRWRERARSLAVLLKQRVEEDRVPVVRPLRLSARVGRLHTDKPDKLVAKDITETWTRPELGRVADPAQFDALMAQFGAEGSLPEDPYRRSIAGGTTVQLFKKACAQIAIRGGSCEIGDTIHHSRIYAWPTKTGFRYGQIRVYGGEFASLGMLAPGVDLFAYPLPAHSQSMRTADATTRTKVQSGEARMIGWITVNDEMELDPAEFVGGNSQLARALAEMPERRWVVTGYYQPSKVAVAPALLASEGLPDIEPGTPDPIPEMRAVVQGNRTPVAVNVLLSAPGTKVIRRSASGIPRWRDDGLPFSWDVRRATERAFEH

SEQ ID NO: 2805 - protein, 1291 aa, unidentified
  REGION 1..1291: note = Description of Unknown: Cas Enzyme sequence
MFAIANSQLGLAPSQPRKGLLFRSEKLREKEGATMTKKRLRYRVGIDVGLYSVGLAAIEIDDSDNNPLNAMPIKILSCMSVIHDGAIDPDSNKTADSRKAISGVARRVRRLRSNRRKRLNSLDRTLGSLGYPLAQAEAAVSGLKGSDPYLPWRARIAATREYIENEYERRFAITVAVRHIARHRGWRNPYSSTSSLKTAASAASQFYIEFFKRVESWKYRNGLPLFEGTSISATEKNELVIAHEDWLAERQGIKRPTPAEIIEPLLKPDPMRRIRAERPLKELKNPEIGWQEDNIERIALDPDAQMGKLHQSDNYYELRRIFTMQQVPESEQDRLFAAVFAQINPREKGAAAELVAKDDLQPQRRRTTKASLAFQRYRILTTIANLRIREKDEKERPLTLDELHKIYGYLTSKEIAAQGGTTWSDVAECLGIERSELRGVGGTTQDGEPISAKNPPYLSSESAILNAEGIKKELAPIADWWNKATEPEKEWFIDFLGNAGLPSKNLSSEEIAASDSVNELLNDLDELALEKLEKIKLASGRAAYSADTMSKLNSRMLNEGLDLHAARKIEFGVDDDWHPSPEPLGTPTGNPAVDRTIKIVSRWLTACDKRWGRPETINLEHVREGFVSEKQARTMQSDMNKRYQANIKVKKDIIEALNEGLGSGSVGLEALRNADVRRWQAVQRQNCQCLYCGAMINFNTAQMDHIVPRKGVGSTNTLPNLVATCASCNKDKSNRLYYHWATPERRQEALARVDSWNRDSYFTSNKQFGNYKKEVKARLLQKDEDEPIDARSIESVAWMARQLKEQIAGYFGYSGSVTDSTSGNEDFSLQRVNVFRGWITSEARKASGLENALPWIGGASEKTRLDRRHHAIDAAVIAMMRPAVAKVLVEREALKREQRERDHTKEQVEALGPRLWRNYRGSAEDSPIYEHWCDDQMSYLSGLLAEAMQEDEIIVTNPIRLRLGRGRAHEDTVRPLIRRKVGDSLTPINIDKAETPALWLALTNHPDYDLKLGLPADSNRRIRIHDRWLDANDKIGFMADGEKEFNVVKDAVYTKVRGGFAAIGATIHHARLYRIPKMNKSGHQTGWTFAHMRVFQEDLVRHHGANLFNVDIPAQAISRRSAVADLRAALNEGTAEYLGWLVVGDEITIDPNNEYFNPEGKNAVNKFLKAFPGTKRFRIIGFPVASKLSLAPILFASEGLPDVFESETDNEDIRKRKHKARRITYGNNAWTDDDIVAINKLLGIGASWTPSVDSLFSTYPTIIRRNTLGQIRWQSNNNMPVSWKVAPHPQI

SEQ ID NO: 2806 - protein, 1086 aa, unidentified
  REGION 1..1086: note = Description of Unknown: Cas Enzyme sequence
VWGPPPRSGGAKRETKKRLVALDRLLSEEFGWPLPNLEDYPDPYEPWHARARLVEGYIADDAKRKEMLSIAMRHIARHRGWRNPYMKPASLASLPYPSEFLTKLNEDTSRAIGRKFAAEATQGQLVDAFILGSLSLAATPELQVLEESEKDNSKNKPRDIVLGRVRGDKGVIEGKLHQSDNAEEIRRICATQEVPQDQVERLIEAVFKAKNPREVGAAYKLVGHDELPGQKKYIRAERAHPAFQKFNIVATLTNLRINEAGSKRTLSSEELQMLTNYLSNVGPKDEVTWFDVAEKLEIDRSDLQGTARASYDGQAALKYPPKDVTSASIKQSKVKALKDWWKQASEDQRGQLIDYLSNSGGSDTPKTDDELDDLTKLTQSFSEKDLEELEKISLPAGRAAYSLNSLTKLTQLMLEEGVDLHEARKRLFNVDDDWKPTPEPINSPVGNPAVDRVLKQVARWINAATERWGIPASVNVEHVREGLVSEKVVRELIRDNEARHKKNMEVAEEIAKRLGLSGRALRSHTIKYFALRRQNCQCLYCGTKISFGTAEMDHIVPRTNGGSNNKRSNLAAVCKTCNKSKSNIPFAVWVSSGKAGPGVSLEGAKGRVNSLLLEKADLPEDYDDDSLIEFYSKNESKKFRKEIIARLESKKPEEEFDGRSLESVAWMAVELHERILGYYESLLKDSGQKAPQVGVYRGAITAEARKASGFENRVELLGGKGKTRLDRRHHAMDALVIALMNQSVSKLLSWRMQLRDSQRISGMPETWKEFHGFNRDEYRRWNAWANAMRIAVELFNDALEKDEVHFSENKRLGVSLAKAHDDTIRSLCSYALGGDFSVELIDRAETPALWTALTKQPDFDVKNGLPEDPTRCITVNGKQFGPTDEVNFFASGAPAIKVRGGFAGIGDTIHHARIYRIDGKKTSYAMVRVFQTDLRRMEHEDLFTEPLKPSTISMRTASKTIRKALADGTATQIGWLVEGDEIRIEAERYSSDKIGSLLKEYPEASSWRVCGFPSAIKIRLRPNLLSEEGFDSYTSEAVSSLVSGPGWYVSINTVLGNGAVKVIRRNTLGEERWVSRAHLPVSVDLS

SEQ ID NO: 2807 - protein, 1151 aa, unidentified
  REGION 1..1151: note = Description of Unknown: Cas Enzyme sequence
MAVTLPKDDVRYKVGIDVGLNSIGFCAVEVDDDDYPIRLLNSLVFRHDAGIDPASRKDAPERENFFWGAPRQPGGAKRETKKRLVALDRLLSEEFGWPLPNLEEYPDPYEPWHARARLLDGYIADDAKRKEMLSIAMRHIARHRGWRNPYMKPASLASLPYPSEFLTKLNEDTSRVIRQKFAAEATQGQLVDAFILGSLSLAATPELQVLEESEKDNSKNKPRDIVLGRVRGDKGVIEGKLHQSDNAEEIRRICATQEVPQDQVERLIEAVFKAKNPREVGAACKLVGHDELPGQKKYIRAERAHPAFQKFNIVATLTNLRINEAGSKRRLSSKELQMLTNYLSNVGPKDEVTWFDVAEKLKINRSDLQGTARASYDGQAALKYPPKDVTSASIKQSKVKALKDWWKQASEDQHGQLIDYLSNSGGSDTPQTDDELDDLTKLTQSFSEKDLEELEKISLPAGRAAYSLNSLTKLTQLMLEEGIDLHEARKRLFNVDDDWKPTPEPINSPVGNPAVDRVLKQVARWINAATERWGIPASVNVEHVREGLVSEKVVRELIRDNEARHKKNMEVAEATAKRLGLSGRALRSHTIKYFALRRQNCQCLYCGTKISFGTAEMDHIVPRTNGGSNNKRSNLAAVCKTCNDSKSNIPFAVWVSSGKAGPGVSLEGAKERVNSLLLEKADLPEDYDDDSLIEFYSKNESKKFRKEIIARLESKKPEEEFDGRSLESVAWMAVELRGRIVGYYETILKDTGQKVPQVGVYRGAITAEARKASGFENRVELLGGKGKTRLDRRHHAMDALVIALMNQSVSKLLSWRMQLRDSQRISVMPETWKEFHGFTRDDYRHWEAWAKAMRIAVELFNDALEKDDVHFSENKRLGISLAKAHDDTIKSLCSYALGGAFSAELIDRAETPALWTALTKQPDFDVNNELPEDPTRCITVNGKQFGPTDEVNFFASGAPAIKVRGGFAGIGDTIHHARIYRIDGKKTTYAMVRVFQTDLRRMEHEDLFTEPLKPSTISMRTASKTIRKALADGTATQIGWLVEGDEIHIETDRYPSGQIGSLLKEYPEAFSWRVCGFPENAKIRLRPNLISEEGFDADISEDVVKLVSGKGWWVSPNTLLGNGPVTVIRRNALGEERWLSRAHLPVSVDLS

SEQ ID NO: 2808 - protein, 1106 aa, unidentified
  REGION 1..1106: note = Description of Unknown: Cas Enzyme sequence
RAPASTRTSCWPPTPSAAASARSGPRGTRGAKRETKKRLVALDRLLSEEFGWPLPNLEDYPDPYEPWHARARLLDGYIADDAKRKEMLSIAMRHIARHRGWRNPYMRPASLASLPYPSEFLTNLNQDVSRAIGRKFASDATQGQLVDAFILGSLRLAATPALQVPEEPEKDSSKNKSRDIVLGKVRGDKGVIEGKLHQSDNAEEIRRICATQEVSQDRVERLIEAVFKAKNPREVDAARKLVGHDKLPGQKKYIRAERAHPAFQKFNIVVTLTNLRINEAGSKRRLSSKELQMLTNYLSNVGPKDEVTWFDVAEKLEIDRSDLQGTARVSYDGQAALKYPPKDVTSASIKQSKVKALKDWWKQASEDQRGQLIDYLSNSGGSDTPKTDDEHNDLTKLTQSFSEKDLEELEKISLPAGRAAYSLNSLTKLTQLMLEEGIDLHEARKKLFNVDNDWKPASEPINSPVGNPAVDRVLKQVARWINAATERWGIPASVNVEHVREGLVSEKVVRELIRDNEARHKKNMEVAEATAKRLGLSGRALRSHTIKYFALRRQNCQCLYCGTKISFVTAEMDHIVPRTNGGSNNKRSNLAAVCRTCNASKSNIPFAVWVSSGKAGPGVSLEGAKERVNSLLLEKADLPEDYDDDSLIEFYSKNESKKFRKEIIARLESKKPDEEFDGRSLESVAWMAVELRERIVGYYESLLKDTGQKAPQVGVYRGAITAEARKASGFENRVRLLGGKGKTRLDRRHHAMDALVIALMNQSVSKLLSWRMQLRDSQRISGMQETWKEFHGSNRDEYRRWNAWTNAMRIAVELFNDALEKDEVHFSENKRLGISLAKAHDDTIKSLCSYALGDALSAELIDRAETPALWTALTKQPDFDVKNGLPEDPTRCITVNGKQFGPTDEVNFFASGAPAIKVRGGFAGIGDTIHHARIYRIDGKKTTYAMVRVFQTDLRRMKHKDLFTEPLKPSTISMRTASKTIRKALADGTATQIGWLVEGDEIYIETDRYSSDKIGSLLKEYPEASSWRVCGFPSAIKIRLRPNLLSEEGFDSYTSEAVSSLVSGPGWYVSINTVLGNGAVTVIRRNTLGEERWVSRAHLPVSVDLS

SEQ ID NO: 2809 - protein, 1109 aa, unidentified
  REGION 1..1109: note = Description of Unknown: Cas Enzyme sequence
MTTSHLKYRVGVDVGQNSIGFAAIELNDQNLPIRILNACVLKHDAGIDPEQAKTQTTRLASAGVARRARRRLMRKRKRLEKLDRLITDLGWPLINLEDQSDPYYPWRVRAELVEGFINDPDERAQKLSVAVRHIARHRGWRSPWIHERTLLQPAEPSDQYVAFKQRVEDLIGYELPNNLTLGELVVAAGLSPKVNLRRTGPTDKPKNPILGRTLQSDNANELLEIARVQGLDDQTVRKLVLAVFESKSPRGSAAKRVKKDALPGQGAYYRAEKAHPAFQKYRIATVVANLRIKNPNTGEVESLPLEVKNQIVGYLNTWSKRQAPTWIDVADYIGVERQYLRGTASATADGERAAARPPINETHVRILNASKLKPVKDWWKMADEQNRGALVDCLSNSSVIDEEDVKYADALELIGSLDDEQLARLDALRLPIGRAAYSVNSLERLTQRMLVHGDDLHQARKNEFGVDDDWAPPADSIDEPVGNPAVDRVLKAVNRWLLGAEEAWGAPVSVSIEHVRDGFMSKRQAHEIERQNERRYKQNQAARERLKDSFNVESNRTSDIRRLYALQRQNGECAYCGGAITFQNSEMDHIVPRKGVGSRNTMDNLVAVCSRCNKSKTNIPFSVWASSRPFPGVSVEEAVNRVGFWNNDGGIPKADFEKLQQSVKDRLSRTELDPEIDERSMESVAWMARELAHRIRYHFLESGNETKVFVFRGQVTAWARRASGMENRLNFIGGPGKTRLDRRHHAMDAATVALMRNSVAKTLLQRNSLRQQERFSGGTETWKTFRGDPADPGARVIYEKWLEQMRILSELFNEALANDGIPVFSNVRLRLGDGRAHADKVDRLVRHKVGATWSMKDIDRVSTEALWCALTRQPDFVWSKGLPENPQREIVVNGTHFRADDEVEMFPSYSAYLKVRGGAVALGNTIHHARIYRYKAGKKTSYGMVRVFAQDLQRHRHEDLFKAPLKPQSVSMRDAGIKLRTAIQNGEAEYLGWIVVGDEFVVDSSLFSTDKIVEFNKEFPDITRWTLIGLEDNRRINLKPVLLSSEGLPEEVSRNLAEIISVKGWRVPLSQLISAGGLTVVRRDSMGRVRYKSRANFPVTWTIDPEQDV

SEQ ID NO: 2810 - protein, 1103 aa, unidentified
  REGION 1..1103: note = Description of Unknown: Cas Enzyme sequence
MTKIKDDLRYRVGIDVGLKSIGFCAVEVDENDQPLRLLNSMVFVHDAGVDPNENKAAKSRKLTAGVARRTQRRTAQNKRRLAELDRVLSEELHWPLPNLEDFEDPYEPWRTRAELVEHYIKDDAERAEALAIAIRHIARHRGWRNPYLSVDSLLTPQEPSEFLRGLNERVGQALGREFPADTTPGQLICTYIDSPKYAETQGIRGDTGILSGKLHQFDNVGEIRKICEVQRLDHDVFKLLVRKVFFAKSPRGSAAGLVGHDQIPGQGKYIRAEKAHPDFQLFRMVAVLTNLRIREGKAERCLTPDELRGLVDYILEVQLKQQVTWADLADNLGIERSDLRGTARASFDGSPALRFPPTDVTAEKIMASKVKWLKDWWDKADSERRGFMVDALSNSGGSTGDNDIDDEVAELLEAATEDEQAELEKIQLPQGRAAYSLDSLRRLTKRMLEEGVDLHTARKEEFNVDDDWRPEPEPIEAPVGNPAVDRVLKQVSRWLRMATDRWGEPAVINIEHTRDGLGSEKVARELLREGQRRQDLNQKNLVEIAQQLGIPVKDKRSALIKYAAIQRQNSMCLYCGAEIGFTTAEMDHIVPRALSGSTNDRSNLAAVCRACNHQKGAVPFAVWATSGEAHAGVSLEDAIKRVRLWQKGPGMSPKQHKAFQSEVISRLKSRKPDEEFDGRSMESVAWMAIELRTRIDGYYRKVNSDSVPKIGIYRGQLTAEARKASGFENRVNLIGGKGKTRFDRRHHAMDALVIALMNQSVSQTLALRVNMRESQRITGQEETWKNFYGKPGQANERFKKWREGMLRAVELFNIELAKNAIPFHENVRLRVGSSKVHDDTVRKFIHAKLGEALPVAMIDRAETPALWTALTRLPDFDPKDGLPEDPSREIYIHGRKITADERLNFFNSPSACLKVRGGYVEIGSSIHHARVYRIDGKKTVYAMVRVFATDLVKMTHEDVFTTPLKTSTISMRTAEAKIRKALADGTATQIGWLVEGDELQIETDKYSGGFIGEVLAEYPQLMSWRVCGFMNGSTMRLKPLLLSREGFTEGTSEALVKITDAPGWLPAINTLLSLGKVWVVRRNALGEVRFSTKDSLPVTHLLR

SEQ ID NO: 2811 - protein, 1102 aa, unidentified
  REGION 1..1102: note = Description of Unknown: Cas Enzyme sequence
MTKIKDDLRYRVGIDVGLKSIGFCAVEVDENDQPLRLLNSMVFVHDAGVDPNENKAKSRKLTAGVARRIQRRVRQNRRRLAELDRALSEELNWPLPNLEDFEDPYEPWHTRAELVDHYIEDESERLEALSIAIRHMARHRGWRNPYIKVESLLTPMEPSEFLCRLNERVSEALGREFPADATPGQLISAYISAPNYKETTGIRGDDGILQGKLYQDDNAAEIRKICEVQRLDLDVFELLVRKVFFAKSPRGSAAGLVGHDELPGQEKHIRAEKAHPDFQLFRIVSVLTNLRIHEGGVERCLTPDELRGLTDFLLIAGLKQRVTWADLADNLGIERADLRGTARPSVDGEPALRFPPTDVTTEKIMASKVKWLKEWWKSADSERRGYMVDALSNSGGSTDDNDLDDEVVELLERATEVEQTELEKIQLPQGRAAYSLDSLRKLTERMLSEGVDLHTARKQLFNVDDDWRPEPEAIEAPVGNPAVDRVLKQVARWLNMATDRWGTPDVINIEHTRDGLGSEKVARKLLRESQKRQDLNQKNMDEMIRQLGISGKARRSSLLKYQAIQRQNSMCLYCGTDIDFKTAEMDHIVPRANSGSSNERSNLAAVCGACNRQKNATPFAAWATSGRARAGVSLDGAIERVRAWERDPGMSSKQYAHFRREVISRLKSRKPDEEFDGRSMESVAWMAIELRTRIDGFYRKLKAESTPSIGIYRGQLTAEARKASGFENRVNLIGGKGKTRFDRRHHAMDALVIALMNQSVSQTLALRVNMRESQRITGKEETWKNFYGKPGQASERFEQWCNSMLRAVELFNTELAKNAVPFVENVRLRVGSSKVHDDTVRKFTHAKLGAALSTDVIDRAETPALWTALTRLPDFDPKDGLPEDPSREIYIHGRKITADEQLNFFNSPSACLTVRGGYVEIGSSIHHARVYRIDGKKTTYSMVRVFATDLVKMTHEDVFTTPLKPSTISMRTAESKIRKALADGTATQIGWLVEGDELQLETDKYSGGFIGDVLAEYPQLTSWRVAGFPDIAKFRLRPYLLSAEGIPADASDGLREIIERKGWRPAVNVLLTSGTVKVIRRNCLGEPRYSSVNSLPVSQLLR

SEQ ID NO: 2812 - protein, 1106 aa, unidentified
  REGION 1..1106: note = Description of Unknown: Cas Enzyme sequence
MTKINGDLRYRVGIDVGLKSIGFCAVEVDENDQPLRLLNSMVFVHDAGVDPNENKAAKSRKLTAGVARRTQRRTAQNKRRLAELDRVLTEKLHWPLPNLEDFEDPYEPWRTRAELVEHYIKDDAERAEALAIAIRHIARHRGWRNPYLSVDSLLTPQEPSEFLRGLNERVTQALGREFPADATPGQLICAYIDSPKYAETQGIRGDAGILSGKLHQFDNVGEIRKICEVQRLDHDVFKLLVRHVFAAKSPRGGSAGLVGNDQLPGQGGRRAEKAHPDFQLFRIVSVLTNLRIHEGGVERCLTPDELRGLTDFLLIAGLKQRVTWADLADNLGIERADLRGTARPSVDGEPALRFPPTDVTTEKIMASKVQWLKERWKSADSERRGYLVDALSYSGGSRDDEDIDEELANEIATWFQEAEESDQTELEKIQLPQGRAAYSLDSLRKLTERMLSEGVDLHTARKQLFNVDDDWRPEPEPIEAPVGNPAVDRVLKQVSRWLRMATDRWGEPAVINIEHTRDGLGSEKVARELLREGQRRQDLNQKNLVEITQQLGIPVKDKRSALLKYAAIQRQNSMCLYCGAEIGFTTAEMDHIVPRALSGSTNDRSNLAAVCRACNHQKGAVPFAVWATSGEAHAGVSLEDAIKRVRLWQKGPGMSPKQHKAFQSEVISRLKSRKPDEEFDGRSMESVAWMAVELRTRIDGYYRKVNSDSVPKIGIYRGQLTAEARKASGFENRVNLIGGKGKTRFDRRHHAMDALVIAMMNQSVSQTLALRVNMRESQRITGQEETWKNFYGKPGQANERFEKWREGMLRAVELFNIELAKNAIPFHENVRLRVGSSKVHDDTVRKFIHAKLGEALSVAMIDRAETPALWTALTRLPDFDPKDGLPEDPSREIYIHGRKITADEQLNFFNSPSACLKVRGGYVEIGSSIHHARVYRIDGKKTTYAMVRVFATDLVKMTHEDVFTTPLKPSTISMRTADPKIRKALADGTATQIGWLVEGDELQIETGKYSGGFIGEVLAEYPQLTSWRVAGFPDVARLRLRPLVLSVEGIPTDASDGLKEILEKQGWRPYINTLLSSGVVRIVRRNCLGEERLRSVSSLPVSELLR

SEQ ID NO: 2813 - protein, 1103 aa, unidentified
  REGION 1..1103: note = Description of Unknown: Cas Enzyme sequence
MTKIKDDLRYRVGIDVGLKSIGFCAVEVDENDQPLRLLNSMVFVHDAGVDPNENKAAKSRKLTAGVARRTQRRTAQNKRRLAELDRVLSEELHWPLPNLEDFEDPYEPWRTRAELVEHYIKDDAERAEALAIAIRHIARHRGWRNPYLSVDSLLTPQEPSEFLRGLNERVGQALGREFPSDATPGQLICAYIDSPKYSETQGIRGDTGILSGKLHQFDNVGEIRKICEVQRLDHDVFKLLVRKVFFAKSPRGSAAGLVGHDQIPGQGKYVRAEKAHPDFQLFRMVAVLTNLRIREGRAERCLTPDELRGLLDYILEVQLKQQVTWADLADNLGIERADLRGTARASFDGSPALRFPPTDVTTEKIMASKVKWLKDWWNSADSERRGFMVDALSNSGGSTGDNDIDDEVAELLEAATEDEQAELEKIQLPQGRAAYSLDSLRRLTKRMLEEGVDLHTARKEEFNVDDDWRPEPEPIEAPVGNPAVDRVLKQVSRWLRMATDRWGEPAVINIEHTRDGLGSEKVARELLREGQRRQDLNQKNLVEIAQQLGIPVKDKRSALIKYAAIQRQNSMCLYCGAEIGFTTAEMDHIVPRALSGSTNDRANLAAVCRTCNHQKGAVPFAVWATSGEAHAGVSLEDAIKRVRLWQKGPGMSPKQHKAFQSEVISRLKSRKPDEEFDGRSMESVAWMAVELRTRIDGYYRKVNSDSVPKIGIYRGQLTAEARKASGFENRVNLIGGKGKTRFDRRHHAMDALVIAMMNQSVSQTLALRVNMREAQRITGQEETWKNFYGKPGQANERFEKWREGMLRAVELFNIELAKNAIPFHENVRLRVGSSKVHDDTVRKFIHAKLGEALSVAMIDRAETPALWTALTRLPDFDPKDGLPEDSSREIHIHGRKITADEQLNFFNSPSACLKVRGGYVEIGSSIHHARVYRIDGKKTTYSMVRVFATDLVKMTHEDVFTTPLKPSTISMRTADPKIRKALADGTATQIGWLVEGDELQLETDKYSGGFIGEVLAEYPQLTSWRVAGFPDPTVLRLRPYLLSGEGVPKDASKGLSELVVGRGWRPTINVILSAPDVRIVRRNSLGEKRFSTRDSLPVSQLLR

SEQ ID NO: 2814 - protein, 1103 aa, unidentified
  REGION 1..1103: note = Description of Unknown: Cas Enzyme sequence
MTKIKDDLRYRVGIDVGLKSIGFCAVEVDENDQPLRLLNSMVFIHDAGVDPNENKAKKTRKLTAGVARRNQRGTVQKKRRLAELDRVLSEELHWPLPNLEDFEDPYEPWHTRAELVEHYIKDDAERAEALAIAIRHIARHRGWRNPYLSVDSLLTPQEPSEFLRGLNERVTQALGREFPSDATPGQLICAYIDSPKYAGTQGIRGDDGILNGRLHQFDNVSEIRKICEVQRLDHDVFKLLVRHVFFAKSPRGSAAGLVGHDQIPGQGKYIRAEKAHPDFQLFRMVAVLTNLRIREGRAERCLTPDELRGLVDYILEVQLKQQVTWADLADNLGIERSDLRGTARASFDGSPALRFPPTDVTSEKIMASKVKWLKEWWDKADSERRGFMVDALSNSGGSTGDNDIDDEVAELLEAATEDEQAELEKIQLPQGRAAYSLDSLRRLTKRMLEEGVDLHTARKEEFNVDDDWRPEPEPIEAPVGNPAVDRVLKQVSRWLRMATDRWGEPAVINIEHTRDGLGSENVARKLLSEGQRRQELNQKNLVEIAQQLGIPVKDKRSALIKYAAIQRQNSMCLYCGAEIGFTTAEMDHIVPRALSGSTNDRSNLAAVCRACNHQKGAVPFAVWATSGQAHAGVSLEDAIKRVRLWQRGPGMSPKQHKAFQSEVISRLKSRKPDEEFDGRSMESVAWMAVELRTRIDGYYRKVNSDSVPKIGIYRGQLTAEARKASGFENRVNLIGGKGKTRFDRRHHAMDALVIAMMNQSVSQTLALRVNMRESQRITGQEETWKNFYGKPGQANERFEKWREGMLRAVELFNIELAKNAIPFHENVRLRVGSSKVHDDTVRKFIHAKLGEALSVAMIDRAETPALWTALTRLPDFDPKNGLPEDPSREIYIHGRKITADEHLNFFNSPSACLKVRGGYVEIGSSIHHARIYRIDGKKTTYSMVRVFATDLVKMTHEDVFTTPLKPSTISMRTADPKIRKALADGTATQIGWLVEGDELQLETDKYPKTRAGGVFVKYPQLVSWRVAGFKDLTRLRLKPYLLSKEGLPPEEAEELLPILDDPGWLVSINVLLGQGEVWVVRRNSLGEKRFNTRDSLPVSQLLR

SEQ ID NO: 2815 - protein, 1156 aa, unidentified
  REGION 1..1156: note = Description of Unknown: Cas Enzyme sequence
MTKINDDLRYRVGIDVGLKSIGFCAVEVDENDQPLRLLNSMVFVHDAGVDPNENKAAKSRKLTAGVARRTRRLLRERKRRLARLDVLLSEKLNWPIPNLEDFEDPYEPWHTRAELVEHFIEDESERLEALSIAVRHIARHRGWRNPYSNVESLLVEVSPSKFLWSDDPDLQETTLNGRVAKAVGRSFAPETTPGQLISAYLSDPRYAPQMGRSFSFSGLRQRRGADEDYMKKAYADRVFLGKLMQHDYAAEIRQICKTQRIDEDTQKLLICAVFDAKSPKGSSKPLVGKDELPGQEEHYRAEKAHPSFQRFRIITVLTNLRIREGGSKRSLTTEELQRGMKFLFEDAVGANVSWTDLAEQFGVSRTDLLGTAAPSYDGSPALPAPPTDTTSEVIMNSKIKWLKDWWKNADLEQRGYMVDALSNSGGSSDEDFIRDEIAEVFQEASDSDWAKLDKLNLPPGRAAYSVDSMEQITELILQEGVDLYTALRRLFDVGKNWAPTPEKIEAPVGNPAVNRVFKQVARWLKMVTERWGTPVVINIEHTREGLKSARVAEEISAKDKKHWKAHQQATERMLADLGVSGKLRRSARLRYFAVQRQNCQCLYCGCPISYETAEMDHIVPRANSASTNLLSNLAAVCRRCNVQKGSVPFALWASSSSSPEEVTLKGTLDRVNAWKGSPELTGAEFKQFKKDLIKRLKSKVPEEEFDGRSMESVAWMAVELRSRILSFYQTQGSVDAPYVGIYRGQLTAEARRASGFENRVNLIGGRGKTRFDRRHHAMDALVIALMNASIARSLAWRVNLRDSQRITGTQETWKEFYEPSQSRSRERFIQWQTAMLRAVELFNIALTANAVPFHENIRLRVDSSKVHEEKIFSFNSQKKKVTGETKDGKLKIKATGIQVTLGSALSADLIDKAETPALWTALTRLPDFDSKDGLPEDKSRVIYVHGRKITASEQLNFFGSPSACLKVRDGYVEIGNSIHHARIYRIEGEKDTTYAMVRVFATDLVKMAHEDVFTAPLKPSTISMRTADPKIRTALADGTATQIGWLVEGDELQLETDKYSGGFIGEVLAEYPQLTSWRVAGFPDTAKLRLRPYLLSAEGIPADASDGLREIIERQGWRPAVNVLLTSGTVKVIRRNCLGEPRLNSGNSLPVTQWLR

SEQ ID NO: 2816 - protein, 1103 aa, unidentified
  REGION 1..1103: note = Description of Unknown: Cas Enzyme sequence
MTEINDDLRYRVGIDVGLKSIGFCAVEVDDKDQPLRLLNSMVFIHDAGVDPNENKAAKSRKLTAGVARRTQRRTAQNRRRLAELDRVLSEELRWPLPNLEDFEDPYEPWHTRAELVDHYIEDESERLEALSIAIRHMARHRGWRNPYIKVDSLLTPMEPSEFLRGLNERVGEALGQEFPEDTTPGQLISAYMSDPKYRESNGIRGDDGILQGKLHQYDNAAEIRKICEVQRLDHDVFKLLVRKVFFAKSPRGSAAGLVGHDQLPGQGKYIRAEKAHPDFQLFRIVSVLTNLRVREAGAERCLTPEELSGLTDFLLGAGLKQQVTWADLADNLGIERADLRGTARPSVDGEPALRFPPTDVTTEKIMASKVKWLKDWWKSADSERRGFMVDALSNSGGSMDDNDIDDEVAELLEQATEDEQTELEKIQLPQGRAAYSLDSLRKLTERMLTEGVDLHTARKQLFNVDDDWRPEPEPIEAPVGNPAVDRVLKQVARWLNMATDRWGEPVVINIEHTRDGLGSEKVARELLRESQRRQDLNQKNMDEMIQQLGISGKARRSALVKHQAIQRQNSMCLYCGTTIGFETAEMDHIVPRANSGSSNERSNLAAVCRTCNHQKGAVPFAVWATSGQAHAGVSLEGAIERVRAWERDPAMSPKQYAHFRKEVISRLKSRKPDEEFDGRSMESVAWMAIELRTRIDGFYRKLKAESVPNIGIYRGQLTAEARKASGFENRVNLIGGKGKTRFDRRHHAMDALVIAMMNQSVSQTLALRVNMRESQRITGQEETWKNFYGKPGQASERFEQWREGMLRAVELFNIELAKNAIPFHENVRLRVGSSKVHDDTVRKFIHAKLGEALSVAMIDRAETPALWTALTRLPDFDPKEGLPEDPSREIYIHGRKITADEQLNFFNSPSACLKVRGGYVEIGSSIHHARVYRIDGKKTTYAMVRVFATDLVKMTHEDAFTTPLKPSTISMRTAEPKIRKALADGTATQIGWLVEGDELQIDPSKYSGGFIGEVLAEYPQLTSWRVCGFMNGHTMRLKPFLLSREGFSEEASEALVKIADTPGWLPAINTLLSSGDVWVVRRNSLGEVRFSTKDSLPVTHLLR

SEQ ID NO: 2817 - protein, 1119 aa, unidentified
  REGION 1..1119: note = Description of Unknown: Cas Enzyme sequence
MSPVRVGFDVGQNSVGSAAVEFDDDGMPVSVKRLLVTLHDSGKDTVESGQTASVSRKASGGAARRVRRLFRNRRRRTALLEAELANRGYPVPPREAPTTYGPWDARQQLITDFVDDTKQRRTLLSSAIRHMSNHRGWANAWVSLDSYLWSEEPTSEFKAAVAQLVDADRWGDVGPKPIRYQADLASFALDASARLRPRQPATTGGHLLGTQRRADVVREWREICRVQQVPDEEFVVLARIAFSQKKPHVPVERVGNDWLEGFRDKKRAAVASMEHQEFKIRQTVANLAIRETARSKERQRISAGQQNLIVDHLMSVTDAKERPTWRDIAELFLDIPANLLVHYQPEEQLTGLAPVNSSVLELHSLNVKHPLIAWWITASPDNRCEFMLFFGDSAGSGFSDKVAADLESLILDLDEKQQEQLTKLKFSSGRSAHSLEALRLMNAEMERTGDTYVEARNRLFGKDGGNVIPQDLEDLDTQADHPTLQRILPVLRRFLLAIERESGAPDRVVIEHVRDAFLGFNAKQEASLRMIRLRRDRENAKRDIANAGLGVTAENADNGMIRKFQALTRQNSQCLYCGATPEWSGFEMDHIVPRASGGNSTRANLVAVCRECNAAKGKEPFARFAASGRRANLSLDGALQRVNEYQQGSLDRTQLKRLRAETGRRLKQTELDDPIDERSLASTAYAAVDMRRRIRSHYDEQVPVDVYSGSIVSMARHASGIDKMIRLREGLDVKSRFDRRHHAIDAAVTLMLDPSVASTLAERDDLRREEMDTGKPTVWRDYEGSGPTQIDRFRHWKRAMQRLSELIAKLVVNDEIVVMQPVRFSAHHAKLHLDGRSAHARKSLGDDWAPEDLARIVDDRVYEAVAANVKPGESLPEAADRTIMLPNGLRLDADGEIFLFPDGAARHSLPNNSSSPLGATMHHIRLFRWTDAKGKLTAGVVRVWASDLYDLEDGIKGDLLTSPLRPSSRAIRRSLAAVREAVRDGRAEHVGTFVKGDEVRIRPAEWMSKANKGSDFLTHFPETHWQLSSWEEISRANLRPLLLSSEGIADSNSLKDRRKVVVPEVVSEVLKRTMRISATQLWSTPSTRVIRRTGFGTIRPEGAQGLPATWSPYDAVHGS

SEQ ID NO: 2818 - protein, 1127 aa, unidentified
  REGION 1..1127: note = Description of Unknown: Cas Enzyme sequence
MMAAPLVGIDVGENSVGLASIECDDSGMPQRIGRLLVVIHDSGKDVMASGQTASVSRKASGGAARRVRRLLRNRRKRANRLADELSSRGYPLVDASELETYAEWRARSRLLRDYVTDDAERRRLISIAIRHMSNHRGWANAWVSLDSYVWKEEPSAEFEAAVAAAVAEDRFGELDPDRLKFQADLAELGLSTSERLRPRNPAKPSEHAVRTAHLLGQQRRVDVVREWRQICRVQRVPDEEFLALARIAFAQEKPKVPLENVGFDWLPGYQQHRRASIASLEHQEFQIRQTVANLAVRGRPGPHGRGPLTVDEQNVIIDHLMGVTKADEAPTWKEIAELFLGVPPTHLVSSEPDESLHATAPILRSAAVIHQLPKSHPVMLWWRAAPDVRRADFIRWLADPAKIEVPDEGEFEQLLDELSESETEALLKLKFPSGRSAHSVESLRLMSAEMQRTGDRYVTVRNRLFNAGEDLRPRDLQSLDTESDHPTLQRILPAVRRFLRSVEHGPAGPPRQVTIEHVRSAFLGFNARQELISEQRKNQRARQRAQEEIAAAGLGISHASDGMIRKFQAIQRQGSRCLYCGATLVWSSTEMDHIVPRKSGGNSTRANLVAVCRDCNAAKGKDPFAVFAQSGRRPGVSIDDAIERVRSLERGELDPKSFRRLKGEMIRRLKQTEEDEPIDERSLASTAYAAVDMVRRINTHYGDEGGDRAKVYSGRIVSMARHASGIDRKIRIRDGLDAKSRLDRRHHAIDAAVAALLNPSVARTLAEREDMRQSARNGDGDDRWKTYKGSSPAAVERFERWMAAMDRLAVLIREALDRDEVVVMQPVRFSAHHAALHEDGRAPHQTKRVGDAWTSAERALIVDDRVYEAISGGALPSADLPEDSNRSIRLPNGRRLDAEGKVFIFPDTAARLPLPNQSSARLGQSIHHARLYRWRDARGRVAGGVIRVWAADLYDLDGGVRADLLTAALRPSSRAVRRAKNVKLRDALVQGIAEHVGTFVVGDEILIDPAEWAGDNEPGRFLAEWPERHWRLAGLMSDSQFTMTPMYLSQEGVVREEEFDPDEHRRIVPVSADAFKVISDRLRISASSLWSTESTRVIRRTGSGAVREAPDRGLPASWSPYLAVHGS

SEQ ID NO: 2819 - protein, 1116 aa, unidentified
  REGION 1..1116: note = Description of Unknown: Cas Enzyme sequence
MVLGGAVHVGVDVGENSLGLAAIEKDGDGFPVAVPHLLVVLHDGGKDGMASNQTSSVSRKASGGMARRVRRLFRNRRRRRLALERLLAEIGFPTESYGDSTYEPWEARIALLKDRVEDDRERRRLLSIAIRHMANHRGWANAWVSIDSYVWKEEPSKEFERAVAAAAESDSLGTVDPRSLRYQADLAALALDHRTLIRQRGGRDNLLGVQRRVDVVREWRQICRVQGVDDGTFLSLARVAFGQEKPKVPIERVGNDWLPGYTNRKRAIVASMEHQEFKIRQAVANLAVRESARSNQRSRLSPEDQRLIADQLLGEVDKDKAPSWKDVAEWVGVAPHLLVHASPEEQLTGRAPINTTVVAIHSLPKKHPVLAWWQGADAELRSEFVRWFADPAAIEIRSESEAAFEQIFESLDEKELEAAQKLRFSSGRSGHSIEALRRINAEIEASGDTYVQVRNRLFGGGEDIRPKDLASLDTQADHPTLQRILPPLRRFLFALKRRHGEYPEQVVIEHVREAFLGFEAKREAALRMLRNRRDRELAQQDIANAGLGLVNASDADLRRFQAIRRQNSACLYCGATPGWSGFELDHIVPRASGGNSTQANLVAVCRLCNAAKGKRPFAVFAQSGDRPVVSIDDALRRVEEMDRGRIDARQFWRLKQEMKRRLKQTEEDEAIDERALASTAYAAVDMRERIQMSLGLGPERVPVYSGRIVSMARHASGIDKAITIREGIDTKSRFDRRHHAIDAAVAAMLNPSVARTLAERDDLRRESKLTGVDNGWREYEGSSPRAIERFRQWKTAMIRLAELVDEKLRADEVVVMQPVRFSGRHSKLHEDGRAPHARRRLGAAWTSVDRARIVDDRVYEALSAGLQAGDPLPEDDARTLRLPSGRMLTADDEIFIFPDGSARHPLPNASSAPLGGSVHHARLFRWPGKGGAWNAGIVRVFASDLYDLEGGVEGPILSAPLLARSRAVRRSQLPVREAIERGIAEQVGSFVIGDEIEIVPSEWGTSGKAGEFFARFPERRWRLTGWEQEGVLNLRPMYLALEGATLASDDEEPDSRLVRISRTEEDIIKRTLRVAPSWLWKTPSTRVVRRTALGEPREATTGVPMSWSPHRAVFGD

SEQ ID NO: 2820 - protein, 1132 aa, unidentified
  REGION 1..1132: note = Description of Unknown: Cas Enzyme sequence
MSADSLNYRIGVDVGDRSVGLAAIEFDDDGFPIKKLAMVTFRHDGGMDPATGKTPKSRKETAGVARRTMRMRRRKKKRLKELDKKLRDLGYFVPRDEEPQTYEAWSSRARLAESRFEDPQECGEHLVRAVRHMARHRGWRNPWWSFSQLEEASQKSSETFGRILERAQHEWGERVSDNATLGMLGALAANNNILLRPRRYEHNPKTGKNAEKLNVRGQEPILLDKVRQEDVLAELRRICEVQGIEDQYPELAHAVFTQVRPYVPTERVGKDPLQPMKIRASRASLEFQEFRIRDAVANLRIRVGGSERRPLTEEEYDRAVDYLMEYSDTAPPTWGEVADELEIAENTLIAPVIDDVRLNVAPYDRSSAIVEAKLKRKTQARQWWDDDANLDLRSQLILLVSDATDDTARIAENSGLLEVFESWSDEEKQTLQDLKFDSGRAAYSIDTLNKLNAYMHEHRVGLHEARQNVFGVSDTWRPPRDRLDEPTGQPTVDRVLTIVRRFILDCERAWGRPQKIVVEHARTGLMGPSQRADVLKEITRNRNANERIRQELRAGGVENPNRADIRRNSIIQDQESQCLYCGKEVGVLTAELDHIVPRAGGGSSKRENLAAVCRACNASKGSRPFAVWAGPARLERTIQRLRELQAFKTKSKKRMLNAIIRRLKQREEDEPIDERSLASTSYAATSIRERLEQHFNDDLPDGFAPVSVDVYGGSLTRESRRAGGIDKSIMLRGQSDKNRFDVRHHAIDAAVMTLLNPSVAVTLEQRRMLKQENDYSSPRVQHDNGWRDFIGRGEASQSKFLHWKKTAVVLADLISEAIAQDTIPVVNPLRLRPQNGSVHKDTVEAVLERTVGDSWTDKQVSRIVDPDTYIAFLSLLGKKKELEADHQRLVSVSAGVKLLAEERVQIFPEEAASILTPRGVVKIGDSIHHARLYGWKNQRGDIQVGMLRVFGAEFPWFMRESGVKDILRVPIPQGSQSYRDLAPTVRKNIENDKAVEFGWFTQNDELEIDPFDYIQHGGKDKLARFLSYMPESRWRIDGISMNNKLRIRPNLLSGEELPAKVYGKELSEEQYKLLEETLKTGLIIATEGLLSLKSARIVRRNNLGIPRWRGNGHLPTSLDIQRAAAQALEGRD

SEQ ID NO: 2821 - protein, 1143 aa, unidentified
  REGION 1..1143: note = Description of Unknown: Cas Enzyme sequence
  MOD_RES 267..270: note = Any amino acid
MSADSLNYRIGVDVGDRSVGLAAIEFDDDGFPIKKLAMVTFRHDGGMDPATGKTPKSRKETAGVARRTMRMRRRKKKRLKELDKKLRDLGYFVPRDEEPQTYEAWSSRARLAESRFEDPQECGEHLVRAVRHMARHRGWRNPWWSFSQLEEASQKSSETFGRILERAQHEWGERVSDNATLGMLGALAANNNILLRPRRYEHNPKTGKNAEKLNVRGQEPILLDKVRQEDVLAELRRICEVQGIEDQYPELAHAVFTQVRPYVPTEXXXXRPYVPTERVGKDPLQPMKIRASRASLEFQEFRIRDAVANLRIRVGGSERRPLTEEEYDRAVDYLMEYSDTAPPTWGEVADELEIAENTLIAPVIDDVRLNVAPYDRSSAIVEAKLKRKTQARQWWDDDANLDLRSQLILLVSDATDDTARIAENSGLLEVFESWSDEEKQTLQDLKFDSGRAAYSIDTLNKLNAYMHEHRVGLHEARQNVFGVSDTWRPPRDRLDEPTGQPTVDRVLTIVRRFILDCERAWGRPQKIVVEHARTGLMGPSQRADVLKEITRNRNANERIRQELRAGGVENPNRADIRRNSIIQDQESQCLYCGKEIGVLTAELDHIVPRAGGGSSKRENLAAVCRACNASKGSRPFAVWAGPARLERTIQRLRELQAFKTKSKKRTLNAIIRRLKQREEDEPIDERSLASTSYAATSIRERLEQHFNDDRPDGFAPVAVDVYGGSLTRESRRAGGIDKSIMLRGQSDKNRFDVRHHAIDAAVMTLLNPSVAVTLEQRRMLKQENDYSSPRGQHDNGWRDFIGRGEASQSKFLHWKKTAVVLADLISEAIEQDTIPVVNPLRLRPQNGSVHKDTVEAVLERTVGDSWTDKQVSRIVDPNTYIAFLSLLGKKKELDADHQRLVSVSAGVKLLADERVQIFPEEAASILTPRGVVKIGDSIHHARLYGWKNQRGDIQVGMLRVFGAEFPWFMRESGVKDILRVPIPQGSQSYRDLAATTRKFIENGQATEFGWITQNDEIEISAEEYLATDKGDILSDFLGILPEIRWKVTGIEDNRRIRLRPLLLSSEAIPNMLNGRLLTQEEHDLIALVINKGVRVVVSTFLALPSTKIIRRNNLGIPRWRGNGHLPTSLDIQRAATQALEGRD

SEQ ID NO: 2822 - protein, 1344 aa, unidentified
  REGION 1..1344: note = Description of Unknown: Cas Enzyme sequence
MKKILGLDLGTTSIGWAFINESENENETSTIVNTGVRIVPLTTDEEADFKKGNTISINADRTLKRGARRGLQRFKQRRDALIESFTKIKFINSSFIYAETGKETTFSTYKSRAKSANEAVTKEELVQVLLMLNKKRGYKSSRKAKTAEEGEAIDGMKIAKEIFENNLTPGQWVFNSLSEGGKYIPDFYRSDLQIELERIVGYQNQFHSESINNKLIQDIQGKSRTQTSQYFTGILKIELAENKGPRDETKLQHYKWRNDALVKELDLKSLAFIITEINNQINKSSGYLGAISDRSKELFFNKETVGQYQYKKLLNKEHSNLKNQVFYRQDYLDEFETIWETQAQFHPELNAKLKTEIRDITIFYQRKLKSQKHLISQCEFEKGHKAIPKSSPLFQDFRIWQNLNNIVVKNETTREPYLLSEELKQQIADILKFKDSYSDLQLMEFCKLKKGSHSVNFKKIEGNRTNTAIYKAFEKILDLEGYEMDVSNMNVLEIKEAISKIFETLNISTNILNFDPTIQGNDFDKQPYYQLWHLLYSSEEDEPLKKTLMSKFGFKENHIPFLLNVNLQAEYASLSAKAIKKVLPHLMDGQIYDKACLLSGYNHSSSLTSEQNNERILKDTLELLKKNSLRNPVVEKILNQMINVINAIIADPTMGKPDEIRVELARELKNNNEQRSEMTKAINKSTTEHEQIRKVLHTEFGIHRVTRNDIIRYKLWKESGGISLYTGKPIQPSKLFSKEYDIEHIIPKSRLFDDSFSNKTICERQLNIDKSNKTAYSFLKQKLSPDEFDHFEKRVRSMFGKISRTKQNKLLMADSDIPEGFIDRQLRETQYIAKKAKEILLEVSRNVTATIGSVTDKLREDWELVEIMKELNWDKYHKLGLTKEEEGKNGERLYKIVDWTKRNDHRHHAMDAITVAFTKPAYIQYLNNLNARDINTKKGNSILGIESKYLKRDKNNKLRFIAPMPNFREEAKKHLESILISYKAKNKVVTNNKNTTKIKGGTNQKTQLTPRGQLHKETVYGKLQQYATKEEKVGANFTAAYITKVAKKQFREALLIRLAEYDNDPKNAFTAKNSLTKNPIYLDIEKTETVPEKVKIVWLENNYTIRKDINPDLKIDKVIDSGLKSILEDRLTEFGGDPKKAFVNLDENPIWNNKERGIAIKRVTISGVSNALALHTKKDHLGNEILDEEGNTIGVDFVSTGNNHHVAIYKDEKGNLQEEVVSFYDAVVRKNLGLTVINKNHANGWEFMFSMKQNEFFIFPSESFNPLEIDLLNPNNYHLISPNIFRVQKFTIRDYFFRHHLETSVEDKKELKDISFKRLGLNGINNMIKVRINHLGQIVQQGEY

SEQ ID NO: 2823 - protein, 1671 aa, unidentified
  REGION 1..1671: note = Description of Unknown: Cas Enzyme sequence
MKKILGLDLGTNSIGWALVEIDHENKTVRILGLGSRILPMDAAEIAKFESGAKTESSAAKRTTLRSPRKLNERYLLRRDRLHCVLNLLNALPKHYKLSIEFENKKGKRSGKFKKGTEEKLAYYKDDSGKFQFLFKDAYHQMESDFRKKYPEMFYQKRNGNQTRIPYDWTLYYLRHKAVTDKNFELTKEQLAWITLSFNQKRGYEKVIGQDEKVQKEGELTEPFVGKVKSINKIENQDAYEIVLVDSENENSQLLIYKELTKIPITEVDDLKELEIITKYDNNNNKIDSKTIYRIKEVKSLKIVDAKFTDKKGEVEFSLNTGWSYKENRKFLPKLSNESQDFILETDFDSNGDRIQKSAGNKGKVDVKIQAPNEKDWTLMKLKTETSLTSFNTKNKTKGVASFVYYNLLQNPKQKIKADLITVIERDYYREELDVIYKNQEQFHPELKNRNLYEQAIELLYPNNNSHQKTIKELDFNHLIKEDVLLYQRDLKSKKSLIADCVYEKENYERTDEKTGKKYKNPLKAIHKANPLYQEFRLWQFIKRLKIIKKEDIVNDEIKINLDVTSQLLTNKLKEELYTFLNDKENATEKDILGFLNKKHKDIEVNTENYKWNFASEKEPCNPTRYNFILRTKQIKGFDYREFLIPENEYSLWHFFYSVKKKDEFNKGLKNVISRLLDKSNLSQDYLNELIKSFSSFGGYTTDYGTYSEKAIKKLLPFLRLGKFWNEEEVEAILSKANQEVKQKVLDKEEINGELKDFQGLWVSSACYLVYGRYSEVGEVQFWQSPYDIENYLKNEFRQHSLNNPTVEKILVETLHVVKDIWKYYGEEIGTDKEGRIIYNKLFDRIHIELGREMKKNNKQKEKDDKNNKENRKANERIVELLRELKKTNNTLQEKSPFQQEKLRILEEGLLSSIEYDKDTTEYELSNGKISKKEIKDITSKELSKISRSDFERYKLWLDQRYQSPYTGKFIKLSDLFDRKKYEIEHVFPQERITLNALYNKVICETEINKEKKASTGYSFITKAKSKKVFCAAHDTQVEILSIDSYEELVKSNFTGRKRDILLSKEIPEEFTNSQLNNSQYISKMAMKLLSNIVRKKDEDTFRSKNVLATNGTITSTLKRHWQLNDAWNEIISPRFKRLNELTNSNLFGDYREINGHKVFINTVPEEANKTFDPKRIDHRHHALDALIIALTTENHVNYLNNISSQEENDEEKLKTRKGYKFQLTNSRKGFNDEKEWYFLPPAQIKTKDGIDVFEYQFGETKSKVFKDIAQTALENTIASFKQKNRVIRQRWNKYLKIIDGKLKIETQEGLKQVVNYNVRKRLHEDTFYGKVKLQNKIITISLEKSLIEKFDLVDAGISKEVENLMQNQNRSIKEIIETLKIKYPKVNVYEKYVATRFGNELESFASIPSDKIIKAIQSITDTGIQRSLENHLDNYKEVIDGKTKFDTENAFSSDGVKELNKNITELNNGNFHHPIYKVRTSDAMGTKFSVSEEGQKSTKYVVTAAGSNAFCGFYQNGTDRKYYIPTLRESVESLKQGSEPCPASHPEDPEYKLIFVLNPSDLVYVPTEEEIENPNLVDFSRMKKEQMNRIYKFTDGSGIDMNFIHVNIATVLFNLNKEKQKKAGIDLPIQNEVGVGSQGSKNQNTLEGIQIKSVCWKLEVDRLGKIKRIIR

SEQ ID NO: 2824 - protein, 1417 aa, unidentified
  REGION 1..1417: note = Description of Unknown: Cas Enzyme sequence
MKHKYIIGIDPGVGSLGISLRNTERNALLEQIEVTNVDIVRSGVVKNGEGKYVSFAAERRSFRNTRTMYRHRKRRKQETLKLLINEDVVLDENIKHVLCPLSKEELDKWVRYDKNKGYKREYPTDSVEFSHWMMLDFNNDGKVDAYSSPFQIRKELVERQFDFSKKEDCYKLGRALYHIAQRRGFKSNKGSINDSDVISIGDNQDDDFDSLEYSEKKKSKTLDAYMKQLEEQGHERVTVGFALACLENVGIRLRDSEYQAIRKQLKDEITTIFKFQKQLSLNSTLYKRLVSEKRNEGTIFYQRPINSQKGNVESCTLEPRKKRCQVSHPEFEKYRAWSFVNNIRIRRLVDNEPQMLPYELRMKLIEKIFSTVFKTIDFIGIRRLIEEEVGEPLSANEGTINFKDDYTLNGCPTIGRLRKILGDDWETGTIDIEQTRRRNKNQEDKDLHTISYDAIDLWHICITMENETAMKAFLEKKMPFDEEQKKEMMQLYKNVSNDYANYSVYALQKINRFLISGCNNYEATLLAKIPDIIGKTQWKQYGKDIETDIQNLIAQNREEKRYLAIANQLIADYKSQDEDDRDHNYDYQLMESDWYDVENKIKESIGKVTWTNIPTEEQNAIKLRVGELYQQFFKSYKRDYYKLPNDTERIQSYLSERFSLDLQKVQQIYTPSYNKYYPPAQRVKGVFQLGSPAKSALRNPSAMRILYLLRRRINELMERYRDMEPDNTRIVVELPRELNDANMRRAIDLYQERRKKENNIFKEMIGEVLDVNEEERVEKTRLLIEQSPEYLKADFEEGFQKHKEPNSYTRNVYNDTIEYATTKYRLWLEQGCVDIYTGHTIPFSHLFDANMYDIEHTIPRSIVLEDSLENKTITSAFFNRKVKGNLLPSQLPNYNDVILPNLQRWKDRVERLNERVRYWLRETKRAADPDRKNYCIVQRHLWQMELNYWSSKLNRFLMTEVKTDFVNKQMSDTRVISKYVYHYLKSCFSSVDVQYGCTNAVFRKILGIQAKDEEKDRSVHTHHAIDATVLTFIPSSSKRCEMMRLFFQIDEAKKAGNIMEEKRLKKQLEEEKNLCLYGRTNKKHSDKNLADLVRDIQETTFVNHSDRDQALTPAKRRGVFRKNGTTYNVLKTGDCIRGKLHKEKFFGAITQWEKDADGLVVRDAMGQHVVDTSNVKYVIRVKLQYKQGRGEGFKSWEELKARMIDKSLYRKLEEQHPNETFAEACKKGFYTMRKIHGEFVRNRIRHVRCEISDNQGHISIKEHLNCSKKDYKRFYYAAPADLLCACEYKGVKEQKYEMIRLFDISQNRKDGKEDIPTSIQGKKEILHLVRVIRMGDMVILYKDSPNELDVLDKKQLAKRLYRVDGFEKSGIIKLVKHDKTKEDGRGKAYADFEERISQSIIRMSITKVKFVPLINHR

SEQ ID NO: 2825 - protein, 1419 aa, unidentified
  REGION 1..1419: note = Description of Unknown: Cas Enzyme sequence
MEKKYILGVDPGTGSLSLFLRDTYKEDLFDQVKYASVDIIRSGVTKDGQGKYISFAAERRGYRSSRRRYLHRRWRKQATLKLLISSAELDKQIKFPLCPLSNEELERWIKYDKKKGLKREYPIDNTEFARWMKMDFDNDGKADYSSPYQLRKVLAEEKLDFSVQENCYKLGRAIYHIAQRRGFKSSKGDSLSEVDSEVDEVITDSDDFDALEYSEKKKSHTLETYRKENDYKTVGCALAALEFEGERLRDSKYQAIRSQLKREIEIIFETQGLSKDSILFKRLISEKKHEGTIFYQCPPRSQKGNVEHCRLEPLKKRCQVSHPEFEKYRAWSFINNIKVRLPEESDAHCLSLELRQKLYGEISTHINTFEFITIRKWIENELGLVEGTLSVQDKSINFRDDYTVNGCPTIVRLQKILGERWEIWQYDTGRVRENKNGTKHTVLYDALTLWHVCANAENETYIQDFVTNIKDTKTNKQYFSEGQTKEFIRWYKYLSDECSKLSLSALKKINHFLVRGFNNYEATLLANIPTLIGKQNWKEYGEEIETTIQQIIDDNREKRRLIRIANNLISDYFSLHDSERFVEDKELDTDDYNAVKARTKEMYGTKAWNTLNEEEKVIILRRVAQLYQQFFHSNNSSYYKAPTDMEAVCSYLHNTFDIPVAVITKQLYTPYDNKYYPKAELSDGYYQLCSPAKGSNHNPAAMRILYLMRRRINSLLKDKDLGITDDNTRVVVELPREMNDANQRRAIELYQERRKKENKIFCKMIGLTINENDEEDEILQENERLQKVRLLIEQNPDYLLADFSDEYQRDKEPNRFTRNVYNEKIEYADRMYRRWLQHGCIDLYSGNEIPFSELFDENRYDIDHTIPRSIILSDGLENKTITSALFNRRIKENRLPTQLQNYQSVVLPNLRCWQERIEHLQERVAYWLKETKRANDPERKNKCIVQRHVWQMELDYWIAKLERFTITEVTPDFVQKQMSDTRVISKYVFHYLKSFFKHVDMQYGRTTAIFRNIYGLPAKDRNNHTHHVIDAATLSFIPSSRKRDEMLSLYFMIKEAEEAGSDTEALKKSLQLEISESLFGRSYRNDTDKQFSDLVQYLRETTLVRHVEKDQTLTPARKKGTLRKNGESRPIIKTGDSLRGKIHQDSFFGAINPWKTDDKGLVIKDENGLPIRDESNILYVERVKLQEKKGKGEGFTGWNDLYDRIVDKALYWKLRNQFEESISFDEACKKGFFVERTVNGKTFLNRVRHVRCEIKNNRSHVSIKRQLMPSARPYKQWYYAESADISYVCEYKGESETEYVLYHLYKIAQNRKQGKPDIPETIPGKREMLKLTRRMCKGDMVLLFDRTPEELDSLNAQQKSQRLYTVTSFEKPNGITLTKHFAANIKGKGEGIKDKPFDEVIKLDRIRCSLKVIHFVSVV

SEQ ID NO: 2826 - protein, 1403 aa, unidentified
  REGION 1..1403: note = Description of Unknown: Cas Enzyme sequence
MEHKYVIGVDPGTGSLGLVVRDTDENELIDQIKFASVDIIRSGVIESGQNKYISFAAERRGYRNARNRYMHRKWRKQETLKLLTDANVLDGTIKHLLCPLSKGDLERWIRYDKEKGLKREYPIHSVAFAHWLMMDFDGDGKVDDYSSPYQIRKELLERQFDFSTPEDCMKLGRALYHIAQKRGFRSCKGDKVNDEDLPVDGNQMENEDFDAMEYSEHKKSKLLRDYMQEQGITDKSVGYALALLENEGIRLRDSDYQVVRKDLKKEVKAIFEYQEQLSTDSYLYKRLISEKKGEGTLFYQRPLRSQRGNVEKCTLEPLKKRCKTSHPEFEKYRAWSFINSIKIKLLDDDVLHTLPFDMRQRLYHEKFSKIVSKTFEFASIRKWIEKELGIHDSLSAKAKTINYYDDHSVGGCPTIGRLQKILGSDWQSWTLETDHIRKKKNGTEHRVRYDALTLWHICTEAENETFVEEFAKNHLPFDEVQIKELVRLHKNASDEYANLSLSVLKKINYFLEHGFNNYEATLLANIPTLVGAKQWKEHGDEIESHLQDIIDSNREKKRYLSIANRLIADYNSLDDKERFADDPHHDYKLQESDFRDIEKIIKEVVGKTTWGKMTADDKESLIQKVAALYQQYFESDKRTYYKMPKDMDAIREYLHIAFGIELDKDNQIYTPYDNKYYPQASHTNECWKLCSPVKGALRNPAAMRILHLMRRRINALLKDKSLGITPENTRVVVELPREVNDANMRRAIDIYQSRRKKENEIFKSLIKEMTDEDERLQKTRLLIEQSPQYLLADFNEKLQKNNSYNDKLEYAATKYRLWLEQDCMDIYSNHPIPFSGLFDENQYDIEHTIPRSIVLQDGLDNKTITSASFNRKVKGNLLPSQLDNYKTVILPNLRPWQERVERLEERVKYWLKETKRAADPDRKNYCIVQRHLWQMELDYWSSKLKRFTITEVTSDFVSKQMADTRVISKYVFHYLKSFFGRVDVQYGSTTATFRKIYGLPEKDRSNHTHHAIDAAMLAMIPTTARRDAMLRLFYQIDEEKKAGHADEAKLLKDVLEQEKKLCLYGSKYAKSSRSRMIDVAYHLKETVMVNHETKDQTLTPARKRASIKKKGQRINIVKSGNSIRGRIHKDSFFGAIKPWVIDKDGIFLRDEQGQPYATAIKYVKRYKLQCGEDFDSWEKLEKRIVDKALFRQLKEQAQGLSFKEACAKGFYVSRKVNGRIVTNKIRHVRCEIPVNLSHLPTKKHIFMSSKEYKQFYYAESADLQYCCEYMGSNEISYVSYTLYDISMNMKKGEEAFPKNILGKREQLYLNRVLTKGDMVLLYKESEEELKALEKSQLAQRLYMISGFEKRKERTDTIKLVKHNYAAAKDEGRGKSIANFDEMILQNKIQMAINKVKFVQIQLL

SEQ ID NO: 2827 - protein, 979 aa, unidentified
  REGION 1..979: note = Description of Unknown: Cas Enzyme sequence
SNIFRFNDEQTKQYRLMYADIRQGYAMLSHKAIANINRLLRKGYIYSDAVSFAKIPDLIKEQVSDEDLEDMVREFNDVVKPEITRKSFICKISNKLIAEYKSTPENERFAEHPEHNGVYTLQKDDIKDVERMVIKYIGQKQWNLMSADEQEPILKDVEEQYQDFFNSKERNYFDVPNMTDGIIDIVIRRYPHTQKGVLKEKLYHPSLIDMYKFTRKETDKHGRSLLGKPNVGSIKNPTVMRTLNILRKKINYMIKEGLIDPEDTRVVVEMTRINNNTNLRWAINRYNEERRNQNEEIKKLLTEFIPQFKNEKPKERDIDKARDYFDQVGSLFYSNKHDDLNEKKLAEKEEEYEMIVTKNKILRFGFQKDVHKYNLWKDQGCISIYTGKPIRFSDLFDDNKYQIEHTIPRSISFDDSDVNKTICERDYNTSIKGNKIPTELPNYECDWENNGIIYTAIKPRLAYWEKKVKDYSRQVELWKFKAKQAPTKDKKDFCIQRMHLWNMELNYWRNKLERFKITEVSNGFRNSQLVDTGIITKYATLFLKSVFKNVDVQKGSATAQYRKMLGFQSIDEKKDRDNHCHHAVDATMLTVIPVASQRERMLNIFYDIEEKKSMGQDYAQLQNQLKTEINSCEIGSVAGLYDYISSNILVNHITNDRTFSDTHRRLYQNGRRMVKNGKELYAGGDGVRGALSTASFYAANKYGEETWMVKRQGITDFKKIEELDSIVDKDLRKNIKATINRRMEKGDSFVKAISQPIWLTDKEGHEIKFDKNGRALAPIRHIRCRAKAGKGFLSYEKAVPIKDIKQKSEKKLVNLDNRNHKQHIYAMNDSMYLCLMYEGIKKGMVDRRFSLISLFEATQLIGTSESKDIEKFLRNEPLYKTLTDKKITYNLSAIIKAGTRVIFWDKSPEEISADMPKDELSKRLYVVRKFNFAGVIYIYIKHHTDASNAEPKKIGANQFNCLIEHRDFEIDPLGNIHFK

SEQ ID NO: 2828 - protein, 1146 aa, unidentified
  REGION 1..1146: note = Description of Unknown: Cas Enzyme sequence
MKQKILGLDLGVTSIGWSVLEVDEGKQDFHLMDVGARVFEAGLEGDIERGKGESPCAERRRCRLARRNLKRRRMRKRELANLLQGNGLLPSDKPLAQAIQEIDAAELTRLLREQPKDMPPVKHLPQVLPYYLRAQALDRALPPHLLGRAIYHLAQRRGFFSNSRLQASLDEEDEEKTGEVKRGISELRKSMEAAHARTLGEYFCRQNPSERKIRRLWTDRAMFLDEFEQICRAQERDQKLKEILFGEIEDPHPRKSAQGAKKKRTLKELIYRAIFFQRPLKSAKHLIGKCSLEKDQRRAPLYHPDVERFTVLQMLNHLRVENAVLKEVSKDEAKKLKENLKREKASYFEKKKELETKWGENKKHLKRLLDIEKVFLKNQCDSLKGLTYREHPLSPEQRKTLMEALCGHGDLLEKSGKLSISKAKTILNLGKDDHFSLEKGGETHLPGCFFEWRMRGIFQDRWNAFSAKEKEAVLQDLRSTQKKETLRKRAQKQWNLNEVLARAFADFPLKDGYAKLSLKAIRTLLPALEAGMDYSEARKERYPQSFQSGKMQDVLPPVASFLSDLRNPLVNRVLTQLRRVVNAVIAKHGKPDLIRIELARDLKNSAKERERISETARDCEAARDAARDLILEEFPNSTPTPRDLLKIRLWQECGNICPYTGNHIGLAQLLSGEYDIEHIIPFSRSLDDSFQNKTLCHAEENRNVKQNKTPHEAYSANPKKYEEILQRVRRFKNSGKLERFEMSDNAKIDEMPSRLLNDTRYASKLAMEYAGALFGGVKDANDKIRVQACAGAITALLRKEFGLNDILGDGVKNRDDHRHHAVDAVALALASPAQVKRLTDLFKHLGLKDRQRLFKEAWLKTGSEAFLQSVKEKVKAVLASHHAPSRIRGPLHKDTIYGFDRKKDGTISELPTGMRHQRKELGGLSKKELLGEPGDKTFIVDPIIRKIVRDAFTASGKTDIDQCFNKTNPESFPKDHQGNSIRAVRVCCIENTTLIGSGDTGRHVKLAGNHHVEVVAVLDVEGNEIEWEGHIVSQLEAHRRKRVGEDIIQRAWGKDDQGRVRKFKFSLTQKDVVRFKPADTSDSDYFVVRAIETKGRLSFVRLNDARLLKKLKDEGALILSNIDPLRKRSAEKFKMTPLGELRRAHD

SEQ ID NO: 2829 - protein, 1025 aa, unidentified
  REGION 1..1025: note = Description of Unknown: Cas Enzyme sequence
GTGKSRNVERREARGVRRLIERRARRLQHLSGLLQRHGFLPGDCDVKDPLQRHLLFETLDSQLASPYVLRAKALDERLEPYELGRAIYHLAQRRGFWSNRKSPVTDEKEEKGMKKEISDLDRKIKESDARTLGEYFSNLDPAVEPIRGLHTSRKMYAEEFEQIWSSQSRFHPQLTDPAFKKAVYDFIFKQRPLKSHLIGECELEKGRRRAPWALLSAQRFRYLQKVNDLQIIIYETGECRELTEDERKLLIENFENRGDLEFKTMKGKKFLNLPKTAKFNLEEGGEKRIPGNKTSARLIKIFGNERWNGFTEDERNQIVEDYLSIVKNETLKNRGRTKWGLDEKTAEKFGETSLEAGYCRYSRQALAKLLPLLQKGVQLQIAEKAIRQNYWEELLALLESGKPIHDAIELLEKHYPERLERLEKPWDLLPAVPDYMRELKQNPIVHRALTELRRVVNAIIKRYGKPDIVRVELGRDLRKSADQRQEAIAIINANRVKRDEAKTQIAEYNGDENPSERDILKVLLREECGGYCPYTGKPISMGQLLGEFTQFHIEHIIPFDRCLDDSFANKTLCYHEENQKKHNRTPYEAYHGTEKWEEIIERVRKFNVVKFKVAKSEGKKPYAVKIEKGVTNDKLGRFQMEPEEVEKLIGDFTTRQLNDTRWAAKMAKQYLGLLYGGVKSDGIDASGKRRVQVGNGQVTGFLRREWGLNKILGDGDFKSRDDHRHHAIDAIVTALTDAGKIKALSDASKRGQLYGRKFMEFPPPWEGFHRDVQNIIDKIVVSHRVSRRARGALHREKFYSPPKEDKNGKYVTIRTPLKDLTEPKVEKITPDYVRELIEKGLCGKSPQDAFKDDKDHPSITGKNGKAIPIHSVTVKRYTQEVFGVGESEQRRRYVFSKDIHHMEIFKDDKTGKGDAEVVSMFEAYQRKGNKEPIIKKDFGAGKTFLFSLAKGEIIKLDNADKGWEGLYVVRKLERPHKIQFAPINDARKLEDIGRKGHTATVETLKKPKCQKVVVTPLGEIRDAND

SEQ ID NO: 2830 - protein, 1055 aa, unidentified
  REGION 1..1055: note = Description of Unknown: Cas Enzyme sequence
LKKILGLDMGVASIGWSLIEYNQDDEGNIIDSGVRIFDQNLQRDNEAQKGESKNQQRTLHRGMRRQRDRKRRRKRGLYYSLKGVRMCPVKSENEEWNKWIDLNPYELRTKGLDEQLSLMEFGRVLYHLNQRRGFKSNRKVGKDSEDGAVATEISKIRAEMKKKGMRTLGEYLFSLQENHFDPPVSPNHDDYEFKRRIRNKYTHRNMYEEEFELLWEKQTQFYPQTLTEKFKAKLSDDTIFFQRPLKSQKHLIGKCSLEPDKKKIPKGHLLFQKFRIEKTLNNLELMGEYGQSLDMTDEHKKIIREKLERSDHVSFSQLKKDLGFNSNAKFNLETSDDSKLKGDTTSKKLSSKNAFGKEWYGLDEEFKNHVVDVLIHVEKPDVVEDLALNKWGRTKEQANHLKMLQLEKGYGNFSYKVIRKIMPLIKEGKRENSAIKEVYGEVKKTPKEDVFQLPLLDPKDYRNPVVFGAMVELRKVVNAVLRKHGLPDIIRVELARDLKNSKKLRDEITKKNNKLEKRNNEAIKALKQSPFNYQNPSRTDIIKYNLWIECNKTCPYTGRVINGEALDRGEFEIEHILPFSRTLDDSYANKTLCESDFNRRKGNRTPYECVEAGLLSKEELEQRIKNNLPWRKRRKFTQKTIDTDEFIARQLNDTRYMSREASKYLKQLGSEEWPVVIQVTKGQTTSLLRHLWGLNSILSIENDEIKNRDDHRHHAVDAIVIALTSRSILKKLSDENKLIETENWMDEEESSVDRNRQIKDRASKRITNTPPWDTFWQDSQESVNQIIVSHKVSRKISGAFHEETYYGSTEESSSKKDHIKYLVVRKRVEALSEKELGWNSKTQTFDKEGKVFIRDEHIKKIVRDKIWKKYKETGDIKKAIAALETDPPKLFHKNGKDFNLIHKVRLLMEKDLSKMNEFEDEPKTPTRYALYGNNHHIAIYEYTDKNGNKKQTGEVIPTMEAARRVLDKEPIIMRDHPDYDRFLFSLSTNEMVQDAEDNIFRVQKISSDTQMTFRLNNIALKGASDPGVLRKNPSSVASLKKVRIDPIGQIFPAND

SEQ ID NO: 2831 - protein, 1384 aa, unidentified
  REGION 1..1384: note = Description of Unknown: Cas Enzyme sequence
MKKILGLDLGTTSIGWAFVKEAEDGDHQPSSIVKIGVRVNPLTTDEQKDFEKGKSVSVNAGRTLKRGARRNLQRYKQRRQNLINILKKARIIDADTILAEDDKNTTHATYQLRAAAATGEINKAALARVLLMINKKRGYKSSRKAKNEDEGQLIDGMAVAKRLYEENITPGQLCYKLLKEGKRNLPDFYRSDLLAEFNKVWDFQAQFYPDIFTLEFKKDIEGKGQRATSAAFWTRYKFNTAENKGTRDEKKLQAFKWRSTATGKQLSAEEAAFVITEINNNINSSSGYLGAISDRSKELYFHRETIGQHLYKQLKQDPNTRVKNQVFYRQDYLDEFEAIWETQSKYHKELTVELKQEIRDVIIFYQRKLKSQKDLVSFCEFESKIVEYERDGNKIKNAIGAKVIPKSSPLFQEFKIWQNLNSLLAQNKKTKEILPFDLEAKQLLFGTLNIKGNLKKEQIFELLGYKPKEWELNFVVVEGNRTNQALYAAFIKMMEYEGHEDIDPELLTASEIKSAVQSFFELHEIDKGILDFNSDLEGKDFERQSAYLFWHLLYAYEGDNSNTGNDKLYELLKSKFGFKPEHAQILANINLQQDYGNLSAKAIRKIFPFIKENKYNEACALAGYNHSSSVTKEENENRPLKEKLDLISKNSLRNPVVEKILNQMVNVINAVIADPALGRPDEIRVELARELKKNAKEREAATLQINKAKGEHDEIRILLINEFGVKNPTRNDIIRYKLYDELKFNAYKDIYTNEYISREELFSSKYDIEHIIPQSRVFDDSFSNKTVVPRAINLRKDNATAHDFISNDYGAEKLNEYKARVEAFIKFYPERKAKCKKLLMAGENIGEGFIERDLRDSQYIARKAKSMLLEISRHVISTTGSITERLREDWDIVNVMQELNMDKYRKLGLTELVEKKDGNFKERIVEWTKRSDHRHHAMDALTIAFTKRQHIQYLNNLNARKRDDKLGKEIQGIEKKYLHRDEEGRLRFNKPIICFREEAKSHLEDVLVSCKAKNKVVTKNKNKTKSAKGDKIKTELTPRGQLHKETVYGKIRQYVIKEEKISGKFDEETIFKVSKPQYSTALLKRLNENNNDPVKAFTGKNSLAKTPIYLNSEKTIQVPEKVKLVWLEDDFTIRKDISPDLKIEKVIDIGIQNILYKRLEQFNNNPKEAFSNLEKAPIWLNKDKGVSIKRVTISGVKSAEPLHFKKDHHGENILDDDGKPTPADFISTGNNHHVAIYHDEDGNLQDEVISLHKVITERVNQGLPVIDKMYNEHLGWRFLFTMKQNEYFIFPSSDFDPAEIDLLDPKNSKLISPNLFRVQKFSKLSYGNSSVREYVFRHHLETSVEEKKELKDITFKNIKSLSYLENIVKVRINHIGQIVKIGEY

SEQ ID NO: 2832 - protein, 1203 aa, unidentified
  REGION 1..1203: note = Description of Unknown: Cas Enzyme sequence
LNPSLDLDYTNHYQQKYIVKRKVDMSKKLSRRYEEQAQEIRQRLGARPYSIGLDLGVGSIGIAVAAYDLKNKQPSDLVFVSSRIFTPSIGASERRQKRGQRNSLRHRANRLKFLWKLLAEKDLMLPYSEQDVPDPARLRFEDAVVRANPYALRLKGLNEQLTLSELGYALYHIANHRGSSSVRTFLDEEKSPDDKKLEEQQAMTEQLAKEKGFSTFIEVLAEFNANGLVGYRNSESLKGKGVPVPTRDIISNEIDILLRTQKQFYPHVLSDDYCERIVSAMLYENEKIVPEAGNCPYFPDEKKLPRCHFLNEERCLWEAINNARIKMPMQEGVAKRYQSESFSDEQRHILFHIARSGTDITPKLVQKEFPALKTSVIVLQGKEKATQKIAGFRFRKLEEKPFWKRLNEEQKDDFFSAWTNTPDDKRLSNYLMGHFHLSEAEVVDALKTVSLIGDYGPIGKTATQLLMKHLEDGLTYTEAIEKGLEDGELQELSAWQEHALLPYYGQILTGSTQALMGKYWHSAFKEKRDNEGFFKPNTNSEEEKYGRIANPVVHQTLNELRKLMNELITILGDKPKEITVELARELKVGADKREDIIKQQAKQEKEAARAFSEYCEPNNLDKRYIERFRLLEDQAFVCPYCLGHISVADIAENRVDVDHIFPRDDTADNSYGNKVVAHRHCNDIKGKRTPYAAFSNTSAWGPIMHYLDETPGMWKKRRKFETTEEEYTKYLQSKGFVSRFGSDNSYIAKAALEYLRCLFDSKNCSAVGSLKGMETSILRKAWNLQGIDDYLGSRHWSKNDEASPTSRKNRADNRHHGLDAIVALYCSRSLVQMINTMSEQGKRAVDIEAMIPIPGYTLEPNLPVADQRELFRKKILEFMELHAFVSMKTDNDVNGALLKDTVYSILGADLQGEDLVFVVKKKIKDVGVKIGDYEEVASTIRGRITEIQPKWYPEELKEKIKQLQAKNETALQKYKDSLVQAAAVLEESNRKLIESGKKPIQVSERTISKKALELVGGYYYLISNNKRTKTFVAKEPSNEVKGFAFDTGSNLCLDFYHDAQGKLCGEIIRKIHAMNPSYEPAYKKQGYSLYVRLYQGDVCELRASDPTETESNFAKTTQVHVPNAKIGRTLIIINTFTERAAGIQIFFSNLAKSKTGQDASFYISTLKNYDVRKVQLSSAGLVRYVSPLLVDKLEKDEVALCGE

SEQ ID NO: 2833 - protein, 1193 aa, unidentified
  REGION 1..1193: note = Description of Unknown: Cas Enzyme sequence
MEKKLNRKWEGCDFMEKEKSRIYQDVASNIKNRLRDRNYSIGLDLGVGSIGIAVVAMEPNDKGINYPTELIYANSRIFTSSKGAAERGQFRGQRNSIRHKAHRLRKLWQLLATRGFMKPYSSEIVQDPAILRFSNEMIKSDPYKLRLKGLKEKLSTEEIGVALYHMANHRGSSSVRSFLDEEMTKDEEKTEEQINQTKSLAKKYGVDTYIEVLNCFNMDGIKGYRNKNVRATNFVMPMPTRDIILKEFEKFLDTQKQFYPSLLDPDYISQIRDIIFYENPKIVPEVANCPYFPEEKKLPKASFLNEERRLREALNNVRIMMERQTEAGHIYSEKITLEKDEKEKLFNVLRDGTDISPAYIRKVFPKYGKLKNENILLQGSDKKNTNIKGFRFKKLEELSCFKELSDNDKDKYISLFVNTPDDDSLKKELISQLGFSEEKADDAIENTPKLIGDYAPVGKTAMLLLMPFIEDGLSFHEAEEQALKEGILYSNTDKMVYDYLPYYGEVIPNSTQTLVGKAWHSSFQEKFKGKGFIKPHTNPDEEKYGRIANPVVHQTLNELRKLVNEVIEIMGKKPSEITVELGRELKLGQKARDEYVLDNNKRLKENEKIYKEYCVPNNLATKYIKRFRLLEDQNYKCPYCLNAINSDDVVLGYADIDHIFPKEDTADSSENNLVLAHKHCNEEVKKKQIPRVAFGADPVLWNKIEQFLDNTPKMKNKRWRFELTEEKYQDYLAKNTFLNRFKSDNAFAARIACEYLLSLFPAEKKYTAVRTIKGAETAALRRSWNLNGITQLLASFHLMEENDDFVNEKNRLDARHHALDAIVAAYYSYSVKQMINSISKEGSNQKEISKRVPIPKYFRINNNLSTTEQRNDFHDYIENFLISNTFVSRKVDTDRNGELLAATQYSILATKDDNLILFTKKKLSDLKASTFLGNKSGSVEYTLKGNFPKPKWLTAEQNEQVEKYLEYNRQLFTLVLSNKDKAKKELEDDNDKKVLIGKKTVSIDEKRIVEKALKLTGGIYYSLTNNQRKKIFVSKEPTALEKGSAFDTGENFALDLYHDEHGKINGEVIRKINAVNKKFIPEYKKKGFKLYERIYPGDILEVDYVPRSPVNAKNDFVKGIVSPNAPQGKTFLVVKTFTENGKSIQVYYDSLMASKVGQNGSFYTAGLNKLNIRKVCLSEAGIVVYRSMLLKDL

SEQ ID NO: 2834 - protein, 1084 aa, unidentified
  REGION 1..1084: note = Description of Unknown: Cas Enzyme sequence
VSAKYAFGLDLGLNNVGWAVIEHGDNARIESFGTYVFNSPLTEDSDATSGLKSRDRGMKRRSRRTLKRRADRKKALYRLLAEKGFLPLAEEARVEMFCRHRENGIEVHPYALRAKALTEKLEPFHVGRVLCHLNQRRGFLSPRDLMLKGVGAQTDAKFDTDDEESGLVKGEIKQTREAMEGFPTIGAFLANRMRHGEPVRKKTKKHRQDVSKEELKQRFVRHDRAMLEKEFHAIWNAQSKHHPLLTPELKRQVEDLIFHQIPVGAQIGLRGKCIFFPEENRIAAASLTAQKYRIAQDLAHLQIKPKLNSEERPLSPAERQTLANLLMKGDDLSWTDAKSAIVRAQQKGDQGDDLSRPDAENAIELPTARFSVEPSGTKPKSGEKEKLKGCKTALDIRKVIGEKWDQLGPKGQENLVGILLTVQNDPIYIRENGVKKHNPKMKPAAARIYKFLRERPIGPNKVQLSESEAANLATLDLPKGYLNLSLKAIKKIMPHMLRDKVYSEACAAVGLNHTNPDATGEIFDLLEPRMAEGIRHPLVKCSVYSAIRVINQLIKRYGKPAAIRIELPRDLAKSAKQREEETEVMQVKEKIRKRHRELLAEHGIPINERNLKKVALWYECGTKLPYEPDVTIGSVKDLCESDIEIDHIVPRSHNFDNSLSNLALCTRDFNLRIKKDKCFYQAIQEYNPELWAKIVTHVKELKPDYLISPNEKEKEVLGKLAKQSSFKRQRILAKDLPEGGFTGRHLTATGYIAKEILAMVKHLGPIIEEVPDPETGEIFEWGLAVDVTVTQGSATGHLRGLWGLNKVVPLHPSEYDEEGKPKPGKSRSDYRHHAVDAVVIALTDRSAAMKVAAFYKAKELQQPDRKPIESPIPNLREQVEKMIPTCPVVHRPDRRASGQLHKETAETPGPETPGGKPMERRVVGNKLVCYDGQGRPAQAYSLGNNHHMVIWECLTPNKKGAFERRAEVVPCIEAVQRRQRKEAVIRHKAAPQGWRFVMSICKGDMVEMADGTIGVVSKFSAEANSAGVYMVVWRPYVAQQLGKVNPENPYMIQSVRSSAGLTNVRHRIVHNVRGETVFSEGLDD

SEQ ID NO: 2835 - protein, 1018 aa, unidentified
  REGION 1..1018: note = Description of Unknown: Cas Enzyme sequence
MDQKLIFGLDLGINNVGHSAVRVSEDAVDIEHLGVYAFASPLVDDNDLKAGYAAGQRGMQRRARRTLRRRGDRKRLLYYILAQHGFLPNDRRAREILLCKNYHEDRPFNAYILRERALKTALTPFELGRVITHLANHRGFLSPRAQRLIGVAEDLLANSSDGAEETGKLLKEIQSTRKAMEASGASTIGAFYAERLRQNKLIRSKTKSNRKIGGERNKDREVFKGKVLAERLVRPDRHMIRDEFDKIIAVQRQFHPLLTESLVAQIKNAIFSQRPIEGNVDRRGECTFFPAEKRMYRASLAAQKFIIAQNLANLELTEQTGNPRKLAKEERKALCDALIQGADLEWSAVKSIIGVSPLAVFNREPQRKTKGKLDKLKGSATAKALHEILKEQWEELDYEARVQLVGDLISFAETKDSSQAERRYKLLQRKTYGPLATSFPLNAIAELVTSELPKGTLNVSLKAARMLTPLMLAGMTYDEAALAKGLNHTQPRGLQQKVQRLDPTLAQSILHPGVRSSVQNAFRVINAMLDRYGTPDAIQIELPRDLARSLSDQLELEIENRKREKVKVIARQRLVEAGLKPTADNVKRVLLFNECDGGKLPYEPGRIIASLQELCSPDYEVDHIVPQSHQITDAMSNFVLCTAEVNRRKGGQTPFEFFSSDEEYWKKVQVTVKSLKNMPYGKKQRILAEKRPEGFIGRHEAAIGYISKEILSAVKTLEGSFDVVVSPGQATWMLRRRWGLGRLIELHPEEKSKLDRHKEAVERGEEFGDPPKFRSNFKHHALDALVVALTTRSNLLKITNYYKEKETSGVRPEQGFPLPDPDLISKVQNALSHCIIVHKPNRKLEGQIHEQTALTPASDVPPGRPNSAMRIGRQLVRFDSDGKPSQAYDLGNNHHVAIFEASDGSGKRVAEVRSLSQVYERRAKKLPAVEPECSRPGYRFLFALCKGDMVRMSSGELGVVSKFSAKAKWGDAEIVIRKTLSAQKCGNDNADNPYVVANIQTSPRLREISERILMQPLG

SEQ ID NO: 2836 - protein, 1005 aa, unidentified
  REGION 1..1005: note = Description of Unknown: Cas Enzyme sequence
MENYILGLDLGTNSVGWAVVECDDQSKPIALADFGVWIMADDSIEQDQTDGQVSTQRRQRGLVRRARRNLRRRRQRRNKLLSILLRVGLLPEDEKQRVDVLNEFGTNDNPQDPYSLRAKALDNPLQKYELGKVLYHFVRHRGYLSTRDLIAGKETEPTAPKTGKELTEQEKEEQGILGAITRTKQHLKEANARTFGEYLSRFSRDRQTLIRTRTKDGRKGGIRGDRWLLRDEFNKIKQAQADHHPQISPYDWEEIECAIFDQRPLSSKAHRKGHCSFHKTHKRATKASLVFQESRIWQLISTLKIVGPGFQDGRWLTPQERQSLFEFLNERDKASFREVADFLGFGDRVRLKGCDDDGVPTIRVNEIKGNQLNALFGKAIPEHWYKWTYEQKERFLNEFTTLRTASAKHKRMVEGWGLSEDEALAVLDLRLPQGYGKLCAKCLRRIAKAISQSEEHKTYNQALEEYGKRHTEVVDDFESPKLIPFFVRNLNNPVVERAVREAVRVIASAVRAYGKPRIIRIEMPRELSKSNKERQESFRIQDENWRKRKNAEKQLIDHGMPVTETNIEKVRLLLETDMRDPYEPGKQYGVRDLNELEIDHIVPRSISLDNSWTNRTVTHKDNNLQKGNRTPYEKWGQDPKRWAEIEQHAKHLLKGKTGISKQKVERILSSEKSSGEELIGQALSDTRYICRETKRFLEACGFAVEVGNGRITAELRRRWELDKVLPLSEDDRNAIENRKQKNRFTFPKNRSDHRHHAIDALATACTDRRMVQALARYFQDREGKCSQVKKHIRLPKPWPNFTEDAKKKIENARVAIKPTRNVRGSINELTALKPVSEEEFLEVLKNAPKEARERAKRALIANGKMYVFGRDGKPYKMYKLGNNHHCVIWERENPKKPGQVERDLTVVTMAEALHRVRKDPRSLFVSEPPGPGWRQVMCPCKNDMVEWEGDNPGVYMVASFSVPIDMFLRFVYKAKADKRKDLRITGRQHLLKIRSIVSPIPIIGV

SEQ ID NO: 2837 - protein, 1020 aa, unidentified
  REGION 1..1020: note = Description of Unknown: Cas Enzyme sequence
MGKFALGIDLGSNNVGHSLVLLSEEELEIETLGTYVFSSPMVDPNDPEAGYKQGQFGLKRRQMKTIRRRAKRKLKLYRLLIALGFLPADRKERDRLLCQGKTENGSFSPYILRAEALERRLTPGELARVLTHLNNHRGFLSPRAQRFISVDPDMVRDLSSDDEETGVMLGQIKKTREIMEAAGFRTPGQLFAAKIKQNELVRLKTKVNRKVGGKRMDEKVRAAKNDALKKEIKNRIYLRPDRFMVRDELRAILEIQSKHHPILTQTVQDQIVEIVFMQKDIREDKDRRGFCTFFPDQKRIYRWSMAAQKFDIVQRLSNLEVIPPAGVARRLTSEELAILTAQLMTGGNLRWARAKELLGLTDDHHFSREPLDKKQKGTLQELRGNQTAAVIKDNIGEKWDLLDPEAQLELVNDLTANENKRGATSKRYQLLKSKTYGVASVRFTPEEAARLATLELPKGTLSLSHKAIRKILPGMLAGLNYAEACARIGLNHAEGKRSGKVSRLTPDLADGILHPGVKCAVINAFRVINAYLDEYPELKEIHVELPREIARSAKQAAEEEKRQKDRETDNKKIRAMLLEAKLAPTGVNFDKAKLWVETGGFLPYDPERGPITLVEACSADYEIDHIVPRGYELIDGFENKVLASVQDNREKGKRTPYEAWGKSPRWPLIVAGLRALKGMSLRKKQRIQSKEVQEGFSDRFLTATGYISREILSALQRLDLDLDITVMPGRSTAFFRRRWGLDTLVPLHPEEEAKLEKRKALIAEGVDPGPMPKFRSNYLHHALDALVVAVTNRSLLQKLSKYFQEEDEVRADKIHFPIPDPNLREKVKKALEGAVVVHKPNRKLTGPLHEETARKPSEDVGPGKPLGVVMYQGQMVRFDRDGKPSQAYDLGNNHHVAIWEGPDGKRYAEVRTLFAVARRRSQGLPAVDPTPPMSGYRFVMALQKGDMVQMEDGQVGLVSKFYSPDLGKATLCIWRPHTAQQLGKINAQNPYLVANLTVLTRISHRVVLDPLGRVLKTEGE

SEQ ID NO: 2838 - protein, 1026 aa, unidentified
  REGION 1..1026: note = Description of Unknown: Cas Enzyme sequence
MTSRGRTCILGLDLGTNSIGWALVDEAQQEVAAMGSRIFSTPMEPDKKDVPKNAARRAKRAARRLTRRRVIRRNQLLTLLRQHGMIPAENQADWHQIEPYALRAKGLDEALTLEEFGRALFHLAQRRGYQSNRKSAGLSDVEDPAVQEIIERKEAEERLKELEALQKKREKAAAKGKDPNAAEDEKVVLAAIAELKQILDSQGMRTLGEYFHHRLQKGLSVRRTYTERGMYQHEFEALWTAQTRHHPVLLDDELRAQFFHAIFFQRPLRRAAGVVGACQFERCRNRAPKANPIAHEFRIWQQLNHLLYLPEGSSDWVALTQDQKNTVAAALQEAKELSWSKFRTLTGIKKTAQINLEPNETERITGIKSLSGNATHIELQRRTNERWSYMTEDEQAALFEDLHTIDHKGKLVRRLRQHWQLSPIETYDLATLELEMGHAMLSTRAMRRILVHLKQGLNYHDAVVAAGYAHNYQKEVSVKAELPEVPKSITNPVVRKALNETRRLVNAIIAEYGLPQAIRIEMGRDLALNKKDRQEIEKANRRNAELNQQAKAACQAQGIAHPSPTDLQKYRLWVECNGVCPYTGREIGLHQLFTQDIDIEHILPFSRSQDDSMANKTLCYARENREVKRNRTPYEAYGDTPQWEEMRQRVARFKCGRHKKKLFSLQEIPTDFSARQLNDTRYIAKQVLQYGQDLGCEVTVTTGKATAALRHHWGLNPLLGEDGQKNRLDHRHHALDALVVAFTTLSLYQKIARAAQGQMGGYFDGTWRAPEPWDGFRHDVRQALDKVVVSHQINRKVTGPLHEETAYGRHKQDGSFIVRKSVNSLTANEVERIIDPTLRERVQAWIEEIGPKRQASESFFFVNRHGEKVEVRRVRIRARAADPSKMFSIRDEGGQPYKYHPYGSNHHAVIYEHKVTGERSAEVVTMAEAARRGAQGEGVEQPRPPVGWRTVMVLHNGDVVRWEDDELYRVTTIAAGEPVFMRLQFITYAKPTLLQQYDRVVTNPTGLRRLVERVRIDRLGRVWPDP

SEQ ID NO: 2839 - protein, 1505 aa, unidentified
  REGION 1..1505: note = Description of Unknown: Cas Enzyme sequence
LKKILGLDIGTNSIGWAFIESNGYENPTFLNGKILKIGSRIIPMDADTLGKFESGVKVETKAANRRSARGARRLNHRYKLRRTRLIQALKILNWIPENFPLEFKKLKSHNINDFLPFSDELKKEANSYFQTDSDNNLTEKNYLISEDWIIYFLKYKALNEKITLNELSRILYHYNQRRGFKSSRKDNQSEEVVKTTKSQEKFIEIIDVISIKDLGRGEGKFSDFTIYELLCKSSHGEFKTIKYRKNPLDWVGKSIEVEITKETLKDKTVKYKIGEVDPMDWTFRKKALEKDLLAKNLPISQYYLQNLREGFISKSNPYTIKQRIVDRIFYQNEFKLIWENQKKYYEEEFQDKEKLEKIADAFYKHNLQKNKELKSRDLLHIFFNDIIYFQRGLKSQKGLLANCSYESKTYKNLENKTEYVGLKVTSKSSPLFQEFRIWQTIHNLKIRKNEELGNGRNNFDLDVTDQYLSKQKKEELFEFLDSKLEASGSDILKFLGFEPKKINNEILFDFSLNLPDDKIIYGNQTKALFRKVFKKHDFIIEGENYLNNLNLFTSLWHIIYSLPSENDIKNALNNKKYFDIPEDIISDLSRLPEFKSDYASYSSKALKKLLPLMRVGKFWDESQIDLKTKSRIQTILDGVVDDSISPQVREKILSFKPFDFHVISDFSGLPTFLAAYVVYNRHSERENEEKYQSPDDLNINTLLPNNSLRNPVVEKVIRETLKLVKDIWKNPELGRPDFIVVELGREMKNNIKDREAISKNQLNNKIEKERISKLLKELKIPNFNPDSHTDLEKFRLLKDSSGLVGEEMFETLFKRNNSEFIPQADIEKYRLWADQSFRSVYTGLPIPLSFLFTEKYQVDHIIPRAKFYDDSFANKVVVEAEVNALKGNSLAMMFIEDFQGKNISLTDGRKVQVLSLDDYKSFLDKNILNKKKKKYLQLYQVPEGFIERQLNDTKYISKTVSQFLLPVARGSEKDQGVIFTSGNITSDLKNKWGLNTLWKELLFPRFQRLEGILNEPLIFPKENKPGDYYFGKEYKRIDHRHHALDALVIACTTRSHIKYLNSLSSFSNDIKEIAKNNEWKKWKYLLSKKKQLENKEVGMTEFSLPWDNFYLETKEAMEGVMVSHKPSPKLISKAFNKYEKWVEVEPEKWEKKLVDQLPPQNEDKYWVTIKQSLFGQPLGKIFIADYKKNVSIENAIKNQINFESQEFKNWNSEELRIALTPIRRIVNSIIKKYEGDEKSIMEYFTKNPLRNPNGTIIRELDLLSFKKYASKRVNLDDTFDIKKIDSIPYSNLENSWLPQLLKEHLKDNQGKPEIAFRGEGLEVLAQKTPNKFPIKKVTTTEGGVKIEKNNKLLEGDKGVNQYFIIEIKKAIDKKTGEEVETRTYSTPNFLDCIERLAKNQPIHDNKPDVKYIVLSPGDVVYVPERGQKADKIDWTDRKRIVERAYIMKSSNTSTCYFLPVYVSSLIAKGEFESLGKSEKTKEGDQMIKNNFIKLKIDRLGNFLPI

SEQ ID NO: 2840 - protein, 1394 aa, unidentified
  REGION 1..1394: note = Description of Unknown: Cas Enzyme sequence
MKKILGLDLGTTSIGWALVKEAEIAEEKSSIIKLGVRVNPLTVDEQSNFEKGKAITTNADRTLKRTARRNLQRYKLRRENLLSVLKENGFITDDSVLCEQGNRTTFETRLLRSKAATEKISLDELARVLIMINKKRGYKSSRKVNSGEEGSLIDGMAVARKLYDEHLTPGQYVYQLLCGGKKYIPDFYPSDLNAEFEAVWNCQKQFYAEIFTDELREALRSKNEKQTWAICAEPLGLKGIKRNGSTADQRVENYRWRTEAISKQMPLEQVAVVLQKINGQIAGTSGYLGAISDRSKELYFNHQTVGQFQMKQLSDNPNTSLKNQVFYRQDYLDEFERIWETQAKYHSQLTAELKHELRDIVIFYQRPLKSQKGLISYCEFESRQKEMVVDGKKKTITIGLRVCPKSSPLFQCFKIWQTINNLQVTGEVVPKTQTDLFGDSTECEHGTRTLTEEEKCDLYRELSIKESLSETEILKLLFGSKKGLSLNFRKVEGNRTMALFVRACQTVLAINGYNDYDFSKMSYDKAMPIITQVFEALGFNTSFLTFDPTLDGKDFERQAAYQLWHLLYSYSGDNSATGNEKLIERLCAILNMDRDSAAVFASITFEPDYGSLSAKAMRRILPHMMDGLEYSVACEYAGYRHSRRSLTKEEIAAKPLVETIPLLPRNSLRNPVVEKILNQMINVVNAVSDRYGKPDEIRIEMARELKRSAKEREKMTRDIARATAENEKYRKILQEKFNKQNVSRNDIIRYRLYLELEANGFKTLYTQTYIPREKLFSKEFDIEHIIPQASLFDDSFSNKTLEARSANIEKGSTTAYDYVLTKYGEQGDNGSVKYKERIDSLYKEGVISKTKHDKLLMTTAEIPNGFINRDLRDTQYIARKAREILESAVRVVVPTTGAVTDRLREDWQLVDVMKELNWDKYDQLGLTEIYKDPDGRQIRRIKDWTKRNDHRHHAMDALTIAFTRHSFIQYLNNLNARSDKAGSIYAIEKKELYRDNNNKLRFVPPMPLGEFRAEARRHLEDVFVSIKAKNKVVTRNVNITRGADGKKHRTVQLTPRCQLHNETIYGSRRRYVVKQEKVSSAFNEEKISTIGNPQIREALLRRLAEFGGDAKKAFTGKNSLEKNPIYLDDSHTKQVPQKVKTVTLEEVFTIRKPIDKDLNVEKVVDQRVRKLLQERLAEYGGDAKKAFANLDENPIWLNRERGIAIKRVTIYGVSNATALHDKRDMHGKKMLNSNGISIPVDYVSTSNNHHVAIFRDKDGNLQEHVVSFFEATERAQQQLPIVDYEYNKHLGWQFLFTMKRNEYFVFPNEKTGFDPNEVDLLDPKNAAEISKNLFRVQKLATKNYCFRHHLETSSETPKELSGITYKWQLGLKGIVGIVKVRVNHLGEIVAVGEY

SEQ ID NO: 2841 - protein, 1353 aa, unidentified
  REGION 1..1353: note = Description of Unknown: Cas Enzyme sequence
MKKILGLDLGTNSIGWAIRNTDNIDNQIIDKGVMTFEKGVGEEKGIEVPLVKKRTEGRSKRRNYQAEKYRKWEMLKCLIENNPKMCPLTIDELNSWRRYDKTTGRRYPQRKEFINWLKLDFNEDGKIDFENPYHLRKIVAAQKIDNSLILGRAFYHLAQRRGFRGRDEEEAKTIMEGSKETGTVGADAIHKIMLEQNTTLGGALYYDSKNNGKRIRKRYNVRTDFEAELKTICSVQCIDENSELFKKLYKAIIWQRPLRTQKGNVGRCTLEPSKRRCPISHPLYEEYRALCFINNIKIKTKHETESIFEPLSEEQRKNVYGKLFFRKSKPQFEFGDIIKSLDPKKNMYEFNYKENTTVWGCPTSTYIKELFGALEEIKISHVVNEKRSRGKHYYNYGDIWHILFSFDSKEKLADFGRQQLGLNDEQVEKFCKIKLNKGYASLSLCAINKILPYLRKGYIYSDAVYLANVKKVLGKESSDEELNKIVEGIRQQIKLHKEEKDLIGITNSLIAKHLDLEVNERYGRYPEYVLRQTDIDDIEKELINTIGSRTWNGKQEEIKNRFRTKVTKLYQDYLQAPVSRNKSLLFYDIPRKDERIKKYLQNEWGARDKNLELLYHPSESEAYPEAKEKDGKKYLGDPMPISRGFKNPMAMKTLHHLKRLINYLLKLGKIDEHTRIVIEIARELNDANKRKAIEKWQGEREKQNKEFYEAIRETAEKHGLNIDPNNNEVIDKYRLWIEQERQCIYTGKVINCTELFDGTKFDFEHTIPADISFDNELKNLTIADSWYNREVKLKRIPAELPNYYNDTIIGNEMFTAIAPRLKYIEEKVDHYENQIEFWKKESKKASTKDRKDFCIQQKHYNQFELDYWKKKLETFTIKEYKSNWRNSQLRDTQIITKYALPYMKTVFSKVDVQKGIITSEFRKIFNVGFEKDRTKHTHHAVDAAILTLIPSAVKRDKLLKEHFAAMENNTSFHSMPTEWNNFKPQHIMNIEEDTLVNYISQNRTLVPVKKYVRKRGRIQFVKEKLPDGKWIYKRDELGNRIPLIAQGDSIRGQLHKETFYGMISENNNSDGKESLVYVEHVLLKDFTSEKDFKNIIDPVVKKVISETVKKRMGAGKSFKEAIAEDIWMVNKAGNPAKEDKKGNILHPIRHVRCKVVAGRGYLTKALPIKEHVFLSKHEYKQHYYAQNEINYLYLLYEYRNDSEIIKTHRIVNLFEAKQLGIETANELFESHGFKSLTKGREANKKIFELRHIIKVGMHVLMWKESEDELRDLGKKDLLKRLYRVYKFNEISSAGLIYLQYHKEARRDKELGEGDNVFNPGCEQARLRFTANNFNGLIEGKDFKITLDGEIVLR

SEQ ID NO: 2842 - protein, 1438 aa, unidentified
  REGION 1..1438: note = Description of Unknown: Cas Enzyme sequence
MKKILGLDLGTNSIGWAVVNADENGSPVKIEGMGSLIIPMGSDKIDYEKGATITKNADRRAKRSARRMGKRYKMRRNKLLFILNELGMLPEQFQFKNGFPEANKLQELELLPIRKNTLQLDSLQHYELRAKALKEKIELRELGTILFQYNRLRGYAGGGDEEPEKKNSSKDEDQDDKKKYEIRVQKFVIKEIEKSDQTFKAKSGKDKGKDLPVFNITVLDENSEINGTTLLQNLEEKVGQEIELEIRIKRTKKAEIVTFALPQKTNWRKQMEETEKTLKEKGFFPSQLFVEDLRKNRWTKIRNRVILRQQYTKEFDAVWNEQAKYYSFLNECPPETLRKILDYIFPGKSPSQEQLRNDGLRNGLKYIIKNQVIYYQRPLKSQSDLIAKCQFEKDEQVIPVSHPLFQEFRCWDQINRLYITSKQDVWNERKQKNILQYTNRFLSDEEKEAIYNELQIQKQVGFNAVAKIVKLKGDNTEYLNGLNVKAKLKGCDTSISINKVLSKRGINSASVEDIWQALYNNVHEGSEYDENSKRIQSIVSTLPQNIKEEDRVEIALELAQTLKFPRKYASLSKKAIEKILPLMRLNPQSQDIPDVVKHNFGQIHHLLETGEAIEDYLLNDYIIDFVNNNPNALEKGGLMYAFAASLVYGRHTKENIKPQITNYHDIKYDKERERNLRNPIVSQIANETMQVVKAVWKNYKLDPNELEIRVELARDLKNSAQERDKIYKSQIKNRNVNENIKKRLIELHQEVNERNIELYKIWSRQEKTTDKEGKPLVRPKFKNENNPTPDEIEKMKLWEEQQFISPYTLNPIPLSKLFDDRLYDIDHIIPKSRYFDNSLTNKVVCESNINEEKDNRTAWEYISQQNSSLGICSLKEYLGHVNKNFFGQKKRNLLAEKIPSNPVNRQLKDTQFISIAIKDELAKIVGSDNVKTTTGGVTDYLRSHWGLKKLFMNLTESRFKQMELWNLDENGNPKESWITKGFDKKRKRNIYEIKGWSKRYDHRHHAIDALVVALSDNKFIKRLNDLNKYFQDELNKHKGEISFSDEDSLKEAFFKLNKEQRDAIMKEIESSRKFKSPIEDLIPEAKEFLETMIVSQKPKDKLAITEKDGKKQLKIRAALHQETYYGKTNNRDTKTINISLLQAKDIGQIIDKNLQDEIDLHRKKYDTMKEAFSGEGLVAFNDYRIQNNKPPVYKVKVWYSKKETEESGLQQLYSNNPKQSVLTGDNYMFIVMAKKEKRIFDIAPLYDSVALAKELMKTKTVDIEEYKRLICEKIREENADKPDSTLFYLQQNDLVYMPNSDDNILELNADALKEWFKDNDNKKDFANRVYKVVKFTGKDCFFIPNNYAKEISLAKDLSDAEIADLKNSKYKDKKIPKQELNYEEFSSFGNCVKFVPDERFIRNIIDKKNPKPPKIQDFCVKIKTDWLGNVIEFNGLRL

SEQ ID NO: 2843 - protein, 1367 aa, unidentified
  REGION 1..1367: note = Description of Unknown: Cas Enzyme sequence
MKNILGLDLGIASIGWAYVHEAETKKETSEIIKLGVRVNPLTTDEQSNFEKGKPYSVTAQRTLARGARRNLQRYKDRRQKLIEILINKKIISKSDILTETGKNSTYETLRFRSKAAEGKIELDKFARVLLTINKKRGYKSNRKAKGDEEDGTLINGMSIAERMYSENLTAGQICFEIVKKGKLNFPDFYKSDLIDEFNKIWNKQQEYYPDILDSKLYESIKGQGKQSTSKIIYKLKNINTADNKGSKLEKIYKTYNWRVLILEKKLPIEEVAYVIVEINNQIHQSSGYLGAISDRSKLLVFNHQTIGQYLYHRICQSPHNSLKNQIFFRQDYLDEFNKVWEKQAEYYKILTPKLKGEIRNTIIFYQRPLKSQKGLISFCEFESKTQEIITNGKLKKKQIGLRVCPKSSPLFQHFKIWQNISNIKIISKEDDSIINLSLEEKKSLFEELNIKGTLKKKNILNFFHLNDRYYDLNFLEIQGNRTNSELYKCYNHIIEEEGYEPFLKKSGKEQYEQVKTIYKELGIHTEILDFNPELKGKDLEKQDSYKLWHLLYSYEGDKSVSGNDKLILMLKDKFGFTKDQSKHLIKIKLEDDYGNLSAKAIRKILPHLKEHTYSEACELAGYNHSHYLTKEENDKRELVKYLEPLEKNSLRSPVVEKILNQLINIVNAITDDPQMGKPDEIRIELARKLKKNADERARYSKSIYENTAKNEAVRESIRKEFGIKNPSRTDVIKYKLYDELKNNGYKTLYTNRYIDKSNLFSESIEIEHIIPKAQIFDDSFSNKTLEFHDVNQKKGDLTAYDFIKRDYNDLLEIYENRIKGYFNDGNITKNKYKNLLKTSDNIEVGFIERDLRESQYIAKKAKELLITSCRTVTSTSGTITGKLREDWGIMNIMKELNFDRYKQLGKIYYQERKDGQKIAMIKDWTKRDDNRHHAMDALTIAFTKPSLIQYLNNLNARKNENNKIHSNIIAIEKKELHRENHGKLLFNEPFPNFRAEAKKHIESILISHKAKNKVVTPNINKIKIKKGTYKQITSTPRGQLHKETIYGKSIKQEVKSIKISSKLTLDIINNIINPEYKKLILERFNKFSNDSIKAFAGKNSISKNPIVLSNEEKIPTIIEYLSKEPIYIIRKNITSDLKLDKIVDISIKKKLQERLKEYNEDSTKAFSNLDKNPIWQNREKGIAIKRVTITGVSNAIALHEKRDHFGNLLEDNKKNNIPNDYVNPGNNHHIAIYIDKEGTYHEDAVSFFDAVTRKNLDMPIIEKNPYPGWKLLFTMKRNEMFVIPTDNFHPDKNYLLNYNNYSEISKHLYRVQKVSSKYYVFRHHLETSVTRDIMNDTFIRIRKISGVAHFLKVRINNLGKIVQVGEY

SEQ ID NO: 2844 - protein, 1288 aa, unidentified
  REGION 1..1288: note = Description of Unknown: Cas Enzyme sequence
LQLKITDHLTKYYIMKTILGLDLGTTSIGWALIEVNENNIPIRILAMGSRIIPLTTNDKTQFEKGQSISKNQDRTKIRTQRKNYDRKQLKKSDDFKFSLKRELEKLCIFPSKELLNLPMLELWKIRSDASSKPIEAEQLGRILYMLNQKRGYKSARSEANADKKDTDYVTEVKGRYVELKDRGQTIGQYFYEELSNANQHNSYFRIKEKVYPREAYIEEFDTIINVQKEHHSFLTDSVINKLRNEIIYYQRKLKSQKGLVSICEFEGFEKIIFDKEKQKEKPVFVGPKVTPKTSPLFQLCKIWETVNNITLKVKNPEGSKYKWSDKILTLDEKQKVVEYLFVNPIITYSELLKILNLKKDDVFANKQIQKGIQGNITYSEIHKIIGDSKWLNFDITIDEIQNLAILVDKKTGEILKEQQSLIISKSFEKEPLYQLWHTIYSIKELDECKNALIKRFGFDEETASQLSKIDFNKQAFGNKSTKAIRKILPYLIQGYGYSQACSLAGYNHSNSLTKEEREQRQINDKLELLPKNSLRQPIVEKIINQMINVINSIIDNYGKPDEIRLELARELKQSKDERDEADKTNTNNKKQNELIAKRLEVMGIPSTKKYIQKYKFIFPVKDKKWKEADIVNQCIYCGEHFNLTEALTGDNFDVDHIIPKALLFDDSQTNKVLVHRYCNSNKLDKTAYDYIANKGDAELQKYIHRVDDWFKRGILSYGKMQRLKTSFEEYLERKKQKKETEADKKLWENFIDRQLRESQYIARKSREILEQISNKVTVTEGTVTAKLRKLWGWDDVLMNLQLPKYRELENITGQKYIQTIEWTSDHGKRTHKKEEIINWTKRDDHRHHAVDALVIACTQQGFIQRINTLNSSNVRDEMFRKVEGAEILYNEKLTLLEKYLVTQKPFTTSQVEKEADKILVSFKAGKKIATISRFKAKGKNKTKGVIVPRGALHEQSVYGKIKIEDRDKPLKYLLENSEKIINKTIKSLVQQRLKDNNGNVKLALSSVKKNPIYLDNKKEKILDKASCFKHTTVMKYDLINLKVNQAEDIVDKKVKELVKERLNQFGNKEKEAFKDTLWFNEEKQIPIRTVRLFARPDANSLQPIKKDEHGKEIGFVVQGNNHHIAIYQNKEGKQIQHSCTFWHAVERKKNNIPIIIKNSTELWNSMVNKELPETLLQMLPEDGLILDFSMQQNEMFILGLSEEEFNDAIKNMDKSILSKHLYLVWSISNNDFWFRHHLETKNTELKNTEGAKESKRYYRFKSVGSLVSINPQKVRINHLGDIVSVGEY

SEQ ID NO: 2845 - protein, 1281 aa, unidentified
  REGION 1..1281: note = Description of Unknown: Cas Enzyme sequence
MKNQIPFVVGLDIGVSSIGWAVVVRPDFARQYAQILGAGVRIVPLTVDENTNFPKGKAITTTKDRTMKRTARRNLHRYRLRRHKLVKKLKEVGMLPNEELFGLSALALYGLRDKALKEQLSLEEIGRILLHLNQKRGYKSSRKAQNEDDGGTEEAADKPNKQNKDKVTEPNKQVEKGYLEKIADREKALAESGQTIGQHFYQEFLKNPLFQTKNEIYNRDTYKAEFNKIWKFQAQFYPKLLTEKLRKEIGEEIIYYQRRLKSQKHLVSWCSYEPTKEIIGKSGKKITTGYKTAPRSSPLFQEFVVWQQVNNLKILTRSNKKGQDLSLAEKEYLFAQLNRNTKPKISAKECLLLLAKFDSKYADKNVGYSLNFENIECNRTYAELYKVLGENPDYQHYLQFEPQKIEKTNKETGEVWVEITNKFEEQPMYKLWHLLYATEEDKHLKERLDDNNGFFRFDAATVLALCKIDFVKAGFGNLSAKAVRKLLPQMAKGLSVEAACKIFDYKYSTSESVEERENRALKDKLDVLPKNSLKNPVVEKILNQAIQLVNEIMEEYGRPAEIRIELARELRMNAKKRQDMTKKIGEKSREKLKLEAELRDLIDKGEIKRKEGRDRISLGDLLKYELWKQQDGNSPYTGKNIPLAQLFDTQFYDKDHIFPQSRFYDDSPTNLVLVEKAENLAKGNKYLSAADYIKQVKGEAEFQAFMNRINDCKGFSRTKKARLLATELPDDFITRQLADTRYVGKKLKEILRDVCSNVTSTTGSVTAYLREQWELDAVMLKNEEGKVQLDKNKFAIKLKENLLKEMRFEQYPHLKQRDEELQKLIETGKATDKDREKYRAEQRKNRDDHRHHLLDAVVIAFTTQRHIQYLNNLNAAYQNPKEAQIAKEERIFAAPMPDFREVVKGVLAGTLVSFRGTRKIGSWRTNPATGKRELTPRGYLHKETLYGSVKRYEVLKIGKKLFEQIDQIVDTELKTQLQTLLKQYGGEWGALEKYLKKKPLLKNGKPVEEITVFSRQVTAKYALDSIVAKDTQYIVDEGIRRKVEERLQAHAQIDQQIETLKAKKPKTLEDEAAIRELQAQKLQPLWLNEAKGIEIKTVKLFTKNDNSVTPLYDKPNTPYVQQRNNHHVALYKDRKGKIQECVVTFWEAVTRKRLGLPVVIENPKAVWQQIAEQQITDRFIVGKEANMPEKDWEFVQAIVGDEMFVLDLDKATLQKAITENDYVLISKHLYRVQKFSEQGYVFRHHLETNLDNEKATETLTKSSFERCIKVKISRLGKINIA

SEQ ID NO: 2846 - protein, 1094 aa, unidentified
  REGION 1..1094: note = Description of Unknown: Cas Enzyme sequence
MRYGVGLDIGITSVGWAIVLLDEYGQPWRIGDLGVRIFDAPEQPKTGQSLAAPRREARSARRRLRRCKHRKQRIRSLMLHHGLLEADALNSLYDTPVGDIYELRTQALDQPVTREEFARMLIHLAQRRGFRSNRKAADGGKEDGAMLGAVTANKQRMADQNYRTVGEMLHRDELYHAAKRNKSVNYQNTVTRDMIEHEAELLFTRQRELGNAWASEELQAQYLAVLLAQRSFDEGPGEGSPYGGFQDKVGFCTFEPDQKRAAKATYSFELSRLLQDVNKLHLLDGGKVVLLTPEQRKLLIEYAHSTASISYTQVRKKLGVPEHLKFNLVNYKRDSDQAKDETARKPKWLAAYHKMEKAAGKGVLSHAQRDELGRIFSLYKTKERLLQELAGMDDFDPKLAEQLAENLDSFSGFGNLSLVALRKVNEQLLAGHKYNEACEKAGYDFQAKNKDEKQPYISLKHLAEQTEHTITSPVGRRALSQSAKVLNAIIRHMGEGPSYIKVELARELAKPFDERRKMTKGMEENQAQNERIMEDIRQTDGISPRGQDLVKLKLYKQQGELCLYSGEQLDRRRLFEPGYVDVDHIIPYSLCFDDSYNNKALVRTRENQQKGNRLPLQYLTGAAADKFRVLVNASNLSTRKKQNLLKEEFTQADEEAFKERNLQDTKTISRFFYNYLIDFLDFAPSTTERKKQVYAVSGAVTSLMRKRWGLTKVREEGDLHHALDAAVVACVTDGMIRKIKNYTEQQENREVAAYVHQDGQSYTVSRKTGELKARFPQPWQNFSDELQARLNDNPQRALERLGTYTDGELAQVRPVFVSRMPRRKVTGAAHKETIKSRPVPTSKREVVLKKVALTELKLGKDKEIADYYNPKSDVRLYDALKTQLNAHGGDAKKAFAEPFRKPKSDGTPGPIVKKVKLMEPFTVNTEVHKGAGRADNGTMLRADVFHVEGEGYYLVPIYVADTIKPRLPNRAVVQGKPHDEWKKMKDDDFIFSIYPNDLLRIEGKKAIEMSRVRKESKRLVDKIAQQEAYVYYKGTNLSKGSIQVITHDNTYQVQGLGVKTLVSLEKYTIDMLGNYTRVGREKRLDFKKPRKHKK

SEQ ID NO: 2847 - protein, 1442 aa, unidentified
  REGION 1..1442: note = Description of Unknown: Cas Enzyme sequence
MTKNILGLDLGTNSIGWALIKQDFENKQGEILGMGSRIIPMSQDILGDFGKGNSVSQTAERTKYRGVRRLRERFLLRRERLHRVLNVLDFLPEHYASQIDFTKKFGKFKEETEPKLAYNNDGFIFKKSFEEMILDFKTHQPQLLENNKKIPYDWTIYYLRKKALSQKIEKEELAWILLNFNQKRGYYQLRGEDFEEEKDKVFVRLKVDRVVDSGENVKGRILYDVYFENGWKYEKQIVKTEDWIGRTKEFIVTESILKNGDTKRTFKTVDSEKDWIAIKTKTEQEIDNSDKTVGAYIYEALLQNPKQKIKGKLVRTIERKLYKAELKQILEKQMEFHTELRQDDVYSDCVRELYKNNEAHQLTLSKKDFVHLFMEDIIFYQRPLRSQKSSISNCTLEFRKYKDENGTEHTQYLKAIPKSNPYYQEFRIWQWMYNLNIYKKDNDENVTKAFLNSKADFESLFEFLNDRKEVDQKALLKHFKLNDKIHRWNYVEDKKYPCNETKTMISERLKKVENVPNDFLTREMEQKIWHIIYSVNDKVEYEKALKSFAEKNNLDESSFFEVFKKFPPFKSEYGAFSEKAIKKLLPLMRLGKYWDYADIDKCSKDRIQKIITGEYDENIKDRVREKAVHLTTETDFQGLQLWLAQYIVYGRHSEAALSGKWNSSDDLEEFLKEFKQHSLRNPIVEQVITETLRVVKDIWVKYGKGAKDFFNEIHIELGREMKLPAKEREKMTRKISENENTNLRIKGLLAEMMADSSVENVRPFSPMQQEILKIYEDGVLNSDIEIEDDILKISKTAQPSSSDLKRYKLWLEQKYKSPYTGQIIPLNKLFTPAYEIEHIIPQSRYFDDSFSNKVICESAVNKLKDNCIGLEFIKKLGGSIVECGNGKSVSILKQDAYEDFVKKHYANNRSKRNKLLLEDIPETMIDRQINDTRYISKYISGVLSNIVRVEDGSDEGVNSKNIVPGNGKITTQLKQDWGLNDIWNDLILPRFERMNQLTNSTDFTAWNENHQKYLPTVPVEFSKGFSKKRIDHRHHALDALVIACATKDHVNLLNNQSAKSDTKRYDLKKKLMKFEKVVYKNPHTGEKIEREVPKQFLKPWETFTVDAKSRLETIIVSFKQNLRVINKATNYYEKYVEKDGAKVKERVEQTGTNWAIRKPMHKEFVYAKVNLPWVKVGGKEILTAIRKPLDISFDEKKIRSSITDRGTQKILLAHLEKYKGILDEKGKIIPSEILAFTPEAIEEMNRNIIELNDGVFHQPIFKVRVFEKGTGRFPVGQSGNKKDKYVEAAKGTNLFFAVYQDKNGKRSYETIPFNEVIERQKQGLNPVPLENKKGYKLLFHLSPNDLVYVPEEGEFTERIFNFNDLNKEQVKRIYKVEKTSGSECYFVRQDIAYLIKQYDAKTKMGELESQNKLQVTMTEDRMKIADVCDKLKIDRLGNIATV

SEQ ID NO: 2848 - protein, 1517 aa, unidentified
  REGION 1..1517: note = Description of Unknown: Cas Enzyme sequence
MEKTKTILGLDLGTNSIGWALINQDFEQKYGEIVGIGSRIIPMSQDILGDFEKGNKISQTAERTRLRGMRRLKERHLLRRERLHRVLHVLGFLPSHYAASIDFDIRVGKFLPETEAKLPYDGNGNFIFRDSFEEMLADFSQHQPALVADGKKVPYDWTIYYLRKKALSELITDEELAWLLLHFNQKRGYYQLRGEEAEDKPNKTEAYYSLRIDDVTADEPQKGKSEIWYNIMLENGWVYRRASKTPLYDWKGNVKDFVVTTELNEDGSIKMDKEGKEKRSFRAPKDDDWQLMKKKTENEITQSNSTVGVYIYDTLLRNPGQKIKGKLVKTIERKYYKEELVQILQKQVALNPALRDTAKYKECVAELYPHNHNHQATLFQKDFVHLFTEDILYYQRPLRSQKSAIGNCPLESRIYVLDGVKKVAPLKCIPKSHPLYQEFRLWQWIRNLHIYRKDEEQVPVTKELLPDIAGYEKLFAFLNTQKEITNKALLKHLLAPLKLKGKALDAAVNKYRWNYAYDETAKTEKSYPCNETRAAIMSRLAQVAYLPEDFLTRTREETLWHIIYSVTDKKEYEKALRSFAQKNGIDVDSFYEAFRRFPPFPADYGAYSAKAIKKLLPLMRMGHYQDRTAIDDRTRDRIEKIINAEYDDSIKEQVRVKAIHLTTEAHFQGLPEWLAKYIVYDRHAEGKDTGRWKCVAEMEDYLKGFRQHSLRNPIVEQVITEALRLVKDIWQHYGHGAENYFDEIHIELGREMKNPLSVRQEMAAKQSINENTNLRIKALLAELLNDNAVENVRPYSPMQQEILKIYEDTVLHQDIDIPDDIVKISKMAQPSGAELQRYKLWLEQKYRSPYTGDIIPLNKLFTPAYEIEHIIPQSRYFDDSASNKVICEAAVNKLKDNMTGLEFIRNHHGQVVETGMGKSVKIFTEEAYTQFATQHYAGNRAKKMKLLSADVPEKMIARQLNDTRYISRYVMQVLSNLVREQKNDDGVNSKNILAANGQITQKLRQDWGLDAIWNELILPRFERLNQLTGTTDYTVYNERYRKYLPAVPYDQQKGFQKKRIDHRHHAMDALVIACATRSHINYLNNQHALNKTKTKDERQRDRHDLKVLLCDKKFNSGNTGDYAWIFKKPWSNFTADARAQLEKVIVSFRQNLRIINKTANYYERLRDGKKELVKQMKGENWAIRKSLHKDTVSGVVSLRKTRQVKLAVALDEPGNIVNKDVRSYIRKMIADGYDKKRLQKHLKDNGNRINGVDISVVDIYYWDNGNVASRTSLDTSFDKKKIAAVTDTGIQKILLRQLELHAGKPELAFSPEGIEEMNRNMTALNEGRPHKPVYKVRTYEVMGNKFPVGQTGNKKYKYVEADKGTNLFFAIYEDEEGKRSYETIPLNIAIERQKQGLYVVPEENEKGNRLAFYLSPNDLVYIPDSHLSNELMSDKSDNYPSDRIYRFVSCTGGEGHFVQNNYSVGIINNEQGTNNKSERMLDYRNSPALLDDKGKPQMIKSVCIKLRVSRLGVVLKT

SEQ ID NO: 2849 - protein, 997 aa, unidentified
  REGION 1..997: note = Description of Unknown: Cas Enzyme sequence
MKENKNNSIYDPKSAIEKEYEKDIRPLYGENKVLVDIGIDIQPNAVGIAVMHVDPTLNFCIPPFIWSFSEGVGYKQDGISEVPLSQERAIFRGQRRSNTRTKSRISNLKYHLEFDGFPFVSNKDVYYLRKKGLDEKLERGELAAVLVTMTKLRGYLSNRKCGDDKDGKVKQGISEVENKIKETNSRTLGEYLYERNNSPSRPKARGIYTSRKMHLQEYDLIIDKQQEFYPELADGNRLRDKWRRIIYHQRPLKSCKELRGNCSLLEEEVRMPKMHWKAEEFILRALLNNITVDGIDGNRKLTLSQIDMLYNYLEYREKMTIKAVRKKLGLTDAEVISLEKQKSDDIYGHHTNYILKKHMGDLWCNATDEIREIIISTFQNEYNLDKVKDELKNKIGYDGDVNIPLKSGYIKYSEKALDKILPSLREGTPEMTIVNNILKTECKVAKQEKEKITGTNELCKLDPFVKTTNHLVNRSLSNARKAFNYFISLYGDIFEIRKIRVEVCKEMKKSSKQREELHKNNKCREKIRKDIKDELSTNLNITSATKKDIIRWELAEECGWKCPYTGKVIDSNNLYNDKIFEVEHIWPKSRFNDNSFLNLTLCHTDENRNKSNRTPYEAYYGTKKWDEIMKRISKLHPEKRRKFIAKEIDKNHIPTSKLQATAYTSRVIAEGFEKAGYIVETCSGSLTSILRHGWKIGKKDRTCYLHHGEDAILIAASANISSNTINSYLYSEVPIPLPWASFAKDIKKIMSKVIVTHVPQVNSNGKLHISTVYGKTNQKDSFSVKKKLTALTKNSVKSIIDEGHKKIIIDRLVEHGIDINSKGNKIPASVWEKTLYIGKNPINKVKIKQNITKPLFFKNKVTTSCSNHHMEIFEIDNKGNKEWAGRVISNWEVKSRKLNGIPVINKEYIHKDGTIGEFVCSLVINSMIKMKDGTVCRVQKLSRPNIVTLIEHDKAVLKDENNKTFSKNFTAGSLKKAVFNANKNSNKNANKLDVINV

SEQ ID NO: 2850 - protein, 916 aa, unidentified
  REGION 1..916: note = Description of Unknown: Cas Enzyme sequence
LVSDCTFERKHKAIPKSSPLFQYYRIWTLINNLEISDYEGQKYYPVIEQKQELFKILYTSKGLNQKCTLPASKVLTLLNYPKDYYLNFKELEGNKFYKRIENSLIKAEVKNYKDYLFYNPLHKVNNNYTEENGGLYELWHLTYSIEDNHDLINALTKRFNFTREQSETIANNVGYTSEYGSLSAKAIRKILPYLQEGKMYSEACKEVGYNHSEINITKGLDRLENLRTNSLRNPVVEQVLNQVINVVNELNDTYGKPDEIRVELARELKNSASQRESISRSNRDNRKRNEDITSILLEHDYFKNKRVSMLDIKRYKLWEQTGKICLYSGKPISFTQLYNGETEIEHIIPRTRCFNDSMANKIIVFARENKLKDQETAFDYMKNKGEQELARYSAEVNRLYRDSKLIKKSKYENLLCPGDKIPEDFIQRQLKDSQYIAKKAREILFGICDNVVTTTGSITDLLRTKWQMTEVMKELNKEKYRQVGRIYTKHIKDKQGNPKDVEAIKDWTKRDDHRHHAVDALLIALTNQSIIQQLNNLNQIYNGYRDLKKSPLDFPCPSKNLRVEAEKALSDIWISFKKPKSKVVTPKINKNNRGQEQLTWVPRAALHEDTMLGRIKVQKHIKIKEAFKIPEDIISQTIKQQVTDRINSFDGNIKKAISSISKNPILFKNEKVEKIKVWSYVYTKKVTINENITLPQVSKIIDTNIKKLLEERIKEEGSVKKAFKNYAENPIWLNKEKGIAIKSVKVKDEGNLVAVRNCLENVNEGKPKDFVYTKGNHHALIYEDEKGKKIDKVVSMWEAVELAKNNIRETGKPYPVIDRRNKDDLKFLFSMQINDLFVFDLDPDEIDFFAPENRALISKNLYRVQTISKGDYRFRHHLETTIVSSEDFAIKRLSPSSFNGIKVKIDKLGNLIKLGE

SEQ ID NO: 2851 - protein, 985 aa, unidentified
  REGION 1..985: note = Description of Unknown: Cas Enzyme sequence
INNISIKIKNPEGSKYKWADYTLSIDEKRKLADYLNTHPSISAAELLKQLNLKKDNVYLNKQLAKGLKGNTTYTDLAAVVKDPSLLRFQAALLPRDKKAFLVDRKSGEVIRETDAFVVSPDIEKEPLYRLWHIVYSIKDMDECKSVLVEKLKLTDEEATALSKLDFSKDQFGDKSARAMRKILPFLMQGYNYADSCTLAGYNHSSSLTNEEKAQLETSDSLDMLPKNSLRQPVVEKILNQMINLVNAIIGKYGKPDEIRVELARELKASKDERNEAERQNSLNKKLNAEISKRLRELGLPETKKFIQKYKFIFPARDKKWNEAYAVNQCIYCGDTFEISEALSGDNFDVDHIIPQTLLFDDSQTNKVLVHRKCNKDKNNLTAYDYIAAKGDQALSAFLARVDHWYTKGIISYGKMQRLKTSYNEYLERKKEKKETAADKRLWENFIERQLRETAYIARKAKQLLMKICTNVYSTEGNVTSKLRNLWGWDDVLPQLQLPRFKALQLTEIKEVKNEHGNTNHQKEEIIGWRKRDDHRHHALDALVIACTKQGFIQRINTLNASEVRIEMKKEIEEAGMETKTGGKLLDNYLSLQQPFTTQQVKDEIEKVLISFKAGKKVASTGVRKAKVNGRFKVVQRNIIVPRGALSEESVYGKIRMLDKNKALKYLFENPDLIFKQYIRDKVKERLTAHEGNTKKAIASLKKDPLHLDSDNTKVLEYATCYREEVVMKYPVDSIKKEHLESIVDEPVRKILEERLKKHNYNSKEAFKNLENDPVWYNEELKIPVRTVRRKTNLTAVEPVKKDKTGRDIGFVKPGNNHHIALYMDENGKMQEHLCTFWHAVDRKKYLLPVIIKNPAEAWDKVLTNKENYPESFLQKLPNDKWKYVESLQQNEMFLLGMTNEEFIDAINRDDRALLSKHLYSVWSISESDYWFKHHLETKNTELKSTEGAKESKRYFRFQSITAFQKENPIKVKIDCLGDIASKGRQ

SEQ ID NO: 2852 - protein, 1217 aa, unidentified
  REGION 1..1217: note = Description of Unknown: Cas Enzyme sequence
MKKILGLDLGVSSIGWAYIHEGEKEDEQSAIIDVGVRIVPLDVTNKTKFEKGQAITINQDRTTKRGARRNLDRYQLRRKSLTSTLKALNMLPDNALITLKTLQLYELRNNALHQQLTLKEIGRILLHLNQKRGYKSSRKENAKLDGEDKKNKESEYLGGINSRSAELKEKGITIGQKLYADFFENYEANDKQIISLSIKNKIYPREDYITEFNAIWDYQSKFYPNILTEETKLKIRDGIIYHQRPLKSQKGLVSLCEFESKKSMVKKDGKDVTKHIGSKVAARSNPLAQLSKVWESINNMSFESPDSGTKRILSLQEKREIFEHLNTHDKITLKELRSILRDKSLRSNQQVEKAGLRGNDTRVKIEQALINSGLDKVIIKQLLQFNLTYTTVDLADSKREAINNYQPKSKQKRFEASEVVIDKISGEIIELKEITINIEREPLYIIWHLLHSIDNPDELKSALLKHETLKHLGLTDSAAWHLTKVVFKSNDYSSKSVKAIRKILPFLMNGYVYSDSCALAGYDHSNSLTKERNENRELLSRLELLKKGDLRQPVVEKILNQLINLVNAIIESPELGRPDEIRIELARELQQSADERNNTYSYNTKRSSENDEIADEIQKFNLKPTTHRIKKWRVWHETKGYSLYTGKTIGLAEFLNADAVDIEHIIPQSVLFDNSLSNWTICERDENNRKGSMTAFDWMSNKGEKALSEYINQVNYFYTQFIAKDNKEKAIYRVGISKRKRDYLLMPFEKIPSDFISRQLNETRYITRKSAEILKDVCRQTKITSGSVTDYLRHHWGYDNILHDLNFDRYKKAGLTYINDDKKERITGWSKRMDHRHHAIDALVVACTKQSIIQRLNNLNQKKEKSQNLKEVEHKGLKKLVLEYKLFDISTVTEKLSSTLISYKAGKRVVSRRKNKIGNQSRLEPKGALHEESVYGLVKRIAEKPLKLNGKFKPEDVKNIVHPRYKELISQRLFEFENDPGKAFKNLNKTPIWLDKEKGKSLTEVRVFEYTTAIKYKLNESFKEKDVEFIIDKAIKLLVRQRFHEKGNNAMRELEKNPILYNDKPVHSVRCYAEVSAYEVLKFDKERNKAISVVKPANNHHVSICLDEKGKPYELETVTFWEAVARAKQGLPIYNKPKEEGHSVLCTLQQNEILEIQDETKHINKFYRVQRLATGQYILRNIYETSVDKSNPFYLQVSAGSLNAKKIKINILGKVVA

SEQ ID NO: 2853 - protein, 1495 aa, unidentified
  REGION 1..1495: note = Description of Unknown: Cas Enzyme sequence
MHLKNYKKMKKILGLDLGTNSIGWALIEQDFEQKKGKIDDLGVRIIPMTQDVMGKFDSGQSISQTAERTGYRGVRRLNQRKLLRRERLHRVLNIMDFLPRHYKEKIDFIDKKGQFQEEVKIDYKKNDKGKYDFIFKDSYNQMLEDFRNSGYTGEIPYDWTLYYLRKKALTQPISKEELAWILLNFNQKRGYYQLRDEMAENDNDKKKEFVVLKVKELKPTGEKTKDGKELYEIIFENDWVYPKQTVTPEAWERKTKEYIVTTSTMKDGSTKRTFKQVDSEKDWIAIKEKTQQDIENSSKEVGEYIYEHLLKTPKSKIKGGLIKTIERKFYKEELKKILDAQKKFHPALQNQELYSEALMELYPYNEGHRNNIKNKDLPYLILEDIIFYQRPLKSQKSLIGNCPYEKITYVKKVKDPETNQVKEVKETKNLKVISKSNPVYEEFRLWPFLHNLKIYKNKDYRNGELVTDVDVTHEVLAEEKDWEQLFEYLSNKKEMSQKTIIDFLVKQKKLDRREKDNYHWNYPEDKKYPAMPTRAGFLSRLKKVNNLEPEQFLTPEIEKQLWHIIYSVQDPVEYEKALKKFADKHGIDQESFVKAFIKHPPFKSEYGALSEKAIKKLLPLMRLGKFWKEEDIHPEVKQNIDNILERLKSVLDRINRIEWKKNEDKEKKINEILEQISDDDIPRAVLKSFLKNIDKNPYKGLQLHQASYAVYGRHSEATDVQKWESPADITRYLQNFKQHSLRNPIVEQVILETLKVVRDIWETYGNGEKDFFDEIHLELGRELKNPANVRKQISQKNAENERTNARIRALLKELLNEGANPESPSHQEILKIYEQDVVNSLEKLPDDIQKIRKENSPSPSQIERYKLWLDQKYVSPYTGKIIPLSKLFSTDYQIEHIIPQSRYFDNSLNNKVIAESEVNQDKGNKTAKEYILEKGGYTIDGGHKILNLSEYQSHVEKYFSHNKKKMKNLLTEDIPDNFINRQLNDSRYISKVIKSLLSNIVREENEQAETSKNLIAVTGQITSMLKHNWGLSDKWNKIILPRFKRLNELTQRTDFTYINRNNIEVPKIPEDLPGKINKKRIDHRHHALDALVIAAVNRNHIQYINALNNEKTKHALQPQLLIKNEYGHYTRNYQLPWEGFPVEAAKKLETIIPSFKQNLRVINKATNKYWKWVKQENGSYKKQRVPQTKGDHWAIRKPLHKETIYGKFDLVKTPKNKIATFVRTPLSAINKTKHLEQITDRNIREVIIPNHLKKYTDEKGKVKFEEAFSPEGIEDLNKNIVELNNGKAHQPIYKVKMYEVGSRFPLSDNPNSPKHKKYVEAAKGTNLFYAVYWDEKKKKRNFETIPLKDVIAHQKMEAHLPKEERTQIPLNEELGRFLFYISPNDLVYVPDEDENIDLIDFKNLSKEQVNKIYLFKDSSASTANFIPVHSASLIFNMNFQEQRKKDINYKIQNEYGIGSPQSKNQKSLDGKIIKNICWKLKIDRLGNIYGIEKGK

SEQ ID NO: 2854 - protein, 917 aa, unidentified
  REGION 1..917: note = Description of Unknown: Cas Enzyme sequence
LYNNSGNEYDIKSDKVYAVINVLKNVEDKNIEDIALKLAQNIKYLRKYSSLSAKAINRILPLMNCNPIKGNGFVKEKLEKIIHSTETGEVNDEDNIESYMLKYIYDNPNILETGGMMYAFASSLIYGKHTAEILKPTITNYHDILYNKDRNLRNPVVEQISNEAMQVIKAIWKQYKLNPEELEIRVELARDLKNSAVEREKIYKAHITNQRINESIKKRLIEIKQEPTPGKVNLYKLWSKQNIEEFPKQSKEPTLEEIKRLRIWEEQKCISPYTLNPIPLSKLFSDERLYDIDHIVPKSRLFDDSISNQVVCETDINEEKGNRTAWEYITQQNSKIGICTVDSYIQHINSIFFGRKKRNLLIEKIPTDLVQRQIKETQYISVAVKNELAKIVGSENVKTSTGEITAFLRSRWGLRKLFMELTESRFKQMELWDWNKETNSPNIEWVVKYFDKEKRKDIYEIKNWNKRYDHRHHSIDALVVALTEQKDIQRLNNLNKELQDWLLKKKNDIGLIVEEGETVLEAFFNLDEKRRGEIQKQIEGFRKFEIPFNDLVSQAKVHLEAMIVSHKPKDNLSLQVNEKTKKKELKIRGALHEATLYGKHNGRDTKTISISNLTVKDIDKITDETGLKNKIIAHKKKYKSMKEAFTGEGLKLFNESRFQRKKPKELEPPVYKIKIYYNIKEQKESSLQRLYGNNDKLSVKTGGNYVFIVMEKDGKKGKERVFDIVTLYDAAQIAKDEWKVNNENFKTRICEDYRINHKEKPDKVLFTLQQNEMVYLLENEEDQVLNFTKEGFNNWISMKENIIKFSKRIYKVVKFTGKDCFFIPHNYANTISDAKDLSEKQIEELKIKYGEKKIPKYILNFKEFGSFDNSAKTEVNENFTKELVFGLEDFKDKKPLKIQDHCIKIETDWLGNIRIVK

SEQ ID NO: 2855 - protein, 1481 aa, unidentified
  REGION 1..1481: note = Description of Unknown: Cas Enzyme sequence
MSETKIILGLDLGTTSIGWAHVIEGETPDKSSIEQIGVRIIQFDNFDKVDKTGKVSESKNPEQDFASGKGLSPNASRTLKRGARRTLDRYQDRRKNLIEILLKAKIINSDTILTENGKETTFSTWKLRSNAVTQKIEKNELARVLLAVNKKRGYKSSRKAKNDDDGKAIDGMDLAKRLYDEEITSGQLVFQLLQEGKKNVPDFYRSDLQAEFDKVWAFQKQFHPEILTDEFYQELKGKGQRATSTLFWTKYNFNTADIKDIEVELQNEKTIKYSNRDKKRLQAYKWRSEAVVKKLDKEDMAYVIAEINNNLNNSSGYLGAISDRSKELFFNYETVGQNLYKQLLANPHTRLKSQVFYRQDYLNEFEAIWNKQAEYHSELTDELKKEIRDIVIFYQRKLKSQKSLISFCELESKEIIIDGKKKIVGSRVIPKSSPLFQEFKIWQRLNDIEIKKIGSKKRKTKINSDQVLLFEEEKEFFNLDLEQKQILFDELNIKGDLSATNAIELLGLNPKEWSMNFLQLDGNRTNKEFYNAFLKIVEIKGYDVKTLLKVKSNKDEVELDDLKVCASEIKDMIKSIFDSLEINTHILNFNAELEGNDFEMQPAYQFWHLLYSYEGDDSASGNDTLYKILEAKFGFEREQAQILANIPLQDDYGSLSTRAIRKIIPFIKENNFSSACEFAGYRHSKNSLTKEEIETRVLKGELELLKKNSLRNPVVEKILNQMVNVVNTLIYKHSEKDEKGNIIKYFKFDEIRIELARELKKNAEERKDLDTQVRDGKTRNEKVVKILQSEFGIQNPTKNDIIRYRLYEELKNVGYHDLYTNKYISKDKIFSKEIDIEHIIPQSKLFDDSFSNKTIVYRFDNEKKGNKTAYDYILSEFGEEKLSEFQSRVEKLFELGKKNKEEGISKAKYKKLLLPESEIGEGFIERDLRESQYIAKKAKEMLFEISKSVVSTSGGITDRLREDWGLVNIMKEINLPKYQALGLTEFQERRHGNKVEVIKDWTKRNDHRHHAMDALTVAFTKRSFIQYLNNLNARRQDIYDEGISNSKNRSSIKTSDLKLSSKDVLGIEAKELKRDEDNKLRFNLPIPNFRQVAKEHLESVIISHKAKNKVATINKNKISGKSEPQIVLTPRGQLHKESVYGQYSFAETKEEKIGPKFDSKTIEMVTKPLYKKLLLERLTENDNDPKKAFGGKNALDKKPIYLNEEKTETLPEKVKLEWYTKDFSIRKDITPENFKDEKLIEKILDEGVKRILKVRLKDNGNDPKKAFSDLDKNPIWLNKEKGISIKRVTISGVNNAVALHNKKDHLGNEILDNEGNTIPVDFVSTGNNHHVAIYKDEKGELQDNVISFFEVVERKNQGLPEIDWSYNKDKGWEFLFSMKQNEFFIFPNEKENFFPNEIDLFSRDKLKIISQNIFRMQKFSKVIYGNSAVRDYVFRNHLETVIDDRKELKDKAYKSIKSLSFFKNIVKVRINHLGEIVHVGE

SEQ ID NO: 2856 - protein, 1424 aa, unidentified
  REGION 1..1424: note = Description of Unknown: Cas Enzyme sequence
MNNTLGIDLGTHSIGWAIKNPDLTGNQIEKVGVITFNKGVGSGKTGEYSYAGQRTMKRAARRLHQARKYRIWATLEHLIAEGYCPLSKEGLNKWRYYNKEEALTNKNGGRVYPTDDLSFENWVKLDFDQDNAPDYKSPYQLRKELVTAKLSFSEEKNRFKLGRALYHIAQRRGFKSSRKEAIESASADIADENEMDLQASEIKRNKVISELFGKYPTAKTIGHLYALLEDENVRIRENISQYAIRENYKDEIKSIFEFQDLGLEHPLYKLLVEEKKNKNNGSIFYKRPLRSQKGLIGKCTLEGNKYRAPVSHPAFETFRAWSFLNNIQYSTPEQGWQSLPLALKEMIFREKLLRKSKVYFPFSEIIELLAKKGYHWSYNFSPKTTVTGCPVSARLKEIFGENYPDIKIDKNPSAKTSKNYYNADDIWHVLFSYEDQECVIDFAEQRLQLSPDKVKLFVAAWNVMPMGYGMLSLNVINKINPFLKKGLIYTKAVLLANIPYVIGPELWKNNEKLFLDAISTILEENREQKFMLAIVNTLISKHKSLDQKFGYKNNDYQLDEKDHSDISDTIIEVLGQNKWDQFSKEKQTSVRAIVTDCYQAYFRTSGLLRKDIRGQRHFEINANNQTFYKSDTGYYTLPKLIDTLSAFIQDNFNVSEKKLSKLYHPSEVSIYPPAKSVKDQVTVLGSPKTGSFKNPMAMRSLHELRKLINYLITTGQIDSETRVVVEVARELNDANKRWAIETWQKQREAENEEFRQIIEELVRKNEIQANSQNEKDIDKMRLWYEQNSEETVPPIADLRKEIKGIRWSENKKDSYKQISLQKSMIEKYRLWKEQECQCIYTGKIIPITELFNSNVVDFEHTIPRSISFDNSLANQTVCYADYNRTVKKKLLPYHLPNYADIQSRLEKWQEKVFRIKQQLDFWRSKSKKATDKTWKDDAIRQKHLWQMELEYWQNKVDRFTIKEVTTGFKNSQKIDTQLISKYAFHYLKSYFEKVEVQKGSITAEFRKIYGVQSFDEKKDRSKHSHHAKDAAILTLIPVAGKRDDILREYYECRESRQSFNVTPYPGFRREYVMGIDDNILINNVKNNQTLSISKKKIRKRGKEVFVPGKDTPMWATGDCIRGQLHQETFYGAIRPAKRDERGILLKDEDGKYIQEEGTRYVVRVPFEYKKDAGSGGFKTLEEIEKKIVDVGLKEQIRKQVNEAGSLKDAFEKGIYMLDKNGDKVNKIRHIRVWANVSDPLTIKKHTHPTRFPYKQHYYAANATNSYFAIYKGEGRKDFELRNLFQTANILSLNKVSKRDDLFEPSVNIIKGKKTLTLHLSYVLESGVKVIFRREENEVLSSLKHQELLKRLYVVTNFEKDGRLNFRYHLEARNEIKDVYTESELDFTVPKPTLRFSYSKYDFWVEGYDFTVNMDGSMNFNTSNL

SEQ ID NO: 2857 - protein, 1733 aa, unidentified
  REGION 1..1733: note = Description of Unknown: Cas Enzyme sequence
MKNILGLDLGTNSIGWALIEIDHERDILKILGLGSRILPMTADEIGDFGKGSPTVSAAAFRTEKRGPRRLNERFILRRDRLHLILNLLQALPNHYKLDIDFENGKGEKSGHFKFNKEPKLAYLPKSINEKAKFLFKDSYEEMLRELGIDNKKGSRIPYDWTLYYLRQKALIKEISLEELAWVLLSYNQKRGYEKLEVESNTSKDSEVVEELDLRVRSVEKKVDKAGKVYFQINLDGSRNIMYNEYTSEQLTFENDIKELKIISFVDDKGNIDDSKTTFTVIDIYPLTITEVKYENENNKHLYHLTYNNGWQQTKRKDKYTFQFEKALDKSYDYVVETIYDKLGNIKLQSGIERKLREPNFGDNSNDWTLLKKKTEKEALAFNLDKFKEPKKYISPKIYSILKQDAISGSRTKIIGGMFQTVDRSFYREELKQIISIQQTFHQNLNDKEVFEKCVQLLYPNNKSHAKTLLTNKEAIQHLLIEDILLYQRPLKSKKSEIADCKFEIKFIKDALDSKGNPIEILNKQTGEITLKKEIIRHKVVPASHPYYQEFRIWDKLHNLKIFQLEQTVEGKVQTNVDVTKQILTSEVYNKLFELLNNQKTLTNGGFMKFLAPIFKANKWNAKDFVWNFTEDDEIKGNATRVDFAVRFKRSGFADYTEFLSQEKERMLWHYLYSVSYKERIENDFKSIRSFFQNTFFKDFSLDEVIVENLVQDFANFPKFDAKYGAYSEKALKKLLPQIKLMSDRTYAWESEGSYINYNEKLNERKQEILNKLQQIDFLADKIDYTKVVDNNSVPPYPKGLFNVFKDFESIEDFTKLNLTKASYLVYGRHSELEQAKYWHSPEQIRKELHQELKQHSLNNPIAEKVLLEMMQVVADIWDYYGEGQEDFFTSIHVEVARELKKSAKEKKRDFDRNKDNKVQNDRLRQVLEEFLSIDKYKAKPKNADHFERLKIIEDGASHTKNNKKDFFNDKSYSKKEIDDILKKSKITKEDFDKYKLWIEQGYKSPYTNRIINLTDLFDGNKYNVDHILPRASVTNDSLSNKVVCEKEINKEKSNKTAREFILNPANRSIYCSAHSGYVELVNDDDFTDIVKTQFSGSKRFILLSKEVPKEFTSSQLNNTRHIARKAMELLSHIVREEGEVEFLSKNVLPVTGEITSKLKRAWKLDQVWKQLVAPRFIRMNELTNSNLFGYWQEDKNGRKYFDCAIDDLIREKNPNFDIKRIDHRHHALDALVVALCTREHVNYINNINADAKSDNYGKQKQIEKYRETLKRKIQFSRPNKENPKDKDWFYLLPGEKRIEGEEHSSRESVLSVNYWYKDVDYGKEISHFSNMVFDILHGTTTSFKTNKFPIRKTSNKYWSYKTEAGELNILNGAPKKILIRQLTDENRKGNVAIRKGMHDEIPYGERYYDFELKELRSAIKSEKDFENIYDENLKIRLVDLFHNSNEDIKELFNNIKKEVENPFPKKAFFKADTKIKLSISRKSIVGLNEKQIDKIVSPEIYQDILEHIKNFETIDEAMSAYGIEEFNKNRKIPVKKVTFGERGDGRYVLGENDLKKSTRKMVKGANYSLFIDRNNEIVNTISLKSLIEKKDDSINVTSKSGFHLLPNDLVYVTLDGNNFDFSNLNNIYQFVNSKKDSVNFSPVNIAKVIWDYGFPNSKKEDIEYNKRLFDKGNFKSEKESPLKNEIGLGTQENKHRREFIYNVEERIHVFKGETIRDFCIKLKIDRLGNISKA

SEQ ID NO: 2858 - protein, 975 aa, unidentified
  REGION 1..975: note = Description of Unknown: Cas Enzyme sequence
MTKNILGLDLGTTSVGWAFIKEAENDKEQSSIEKIGVRVNPLTTDEQTNFEKGKPITTNAERTLARSARRNLQRYKLRRENLIQILLKNNWITEENILTENGNQTTFQTFRLRSLAAEQRIELNELARVLLMINKKRGYKSSRKVNNTEEGQLIDGMDIAKKLYTDQLTPGQYVFQLLNEGKKKVPDFYRSDLQNELDDIWNFQQTFYSDIFTNNLKEEIHNKSKVTTWAILKAPFNLVGIKREGKRDEQKLENYTWRVEALSKQLNLEQVAIILQEINGQISKSSGYLGEISDRSKELFFNKQTVGQYQYEQLQKNPHARLKNQVFYRQDYMDEFETIWEKQTEFHQELTTNLKEEIRDIIIFYQRKLKSQKGLISFCEFEQKEIEIQGKKKTVGLRVVPKSSPLFQEFKIWQILHNVKLQNKETKEVYSLNQEDKQMLFEELNLKGNLSATEVLKLLYDKPKNWELNYKELEGNRTNQTLYNAYLSILDLEGYDIRKELKLKLNKDDISLSDIDKSANEIKKIIHTIFNHLKIDTKILDFDAQLDGKAFEQQSSYKLWHLLYSYEEDDSPTGMDSLYRLLSEKFGFTNEQAKILGNVALQSDYGSLSTKAIRKIYPFIKEHEYSVACKYAQYRHSKNSLTKEELEKRITKNKLDILPKNSLRNPVVEKILNQMINVVNTIIDTENDKLEKDGKPRDFKFDEIRIELARELKKNAKEREELTKAVNSGKIEHEKIVKILQAEDGIKYPTRNDIIRYKLYLELKNNGYKDLYTNEYIERKDIFTKKYDIEHIIPQSRLFDDSFSNKTLIPRDVNLKKGNRTAYDFILSDYGEDKLNEFETRIESLYKEEGISKAKYKKLLMKGSEIGEGFIQRDLRDSQYIAKKAKEILFQITKSIVSTSGSITDRLRQDWGLVNIMKELNLEKYEIAGLVEIQEDKNGQPKKVIKDWTKRNDHRHHAMDALTVAFTKRSFTILK

SEQ ID NO: 2859 - protein, 1230 aa, unidentified
  REGION 1..1230: note = Description of Unknown: Cas Enzyme sequence
MRNLKINSMKKVLGLDLGTSSIGWAIIQADDNNNPAKIIDMGVRLIPLTTDDATQFSTGNTISKNQDRTNSRTARKVYDRYQQRRENLTGVLKALYMLPDENLIKLPVLQLWELRARAATPGEKLSLPEIGRVLYHLNQKRGYKPVKNDESGKDKKQSEYLKHIASRYDTIKQLDLTIGQYFYSRLKETAVTHENGTFYTYRIKDQIFPREAYIEEYDRIMSCQQKYYPDLLTEKVINKIRNEIIYYQRKLKSCKHLISLCEFEKKSYLNNAGKAIYNGPKVAPKSSPLFQVCKIWESINNLTLKNKKGETFEITLQQKQMLFDYLDNNEKLTLKELYRILEISKADGWWGGKAIGRGLLGNTTKTALKKILKEYPLSDRMLRFRLDEKDSGMVDTETGEIIPVISADMEKEPLYRLWHIVYSINDKDELASALKKQFDITDEEIISNLYKTDFVTPGFGNKSAKAIRRILPFLMQGYMYSEACQMAGFRHSESLTKEENENRELSLKLEPIQKNELRQPIVEKILNQMIKVVNAITDRYGRMDEIRVELARELKQSREERARTDKNMREQEKNNKRIADRIKEYGSPSLNRIQKYRLWEEAQQKCFYCGQPVNVREFLDGFDVEIEHILPRSRFFDNSFNNKVCSCRKCNREKNNRTAYDYMKSKPEEEFNSYIQRIELYYNEGKITSTKRERLLTTEADIPQDFIERQLRETQYISRKAKDILTRICRNVSTTSGSITDFVKHVWGWDTVLHDFHFPVYKEMGMTELYKNPDSGQGPRERIIGWNKRMDHRHHAIDALTIACTRQSFIQRINHLNAQSKQETGDSNIPDIKDKDKPVNLEKWILSHTHFSKQEVKNHAAAICISFKAGKKGATVGKQIKYINGKRKICQTGVIIPKGALHQESVYGRINLTEKDPATGKSSVKEEIVIKYKLGVGNGFLFSGKETYSSKEVFNKKTGEIQKKTDDKIANVLNSIVDKRARKVILNRLNEGFAEGTDYTCDVKKALANLKDVDTRPVFIDPYKTIPVKSVRCKAGLSAVIPLKYNTAHEPISFVKPANNHHVALYTDEQGKLHEHVVTFWHAVERKRHKIPMIITQPREVWNSIQEQEDLPEDFLSLLPPPDWNFQTSLQQNDMFVLNMDETLFRDAIEAENSAVLNPYIYRVQKLASGDYYFRQQYETSVEDKYNGVKNVALSSRLGKVIRTGETNFWKKMNPHKIKIDILGKISSYD

SEQ ID NO: 2860 - protein, 1005 aa, unidentified
  REGION 1..1005: note = Description of Unknown: Cas Enzyme sequence
MTKTVLSIDPGVTSIGWTLTEQNEKGHLTKFIDGGSRIFNSVKEAKSGTFKNEKRRAKRTTRRNKCRSNRRMAKLENYLIKNDFLSNKISTLSDHTGLVQQIIGNPYHLRKKALYEPLTNEELAWAIIHLAKRRGFLSSSKSLTPEEKKEQARADELATLMKKEKCKTLGEYFSNLHDKGEKIRGEKLKRQLIQDELELILNKQMETNPSITEEFINDVNTIIFNQRPLKTQKRISLCKFESFGKIKKHTAAKLHPLSQQFILWGFVNNLKYNDNSGGMQELTLEQKNVVFDLLWTNKEVTFKKIIKELKLTPETTFNFQKGEDDKVKGNQLLNYFKAKTKTWFNSLSEQQKIDLIQDLSTINDLTGFALKKRIYNHWTKDEEIIDNLLLTSDKLPQGYTSLSLKATKKILPFLKAGDKYYEAEKKAYPNFTINNKKVNKLPPVEGISNTVVLKSCSQVRHLVNAIVDKYGEIDIIKIELARDLSKSKKQISETNILNSKNKSLNDEAISYLHKNNIDVNHDNITKYKLWKESESSDKQHRSCYPEQDNNGNWFFPTINLNDLYGANAIYEIEHIIPKSISGDDSFANKALCKHKTNAQKGNKTPYDYYFQKGGQELIDMIAKTAYSQFGKWKGKKFVTSTEKYLDENDIQKRYLNDTRYLAVFLKEYLQPVCKDKIVVSKGGFTAIIRQSLNLNILLGNEFNKNRGDYRHHMVDAFCTSLISPKVLDIINIMRKQFNKKTEKYKECETKLNDYIKNVKNDFIKHFDNVITSHEVESKLKGELEEETLYGHEKIKLDDGSLIEKFFNHKPYEDVVKKYNNPEKLLKAHDNLEISLPKGLKKYLENNNKLPDVYQGWKRIKTYYKELAVTDRDNNIKGFRTVYNKEGFIIGYKKADSKAYTVIYKDFNSEAISKLEEVSNKPTFNNILYKLYRGDLLKTPNGEVYKIYQLPKGQIALHPVNQVKVEGRDAKKDKNLIVNAKTKSIKIIFDKEKMYKIKVNILGHII

SEQ ID NO: 2861 - protein, 1080 aa, unidentified
  REGION 1..1080: note = Description of Unknown: Cas Enzyme sequence
MNYVLGLDVGITSCGWAVLELNPEDEPVRIVDLNSRIFDKAEAGNGDSLAAPRRMARGIRRLTRRRKFRLHRVRGFLVRHHILTKEEIENLYTTPHKTDIYELRYRALTEKVSPSDWARLLIFFAKHRGFQSNRKNEKSGEDGLMLAAIGENKKVLENYRSVGDMLYSDEKFRDCKRNKGGTYRFTVSRSMLKEEVQTLFKKQRELGQTFAGEDLEDEYISIFSAQRNFDEGPGANSPYAGDQIEKMIGNCTFEDGKNDRPSQKRAPKASYAFMAFNLWQKINHIRVNCKGIERSLETEEKNKIAGLAWTKENITYHDLRQITGLDEETRFSGVTYPLDSTTEEAEKKVKFSWVKPYHAMRRALDKVERNYIQKLSREEIDAIAYAFTVYKNDKKIRTALTEKGIEDNVADVLITHLDRFSKFGHLSEYACYKLLPFLEKGEEYYKACESAGYDFRKSSMEKLEDIPNPVVKRAVTQTMKVIKAVQRKYGNPVEVHIELARELARSFKDRAAMDDRMKENHAKNEEIKEYLSKELHVMSPTGQDIVKWKLYKQQQGSCAYSQKPFDIDKLLHDRTYAEVDHILPYSRSFDDTYRNKVLVLTKENRDKGNRTPMEYLADKPERKEKFIAWVKTTIKDSKKREHLLRVKYGRDEEAEWKQRHLQDTQYISRFLYNYLRNTLELTPGYTDRKRRIIPVNGAVTGYIRKRLGIHKIRENGDLHHAVDAVVIAATTQGMIQKVTRYSQIKENVKLIDKETGEVLTAKEFHNKDNFPEPWPRFRQELEARVSEDPEEAIRRLCLPAYENAGEIKKPFVSRMPRRKVRGAAHKETVRSGKLREDGYTILKTDLSALKLKNGEIEGYYRPESDRLLYEALKKRLEAFGGKGKEAFKEPFYKPKADGTPGPLVKKVKIIEKSSLNVPVHKGKGVAYNDTMVRIDIFGVNEKGKTAYYFVPVYVSDTVKKELPCRAVTRGKSYENWKIMDDKDFLFSLYPNDMIHVVAKKPFSFTAAEGADLAPTVETKDTCVYYKGADIKGGSITVINHDNSYGIKSMGIKTLLQLEKCEVGVLGNISFVKQEKRQGFR

SEQ ID NO: 2862 - protein, 1126 aa, unidentified
  REGION 1..1126: note = Description of Unknown: Cas Enzyme sequence
MDEKMDYRIGLDIGIASVGWAVLQNNSDDEPIRIVDLGVRIFDTAEIPKTGESLAGPRRAARTTRRRLRRRKHRLDRIKWLFEDQGLIKTDSFMKRYGMAGLPDVYKLRYEALDRKLTNEELAQVLLHIAKHRGFRSTRKAETAAKENGAVLKATDENQKRMQEKGYRTVGEMIYLDEAFRTSCPWTEEGYILTARNKAENYQHTMLRAMLVDEVREIFASQRRLGNEKTTEELEEKYLEIMTSQRSFDMGPGVQPDGTPSPYAMEGFSDRVGKCTFEQDELRGAKGTYTAEYFVALQKINHTRLVNEDGEIRNFTEEERRALVALLFTQKEVKYAAVRKKLGLPESILFYNLNYKKAATKEEQTKENQNTEKVKFVSMPYYHEYKKCLEDRIKYLSENEIRDLFDEIGTILTCYKNDDSRMKRLAELGLVPEEMDGLLAYTPTKFQHLSIKAMRNIIPFLEKGMTYDKACVEAGYDFKADSKGVKQKLLTGENVNRTINEITNPVVKRSVSQTVKVINAIIRTYGSPQAIHIELAREMSKTFEERRKIKGDMEKRQKNNEDVKKQIQELGKLSPTGQDILKYRLWQEQQGICLYSGKSIPLEELFKPGYDIDHILPYSITFDDSFRNKVLVTSQENRQKGNRTPYEYMGKDEKRWNEFEIRVKTMIKDYKKQQKLLKRHFSEEERSEFKERNLTDTKYITTVIYNMIRQNLELAPLNCPEKKKQVRAVSGTITAYLRKRWGLPQKNRETDTHHAMDAVVIACCTDGMIQKISRYTKVRERCYSKGTEFVDAETGEIFRPEDYSRAEWDEIFGVHIPKPWETFRTELDVRMGDDPKGFLDTHSDVALELDYPEEIYENIRPIFVSRMPNHKVTGAAHADTIRSPRHFKDEGIVLTKTALTDLKLNKDGEIDGYYNPQSDLLLYEALKRQLLLYGNDAKKAFAQDFHKPKADGSQGPVVRKVKIQKKQTMGVFVDSGNGIAENGGMVRIDVYCVNGKYYFVPVYTADVVKKVLPNKAATAKKPYSEWRVMDDKDFLFSLYSRDLIHIKSKKGIKTKSVDGNELKLHEIYAYYIKSNISTASIEGIAHDNRFQFSSLGIQSLEVLEKCQVDVLGHVSIVKSEKRMGFS

SEQ ID NO: 2863 - protein, 922 aa, unidentified
  REGION 1..922: note = Description of Unknown: Cas Enzyme sequence
  MOD_RES 6..8: note = Any amino acid
  MOD_RES 879..883: note = Any amino acid
LWKKSXXXKEIFSSQRRLGNEKATEELEEKYLEIMTSQRSFDLGPGMQPDGKPSPYAMEGFSDRVGKCTFLGDQGELRGAKGTYTAEYFVALQKINHTKLVNQDGEIRNFTEEERRALTLLLFTQKEVKYAAVRKKLGLPEDILFYNLNYKKAATKEEQQKENQNTEKAKFIGMPYYHDYKKCLEERVKYLTENEVRDLFDEIGTILTCYKNDDSRTERLVKLGLVPIEMEGLLAYTPTKFQHLSMKAMRNIIPFLEKGMTYDKACEEAGYDFKADSKGIKQKLLTGEKVNQTINEITNPVVKRSVSQTVKVINAIIRTYGSPQAINIELAREMSKTFEERRKIKGDMEKRQKNNEDVKKQIQELGKLSPTGQDILKYRLWQEQQGICMYSGKTIPLEELFKPGYDIDHILPYSITFDDSFRNKVLVTSQENRQKGNRTPYEYMGNDEQRWNEFETRVKTTIRDYKKQQKLLKKHFSEEERSEFKERNLTDTKYITTVIYNMIRQNLEMAPLNRPEKKKQVRAVNGAITAYLRKRWGLPQKNRETDTHHAMDAVVIACCTDGMIQKISRYTKVRERCYSKGTEFVDAETGEIFRPEDYSRAEWDEIFGVHIPKPWETFRAELDVRMGDDPKGFLDTHSDVALGLDYPEYDYENLRPIFVSRMPNHKVTGAAHADTIRSPRHFKDEGIVLTKTALTDLKLDKDGEIDGYYNPQSDLLLYEALKKQLLLYGNDAKKAFAQDFHKPKADGTEGPVVRKVKIQKKQTMGVFVDSGNGIAENGGMVRIDVFHVNGKYYFVPVYTADVVKKVLPNRAATAHKPYGEWKVMEDKDFLFSLYSRDLIHIKSKKDIPIKMVNGGMEGIKETYAYYIGADISAANIQGXXXXXSRYKFRGLGIQSLDVLEKCQIDVLGHVSVVRSEKRMGFS

SEQ ID NO: 2864 - protein, 230 aa, unidentified
  REGION 1..230: note = Description of Unknown: Cas Enzyme sequence
  MOD_RES 216..219: note = Any amino acid
MDEKMDYRIGLDIGIASVGWAVLQNNSDDEPVRIVDLGVRIFDTAEIPKTGESLAGPRRAARTTRRRLRRRKHRLDRIKWLFENQGLINIDDFLKRYNMAGLPDVYQLRYEALDRKLTDEELAQVLLHIAKHRGFRSTRKAETAAKENGAVLKATDENQKRMQEKGYRTVGEMIYLDEAFRTGCSWSEKGYILTPRNKAENYQHTMLRAMLVEEVXXXXRNFLQPETSWK

SEQ ID NO: 2865 - protein, 1178 aa, unidentified
  REGION 1..1178: note = Description of Unknown: Cas Enzyme sequence
MNKKVLGLDLGVGSIGWSLITLDEGGHPAEILGMGSRIVPLTSDDMQEFQKGKAITKNKDRTMKRSARRGLDRYQQRRAKLSRLLCEFGLGFPRPLMSLSPLALWGLRADAATEGKVIPLAELGRVLYHLNQKRGYRHSKSDESSKQDTEYVAAVKTRYAELKNESLTIGQYMYRYLSASAERGADALSCVHYRVKDQVYPREAYMEEFDRIMAVQQKAYPEVLTSVVLQKLRDCIFFQRPLKSCKHLVSYCEFERKTREVQIPVVGADGTTSYKTKIIDIGPKVAPVSSPLAEVCRLWESINNIRIYYPDGAVYPLSLEHKQAFFNKLQESESLKFSDAKKIIGAKAKDKLWCNDLLKSGIKGNRTTATLRKLIEDYPQYKALLRFDLKQEDSCRVDLSTGEVLPLISVSYLNEPLYKLWHILYSVAEREAMGNALRKQLGVEQGDLDKGLLDACMKIDFTKQGYCNKSAKFMCKLLPYLQQGYMYSEAADLAGYKHSDSKTKEELEHRELKPRIELLPKNSLRQPIVEKVLNQMINLVNALKDKYGEIDEVRVELARELKMGREERETTSRRIAANEKDNKRVAEAIAEYGTPTKNRIQKYKLWEEANYECIYCGKQIGLANLFSDGEAEIEHIIPRSVLYDDSMSNKTCACRSCNKAKNNRAAMDWVLTLTEEFQTKYFNRLDGLVATKRLSNGKRQRLMTLLKDIPEDFIERHLRLTQYISRKATEILKDGIRYVWSSEGSVTSTLRHLWGYDKVLEDLNFERYKSMGETQTVLVKRGSAEQEVERIKDWNKRKDHRHHAIDALVVACTRQSYIQRLNRLNSEEDRQSMQSELGSSYSPSKEERMQLLDKWLTAQPHFSVQAVRDYVRGILVSYSPDRRTYTKSRNKVKIKGRVSLQTGILTPRGALSEETIYGAIQVGKRKEIVCKRRLENLQAKDIPSIVDKGIQRIVKARLEAYNNDAKKAFAEPLYSDAAQTKQMRSVRCFSRCVYKNMIPLRRNDAGEEIAFVAPGSNHHVAFYRDSKGVLQEAVVSFYQAIERAKYQLPMIVKEPRAVVEEALERNVPDSVLSALPHSSWTFVESLQKNEMFLIGLSDDEIARTIKEGDRATLNDHLYRVQKYSSKYYCFRYHIETLLDEIIEGDIPKLYRICSMKTYMELNPRKVRVDLLGNLSLME

SEQ ID NO: 2866 - protein, 1545 aa, unidentified
  REGION 1..1545: note = Description of Unknown: Cas Enzyme sequence
MKKILGLDLGTNSIGWAVVNSENDENGDEKIKCIEAAGSRIIPMDAATLGDFAKGNTKSQTKERTDARGIRRLHERHLLRRERLNRVLSVMGFLPEHYDNALTRYGKFKDDKECKIAWKRNDDGKWTFIFMDSFNEMLSDFAACQPDWLAGGKKVPYDWTIYYLRKKALSRALTKQELAWLLLNFNQKRGYYQLRGEDEQSEDKGKLVEYYAVKVVDVKDTGEKKGKDTWFDVILENGMVYHRPAAEAPDWIGKTKEFIVTTDVEKDGTPKKDKDGNIKRSFRMPKEDDWTLIKKKTESDIDSSGKTVGEYIYDSLLADPSQKIKGKLVRTVERKYYKSELKRILDSQKRFIPELNDRTLYTACIEELYESNDAYRQSIASYDFTYLFVDNIIFYQRPLKSKKSLIDNCPYESRSYVDKETGEVNTAPVKCVAKSNPLFQEFRLWQFISNIRIYERQKIVDGHLKADVDVTGEFIKDEDDVVRLFDFLNDRKEIKQDTLLSTYFKVKKPKGKDSSYPYRWNYVEDKTYPCNETRALMLKGLKDAGVDEAFLDKANEYRLWHILYSVDDKQEIKKAMATFVCKYNKDEENKRKDKNNKAITLDDRFVEAFSALPPFKKEYGSYSEKAIRRLLPLMRMGKYWNVEAIDAATRVRINNIIDGVYDETIMTRVREKAVNLTDVSHFRGLPLWLVCYVVYNRHSEAKDVSRWNSPDDIDRYLSSFKQHSLRNPIVEQVITETLRTVRDIWRQYGRIDEIHVEMGRDLKNPADVRAKMSKRVAENENANLRIKALLTEFVNPDFEIDNVRPYSPSQQDMLRIYEEGVLESMEEVPDYISEIISKFSQTDEKKRPTHAEMIKYKLWLDQKYQSPYTGRTIPLARLFTDDYQIEHVIPKARYFDDSMSNKVICEAEVNQLKDRLLGYEFIKAHHGEKVSVSIGDPVTVLSVEEYEQLVQRNFRKNPTKMKKLLMDDIPDGFVERQLNDSRYISKVVKSLLSNMVREKDECEATSKNVITCNGAITDRLKREWGVSDAWNRIVLPRFERLNRITGTSQFSTPSANGHLIPDMPLSLQKGFNKKRIDHRHHAMDAIVIACTTRSHVNLLSNEAAMSKNKSTFYQLSHKLRRYESVIVTRNGETRTMSVAREFFKPWPTFTVDVEKALRNIIVSFKQNLRVINKTTNKYQCIENGKKKLKSQVKGDSWAIRKPMHKDTVYGEVNLRRIKEVQLKYAMANPKAVVDKDLKKKLMAMMELGFDLKKIKQYFEDNKDAWQDINLKKIKVYYFTKETDDRFFATRFGNDMVSLFAKVDKQSKAKDIISSITDTGIQKILLRHLEANDNDVQKAFSAEGVEQMNRNIVELNNGKPHKPIYKVRKYEQADKFAVGVKGNKGSKFVEAAKGTNLFFAVYQKETVDSTTGEIIKKRIFDTIPLKTVIDRQKNMQTVAPEEKDGAKLLFVLSPNDLVYLPTEEEISSGIINQPLERDRIYKMVSSSGNQCFYIKYNVASSIVDKFEFSPLNKMERALTGEMIKEICVPIKVDRLGNVIEINNQAL

SEQ ID NO: 2867 - protein, 1485 aa, unidentified
  REGION 1..1485: note = Description of Unknown: Cas Enzyme sequence
MKNILGLDLGTNSIGWAQVIEGDSPENSSIVQIGARVIKYDNFSKVDKNRKVSESKNPIEDFASGKSLTPNADRTLKRGMRRNLDRYQLRREHLIDALRKANIIIAESKLAEDGKNTTHETWRLRAKAVSEKIEKDELARVLLAINKKRGYKSSRKAKNEEEGHAIDGMAIAKRLYEENLTPGQLSFQLLLEGKKKLPEFYRSDLQAEFDKVWNKQRAYYPDFLTEELYIALKGQRKENTRKRILAIANVYTADIKDMEDGLKNEKTITLSNREKKKLQAYKWRNDALTQQLSQEQVAFVLTEINNDINQSSGYLGEISDRSKELFFNKLTVGQYLYNQLLQNRHTRLKNQVFYRQDYMDEFEAIWEEQRKHHPELTDELKEEIRDIIIFYQRKLKSQKGLISFCEFESKEVVINGKKSTIGARVAPKSSPLFQEFKIWQNLNHVLVRKKGSKKRKVQDIQTLFPEEAEGRELSFEEKETLFEELNLKGNLSSARIIEILGDKPADWEVNYTQLEGNRTNQALYNAYLKILEIEGYNEDLLKLSDKDDINVADLKTPAGEIKEMVKSIFDVLGIDTEILEFNAELDGKAFELQKSYQLWHLLYSAEDDDKKYSEEDILTYGQEHIGLKKKLCEKFGFQPEHAKILVNVSFQDDYGSLSTKAMRKIYPYIKENKYSTACAYVASDYKKLSQKEGDYFDVLSKKYRHSNWETKEENEQRLLKDRLDLLPKNSLRNPVVEKILNQMINVVNALLDKNRKTDPNFKFDEIRIELARELKKNASERAEMTSQINKAKGENEKIVETIRKDFGILNPTRNDIVKYKLYQELAFNGYKDLYTNTKIDYHKLFSKEYDVDHIIPQSRLFDDSFSNKVLVPRQANLDKGNRTAYDYMATKSKEAFERYLAAIESLYKEDKISKAKYQKLQKQESEIGDGFIERDLRDSQYIAKKAKEILSQITRHIVSTSGSITDRLREDWGLINVMKEINLPKYRALGMTEFEERKDGNKVEVIKDWTKRNDHRHHAMDALTVAFTKRQYISYLNYLNARYNTTHKEHQNIKGIEEKFTEWKYDDQGNKKRVFKLPIPNFRQLAKEHLESVLVSHKAKNKVVTRNKNITKSKKGELVKIELTPRGQLHKETIYGKYHYYESKEVKIDGKFDEATIATVIHPLYKKLLLERLQANDNDPKKAFTGKNALSKNPIYLDEARTETMPEKVKLTWLESDYAIRKDITPENFKDEKSLEKIIDHEVREILRQRLKEYGDAKKAFSDLDKNPIYHKNGQVIKRVRISGVKNAEPLHFKKDHLGNYLLDERGERIPVDFVSTGNNHHVAIYRDAKGNLQERVVSFMEAVLRKNYGLPLIFKNPIEDIDLVLNKGIKEELILSNLPEKDWEFLFTMKQNEMFVFPNDQTGFNPHGIDLLDPQNKKLISPNLFRVQKIANGDYWFRNHLETTVEAKSELKGVTYKRCSLIGIKGIIKVRINHLGDIVQVGEY

SEQ ID NO: 2868 - protein, 1128 aa, unidentified
  REGION 1..1128: note = Description of Unknown: Cas Enzyme sequence
MSDLVLGLDIGIGSVGVGILNKVTGEIIHKNSRIFPAAQAENNLVRRTNRQGRRLTRRKKHRIVRLNRLFEESGLITDFTKISINLNPYQLRVKGLTDELSNEELFIALKNMVKHRGISYLDDASDDGNSSVGDYAQIVKENSKQLETKTPGQIQLERYQTYGQLRGDFTVEKDGKKHRLINVFPTSAYRSEALRILQTQQEFNPQITDEFVNRYLEILTGKRKYYHGPGNEKSRTDYGRYRTSGETLDNIFGILIGKCTFYPEEFRAAKASYTAQEFNLLNDLNNLTVPTETKKLSKEQKNQIINYVKNEKAMGPAKLFKYIAKLLSCDVADIKGYRIDKSGKAEIHTFEAYRKMKTLETLDIEQMDRETLDKLAYVLTLNTEREGIQEALEHEFADGSFSQKQVDELVQFRKANSSIFGKGWHNFSVKLMMELIPELYETSEEQMTILTRLGKQKRLRLQIKQNISNKTKYIDEKLLTEEIYNPVVAKSVRQAIKIVNAAIKEYGDFDNIVIEMARETNEDDEKKAIQKIQKANKDEKDAAMLKAANQYNGKAELPHSVFHGHKQLATKIRLWHQQGERCLYTGKTISIHDLINNPNQFEVYHILPLSITFDDSLANKVLVYATANQEKGQRTPYQALDSMDDAWSFRELKAFVRESKTLSNKKKEYLLTEEDISKFDVRKKFIERNLVDTRYASRVVLNALQEHFRAHKIDTKVSVVRGQFTSQLRRHWGIEKTRDTYHHHAVDALIIAASSQLNLWKKQKNTLVSYSEDQLLDIETGELISDDEYKESVFKAPYQHFVDTLKSKEFEDSILFSYQVDSKFNRKLSDATIYATRQAKVGKDKKDETYVLGKIKDIYTQDGYDAFMKIYKKDKSKFLMYRHDPQTFEKVIEPILENYPNKEMNEKGKEVPCNPFLKYKEEHGYIRKYSKKGNGPEIKSLKYYDSKLLGNPIDITPENSKNKVVLQSLKPWRTDVYFNKNTGKYEILGLKYADLQFEKKTGTYKISQEKYNGIMKEEGVDSDSEFKFTLYKNDLLLVKDTETKEQQLFRFLSRTMPNVKYYVELKPYSKDKFEKNESLIEILGSANKSGRCIKGLGKSNISIYKVRTDVLGNQHIIKNEGDKPKLDF

SEQ ID NO: 2869 - protein, 1132 aa, unidentified
  REGION 1..1132: note = Description of Unknown: Cas Enzyme sequence
  MOD_RES 907..910: note = Any amino acid
MSDLVLGLDIGIGSVGVGILNKVTGEIIHKNSRIFPAAQAENNVERRTNRQGRRLTRRKKHRRVRLNHLFEESGLITDFTDVSINLNPYQLRVNGLTEELSNEELFIALKNMVKHRGISYLDDASDDGNSSVGDYAQIVKENSKQLETKTPGQIQLERYQKYGQLRGDFTVEEDGKKHRLINVFPTSAYRAEALRILQTQREFKPQITDEFINRYLEILTGKRKYYHGPGNEKSRTDYGRYRTSGETLDNIFGILIGKCTFYPEEYRAAKASYTAQEFNLLNDLNNLTVPTETKKLSEEQKNQIITYVKNEKAMGPAKLFKYIAKLLACDVADIKGYRIDKSDKPEIHTFEAYRKMKTIETIDVEQMEREKLDKLAYVLTLNTEREGIQEALEHEFADGTFSQEQVDELVQFRKANSSIFGKGWHNFSVKLMMELIPELYATSEEQMTILTRLGKQKRTSSSNKTKYIDEKQLTEEIYNPVVAKSVRQAIKIVNAAIKEYGDFDNIVIEMARETNEDDEKKAIKKIQEANKSEKDAAMRKAANQYNGKAELPPSVFHGHKQLATKIRLWHQQGERCLYTGKTISIHDLINNPNQFEIDHILPLSITFDDSLANKVLVYATANQEKGQRTPYQALDSMDDAWSFHELKAFVRESKALSNKKKEYLLTEEDISKFDVRKKFIERNLVDTRYASRVVLNALQEHFRARKIDTKVSVVRGQFTSQLRRHWGIDKTRDTYHHHAVDALIIAASSQLNLWKKQKNTLVSYSEDQLLDIETGELISDDEYKESVFKAPYQHFVDTLKSKEFEDSILFSYQVDSKFNRKISDATIYATRQAKVGKDKKDETYVLGKIKDIYALGTKTPSKTGFYKFLDLYKKDKSQFLMYQKDRKTWDEVIEKILEQYRPFKETXXXXKNGKEVDFNPFEKYRIKNGPIRKYSRKGNGPEIKSLKYYASKLGNHIDITPKDSSNKVVLQSVSPWRTDVYFNKSTGKYEILGLKYADLQFEKGTGTYKISEEKYNEIKKKEGVDSDSEFKFTLHKNDLLLIKDTETKEQQLFRFLSRTMPNVKHYVELKPYSRDKFEKNERLIEILGSVDKSGRCIKGLGKSNLSIYKVRTDVLGNQHIIKNEGDKPKLDF

SEQ ID NO: 2870 - protein, 1128 aa, unidentified
  REGION 1..1128: note = Description of Unknown: Cas Enzyme sequence
MSDLVLGLDIGIGSVGVGILNKVTGEIIHKNSRIFPAAQAENNLERRTNRQGRRLTRRKKHRRVRLNHLFEESGLITDFTKVSINLNPYQLRVKGLTAELSNEELFIALKNMVKHRGISYLDDASDDGNSSVGDYAQIVKENSKQLETKTPGQIQLERYQKYGQLRGDFTVEKDGRKHRLINVFPTSAYRAEALRILQTQQEFNPQITDEFINSYLEILTGKRKYYHGPGNEKSRTDYGKYTTKKDAQGQYITLNNIFGILIGKCTFYPEEFRAAKASYTAQEFNLLNDLNNLTVPTETKKLSEEQKHQIITYVKNEKAMGPAKLFKYIAKLLACDIADIKGYRIDKSDKAEIHTFEAYRKMKTIETIDIEQIEREKLDKLAYVLTLNTEREGIQEALDHEFADGTFSQEQVDELVQFRKANSSIFGKGWHSFSVKLMMELIPELYATSEEQMTILTRLGKQKTTSFSNKTKYIDEKQLTEEIYNPVVAKSVRQAIKIVNVAIKKYGDFDNIVIEMARETNEDDEKKAIQKIQKANKAEKDAAMRKAANQYNGKAELPHSVFHGHKQLATKIRLWHQQGERCLYTGKTISIHDLINNPNQFEIDHILPLSITFDDSLANKVLVYATANQEKGQRTPYQALDSMDDAWSFRELKTFVRESKALSNKKKEYLLTEEDISKFDVRKKFIERNLVDTRYASRVVLNALQEHFRAHKIDTKVSVVRGQFTSQLRRHWGIDKTRDTYHHHAVDALIIAASSQLNLWKKQKNTLVSYLEDQLLDIETGELISDDEYKESVFKAPYQHFVDTLKSKEFEDSILFSYQVDSKFNRKISDATLYATRQAKVGKDKKYETYVLGKIKDIYTQAGYDAFMKIYKKDKSKFLMYRHDPQTFEKVIEPILENYPNKEMNEKGKEVPCNPFLKYKEETGDYIRKYSKKGNGPEIKSLKYYASKLGNHIDITPKDSNNKVVLQSVSPWRADIYFNKTTGKYEILGLKYADLQFEKGTGTYKISQEKYNNIKKKEGVDSDSEFKFTLYKNDLLLIKDTETKEQQLFRFLSRTKPNVKHYVELKPYDKQKFEGGESLIKVLGNVAKGGQCIKGLGKANLSIYKIRTDVLGNQHIIKNEGDKPKLDF

SEQ ID NO: 2871 - protein, 1108 aa, unidentified
  REGION 1..1108: note = Description of Unknown: Cas Enzyme sequence
MSDLVLGLDIGIGSVGVGILNKVTGEIIHKNSRIFPAAQAENNLERRTNRQGRRLTRRKKHRRVRLNHLFEESGLITDFTKVSINLNPYQLRVKGLTAELSNEELFIALKNMVKHRGISYLDDASDDGNSSVGDYAQIVKENSKQLETKTPGQIQLERYQKYGQLRGDFTIEEDGKKHRLINVFPTSAYRAEALKILQTQQEFNPQITDEFINSYLEILTGKRKYYHGPGNEKSRTDYGKYTTKKDAQGQYITLNNIFGILIGKCTFYPEEYRAAKASYTAQEFNLLNDLNNLTVPTETKKLSEEQKHQIITYVKNEKAMGPAKLFKYIAKLLACDIADIKGYRIDKSDKAEIHTFEAYRKMKTLETIDIEQIEREKLDKLAYVLTLNTEREGIQEALDHEFADGTFSQEQVDELVQFRKANSSIFGKGWHSFSVKLMMELIPELYATSEEQMTILTRLGKQKTTSSSNKTKYIDEKQLTEEIYNPVVAKSVRQAIKIVNAAIKKYGDFDNIVIEMARETNEDDEKKAIQKIQKANKAEKDAAMRKAANQYNGKAELPHSVFHGHKQLATKIRLWHQQGERCLYTGKTISIHDLINNPNQFEIDHILPLSITFDDSLANKVLVYATANQEKGQRTPYQALDSMDDAWSFRELKAFVRESKALSNKKKEYLLTEEDISKFDVRKRFIERNLVDTRYASRVVLNALQEHFRTHKIDTKVSVVRGQFTSQLRRHWGIEKTRDTYHHHAVDALIIAASSQLNLWKKQKNTLVSYSEDQLLDIETSELISDDEYKESVFKAPYQHFVDTLKSKEFEDSILFSYQVDSKFNRKISDATIYATRQAKVGKDKKDETYVLGKIKDIYSQTGYDAFIKIYQKDKSKFLMYRHDLQSFEKVIEPILENYPNKEMNEKGKEVPCNPFSEIKSLKYYDSKLGNHIDITPKNSNNKVVLQSVSPWRADVYFNKTTGKYEILGLKYADLQFEKGTGTYKISQEKYNAIKKKEGVDSDSEFKFTLYKNDLLLIKDTETKEQQLFRFLSRTMPNKKHYVELKPYNKQKFEGNESLINVLGAVAKGGQCLKGMSKTNISIYKVRTDVLGNQHIIKNEGDKPKLDF

SEQ ID NO: 2872 - protein, 1133 aa, unidentified
  REGION 1..1133: note = Description of Unknown: Cas Enzyme sequence
VRSFIMNGLVLGLDIGIASVGVGILKKDTGEIIHANSRLFPAATADNNVERRGFRGGRRLTRRKKHRSVRLHDLFEEYGLLTDFSKVSINLNPYRLRVQGLDKRLTNEELFIALKNIIKRRGISYLDDASEDGGTVSSDYGKAVEENRKLLAQQTPGQIQLDRFEKYGQVRGDFTVVENGEKRRLINVFSTSAYRKEAERILRKQQEFNNKITEGFIEDYLTILTGKRKYYHGPGNEKSRTDYGRYTTKKDSKGEYITLDNIFGILIGKCIFYPDEYRASKASYTAQEFNLLNDLNNLTVPTETKKLSEEQKKTIIEYAKTAKSLGAATLLKYIAKMIGASVDQIHGYRIDPNKKPEMHTFEAYRKMQSLETIRVEELPRKVIDELAHILTLNTEREGIEEAINAKLKDIFSQDQVLELVQFRKNNSSLFSKGWHNFSLKLMMELIPELYETSEEQMTILTRLGKQKSKETSKRTKYIDEKELTEEIYNPVVAKSVRQAIKIINEATKRYGIFDNIVIEMARENNEDDAKKEYIKRQKANLDEKNAAMEKAAFQYNGKKELPANVFHGHKELATKIRLWHQQGEKCLYTGKNIPISDLIQNRYKYEIDHILPLSLSFDDSLSNKVLVIATANQEKGQRTPFQALDSMDDAWSYREFKSYVKDSKLLSNKKKEYLLTEEDISKIEVKQKFIERNLVDTRYSSRVVLNALQDFYKEHQFDTTISVVRGQFTSQLRRKWGLEKSRETYHHHAVDALIIAASSQLRLWKKQNNPLISYKEEQFVDQETGEIISLSDDEYKELVFKAPYDHFVDTLKSKKFEDNILFSYQVDSKYNRKISDATIYATRKAKLDKDKSEETYVLGKIKDIYSQAGYDAFIKIYNKDKSRFLMYHKDPQTFEKVIEEILRTYPSKELNEKNKEVPCNPFEKYRQENGPIRKYSRKGNGPEIKSLKYYDNKLGNHIDITPDKSNNKVVLQSINPWRTDVYYNNKSKKYEFLGLKYSDLYFEKGTGKYKISKNKYDVIKKLEGVDEKSEFKFTLCKNDLILIKDVDTGQEQLFRFLSRNNKGKHQVQLKPIDKSDFEKGEKLIDIFDTVPNSTTQCVKGLNKPNISIYKVKTDILGNKHFIKKEGEEPKLKF

SEQ ID NO: 2873 - protein, 1127 aa, unidentified
  REGION 1..1127: note = Description of Unknown: Cas Enzyme sequence
MNGLVLGLDIGIASVGVGILEKDSGKIIHANSRIFPAATADNNVERRTSRQARRLNRRKKHRSVRLHDLFEEYGLLTDFSKVSINLNPYQIRVQGLDKRLTNEELFIALKNIVKRRGISYLDDASEDGGAVSSDYGKAVEENRKLLAQQTPGQIQLDRFEKYGQVRGDFTVVENGEKRRLINVFSTSAYRKEAERILRKQQEFNNKITEGFIEDYLTILTGKRKYYHGPGNEKSRTDYGRYTTKKDSQGEYITLDNIFGILIGKCTFYPDEYRASKASYTAQEFNLLNDLNNLTVPTETKKLSVEQKKTIVEYAKTAKTLGASTLLKYIAKLIGVSVDQIHGYRIDPNEKPEMHTFEVYRKMQSLETIRVEELPRKVIDELAHILTLNTEREGIEEAINAKLKDIFSQDQVLELVQFRKNNSSLFSKGWHNFSLKLMMELIPELYETSEEQMTILTRLGKQKSKETSKRTKYIDEKELTEEIYNPVVAKSVRQAIKIINEATKRYGIFDNIVIEMARENNEEDAKKEYIKRQKANLDEKNAAMEKAAFQYNGKKELPDNVFHGHKELATKIRLWHQQGEKCLYTGKNIPISDLIQNRYKYEIDHILPLSLSFDDSLSNKVLVLATANQEKGQRTPFQALDSMDYAWSYREFKSYVKDSKLLSNKKKDYLLTEEDISKIEVKQKFIERNLVDTRYSSRVVLNALQDFYKEHQFDTTISVVRGQFTSQLRRKWGIEKSRETYHHHAVDALIIAASSQLRLWKKHNNPLISYKEEQFVDSETGEIISMSDDEYKELVFKAPYDHFVDTLKSKKFEDSILFSYQVDSKYNRKISDATIYATRKAKLDKDKSEETYVLGKIKDIYSQAGYDTFIKIYNKDKSRFLMYHKDPQTFEKVIEEILRTYPSKELNEKNKEVPCNPFEKYRQENGPIRKYSRKGNGPEIKSLKYYDNKLGNHIDITPNESMNQVVLQSLKPWRTDVFFNHQTEKYELMGLKYSDLNFEKGSGKYSISLEKYNSIKMNEGVSEESEFKFTLYKNDLILIKDALTKEAQIFRYGSRNDTSKHYVELKPYDMSKFEGDERLIKVLGTVAKGGRCIKGLNKKDISIFKVKTDVLGNKHFIKKEGEEPKLKF

SEQ ID NO: 2874 - protein, 1127 aa, unidentified
  REGION 1..1127: note = Description of Unknown: Cas Enzyme sequence
MNGLVLGLDIGIASVGVGILEKNSGKIIHANSRLFPAATADNNVERRKNRQARRLNRRKKHRGVRFQDLFEDYGLLTDFSKVSINFNPYRLRVDGLNQQLTNEELFIALKNIVKRRGISYLDDASEDGGTVSSDYGKAVEENRKLLAEKTPGQIQLERFEKYGQVRGDFTVVENGEKLRSINVFSTSAYKKEAERILRKQQDFNNQITDEFIEDYLKILTGKRKYYHGPGNEKSRTDYGRYTTHKDSKGEYVTLDNIFGVLIGKCTFYPEEYRASKASYTAQEFNLLNDLNNLTVPTETKKLSEEQKKVIVEYAKEAKTLGASTLLKYIAKMIDASVDQIRGYRVDVNNKPEMHTFEVYRKMQSLETISVEELSRNVLDELAHILTLNTEREGIEEAINTKLKDSFSQDQVLELVQFRKNNSSLFSKGWHNFSLKLMMELIPELYETSEEQMTILTRLGKQKSKETSKRTKYIDEKELTEEIYNPVVAKSVRQAIKIINEATKKHGIFDNIVIEMARENNEEDAKKDYIKRQKANQDEKNAAMEKAAFQYNGKKELPGNIFNGHKELATKIRLWHQQGEKCLYTGKTIPISDLIHNQYKYEIDHILPLSLSFDDSLSNKVLVHATANQEKGQRTPFQALDSMDDAWSYREFKSYVKDLKSLSNKKKDYLLTEEDISKIEVKQKFIERNLVDTRYSSRVVLNALQDFYKSHQFDTTISVVRGQFTSQLRRKWGLEKSRETYHHHAVDALIIAASSQLRLWKKQNNPLITYKEGQFVDSQTGEIISLTDDEYKELVFKAPYDHFVDTLRSKTFEDSILFSYQVDSKYNRKISDATIYATRKAKLDKDKSEETYVLGKIKDIYSQAGYDAFIKIYNKDKSKFLMYHKDPQTFEKVIEEILRTYPSKELNDKNKEIPCNPFEKYRQENGPIRKYSKKGNGPEIKCLKYYDNKLGNYIDITPDGSDNQVVLQSLKPWRTDVYFNHQTKKYELMGLKYSDLSFEKGSGKYSISNEKYNSIKIIEGIDEQSEFKFTLYKNDLILIKDSENNEQKLFRFNSRNDTAKHYIELKPYDKAKFDGEQELITILGNVAKGGRCLKGLNKSNISIFKVKTDVLGKKHIIKKEGDEPKLKF

SEQ ID NO: 2875 - protein, 1139 aa, unidentified
  REGION 1..1139: note = Description of Unknown: Cas Enzyme sequence
MSDLVLGLDIGIGSVGVGILNKVTGEIIHKNSRIFPAAQAENNLVRRTNRQGRRLTRRKKHRRVRLNHLFEESGLITDFTKVSINLNPYQLRVKGLIDELSNEEMFIALKNMVKHRGISYLDDASDDGNSSVGDYAQIVKENSKQLETKTPGQIQLERYQKYGQLRGDFTVEEDGKKHRLINVFPTSAYRAEALRILQTQQEFNPQITDEFINRYLEILTGKRKYYHGPGNEKSRTDYGRYTTKKDSEDEYITLDNIFGILIGKCTFYPEEYRAAKASYTAQEFNLLNDLNNLTVPTETKKLSEEQKNQIITYVKNEKAMGPTKLFKYIAKLLSCDVADIKGYRIDKSDKAEIHTFEAYRKMKTIETIDIEQMDREKLDRLAYVLTLNTEKEGIQEAIEHEFADGTFSQEQVDELVQFRKANSSIFGKGWHNFSVKLMMELIPELYATSEEQMTILKRLGKQKTTSSSNKTKYIDERLLTEEIYNPVVAKSVRQAIKIVNAAIKEYGDFGNIVIEMARETNEDDEKKAIQKIQKANKDEKDAAMLKAANQYNGKAELPHSVFHGHKQLATKIRLWHQQGERCLYTGKTISIHDLINNPNQFEIDHILPLSITFDDSLANKVLVYATANQEKGQRTPYQALDSMDGAWSFRELKAFVRESKTLSNKKKEYLLTEEDISKFDVRKKFIERNLVDTRYASRVVLNALQEHFRAHKIDTKVSVVRGQFTSQLRRHWGIEKTRDTYHHHAVDALIIAASSQLNLWKKQKNTLVNYSENQLLDIETGELISDDEYKESVFKAPYQHFVDTLKSKEFEDSILFSYQVDSKFNRKISDATIYATRKAKLDKEKKEYTYTLGKIKDIYALGTKTPSKTGFYKFLDLYKKDKSQFLMYQKDRKTWDEVIEKILEQYRPFKEKDKNGKEVDFNPFEKYRIENGPIRKYSRKGNGPEIKSLKYYDNLLGRFVDITPSESKNPVALLSLNPWRTDVYYNTETRKYEFLGLKYADLCFEKGGSYGISKVKYNKIREKEGIGKNSEFKFTLYKNDLILIKDTETNCQQIFRFWSRTGKDNPKSFEKHKLELKPYEKTRFEKGEELKVLGKVPPSSNRLQKNMQIENLSIYKVRTDVLGNQHIIKNEGDKPKLDF

SEQ ID NO: 2876 - protein, 1138 aa, unidentified
  REGION 1..1138: note = Description of Unknown: Cas Enzyme sequence
MNGLVLGLDIGIASVGVGILEKNSGKIVHASSRIFPAATADNNVERRKNRQARRLHRRKKHRGVRLKDLFEDYGLLTDFSKVSINLNPYRLRVDGLDQQLTNEELFIALKNIVKRRGISYLDDASEDGGTVSSDYGKAVEENRKLLAEKTPGQIQLERFEKYGQLRGDFTVVENGEKCRLINVFSTSAYKKEAERILRKQQDFNNQITDEFIEDYLKILTGKRKYYHGPGNEKSRTDYGRYTTHKDSKGEYVTLDNIFGVLIGKCTFYPNEYRASKASYTAQEFNLLNDLNNLTVPTETKKLSEEQKKTIIEYAKSAKTLGASTLLKYIAKMIDTSVDQIRGYRVDVNNKPEIHTFEVYRKMQSLETISVGELSRNVLDELAHILTLNTEREGIEEAINTKLKDSFSQDQVLELVQFRKNNSSLFSKGWHNFSLKLMMELIPELYETSEEQMTILTRLGKQKSKETSKRTKYIDEKELTEEIYNPVVAKSVRQAIKIINEATKKHGIFDNIVIEMARENNEEDAKKDYIKRQKANQDEKYAAMEKAAFQYNGKKELPDSIFHGHKELATKIRLWHQQGEKCLYTGKNIPISDLIHNQYMYEIDHILPLSLSFDDSLSNKVLVLATANQEKGQRTPFQALDSMDDAWSYREFKSYVKESKLLGNKKKEYLLTEEDISKIEVKQKFIERNLVDTRYSSRVVLNALQDFYKAHKFDTTISVVRGQFTSQLRRKWRLEKSRETYHHHAVDALIIAASSQLRLWKKQNNPLIAYKEGQFVDSETGEIISLSDDEYKELVFKAPYDHFVDTLSSKTFEDSILFSYQVDSKFNRKISDATIYATRKAKLDKEKKEYTYTLGKIKDIYSLGTKTPSKTGFYKFLDLYNKDKSQFLMFQKDRKTWDEVIEKIIEQYRPFKEYDKTGKLVDFNPFEKYRQENGPIRKYSKKGNGPEIKSLKYYDNKLGNHIDITPDGSDNQVVLQSLKPWRTDVYFNHQTKKYELMGLKYSDLSFEKGSGKYSISIEKYNSIKIIEGVDEQSEFKFTLYKNDLILIKDVEKGQEQLFRFLSRNNKGKQQVQLKPLNKSDFEKGEKLIDIFDTVPNSTTQCVKGLNKSNISIFKVKTDVLGNKHFIKKEGDEPKLKFKK

SEQ ID NO: 2877 - protein, 1127 aa, unidentified
  REGION 1..1127: note = Description of Unknown: Cas Enzyme sequence
MSDLVLGLDIGIGSVGVGILNKVTGEIIHKNSRIFPAAQAENNVVRRTNRQGRRLTRRKKHRRVRLNHLFEESGLITDFTKVSINLNPYQLRVKGLIDELSNEEMFIALKNMVKHRGISYLDDASDDGNSSVGDYAQIVKENSKQLETKTPGQIQLERYQKYGQLRGDFTVEEDGKKHRLINVFPTSAYRAEALRILQTQQEFNPQITDEFINRYLEILTGKRKYYHGPGNEKSRTDYGRYTTKKDSEDEYITLDNIFGILIGKCTFYPEEYRAAKASYTAQEFNLLNDLNNLTVPTETKKLSEEQKNQIITYVKNEKAMGPAKLFKYIAKLLSCDVADIKGYRIDKSDKAEIHTFEAYRKMKTLETIDVEQMEREKFDRLAYVLTLNTEKEGIQEAIEHEFADGTFNQEQVDELVQFRKANSSIFGKGWHNFSVKLMMELIPELYATSEEQMTILTRLGKQKTTSSSNKTKYIDERLLTEEIYNPVVAKSVRQAIKIVNAAIKEYGDFDNIVIEMARETNKDDEKKAIQKIQKANKDEKDAAMLKAANQYNGKAELPHSVFHGHKQLATKIRLWHQQGERCLYTGKTISIHDLINNPNQFEIDHILPLSITFDDSLANKVLVYATANQEKGQRTPYQALDSMDDAWSFRELKAFVRESKALSNKKKEYLLTEEDISKFDVRKKFIERNLVDTRYASRVVLNALQEHFRAHKTDTKVSVVRGQFTSQLRRHWGIEKTRDTYHHHAVDALIIAASSQLNLWKKQKNTLVSYSEGQLLDIETGELISDDEYKESVFKAPYQHFVDTLKSKEFEDSILFSYQVDSKFNRKISDATIYATRQAKVGKDKKDETYVLGKIKDIYIQAGYDAFMKIYKKDKSKFLMHRHDPQTFEKVIEPILENYPNKEMNEKGKEVSCNPFLKYKEEHGDYIRKYSKKGNGPEIKSLKYYDSKLGNHIDITPKDSNNKVVLQSLKPWRTDVYFNKNTGKYEILGLKYSDMKFEKGTGKYSISKEKYENIMVREGVDKSSEFKFTLYKNDLLLLKDSENGEQILLRFTSRNDTSKHYVELKPYNRQKFEGSEYLIKSLGTVAKGGQCIKGLGKDNLSIYKVRTDVLGNQHIIKNEGDKPKLDY

SEQ ID NO: 2878 - protein, 1122 aa, unidentified
  REGION 1..1122: note = Description of Unknown: Cas Enzyme sequence
MNGLVLGLDIGIASVGVGILEKNSGKIIHSSSRLFPSATADNNVERRNSRQARRLNRRKKHRGVRLHDLFEDYDLLTDFSKVSINLNPYRLRVQGLDNPLTTEELFIALKNIVKRRGISYLDDASEDGGAVSSDYGKAVEENRKLLAEQTPGQIQLERFEKYGQVRGDFTVVENGEKRRLINVFSTSAYRKEAERILRKQQEFNNQITDEFIENYLKILTEKRKYYHGPGNEKSRTDYGRFRTDGTTLDNIFGILIGKCTFYPDEYRASKASYTAQEFNLLNDLNNLTVPTETKKLSEEQKKTIVEYTKSAKTLGASTLLKYIAKMLDASVDQIRGYRVDVNNKPEMHTFEVYRKMQSLETIPVGELSREVLDELAHILTLNTEREGIEEAINTKLVDVFSQDQVLELVQFRKNNSSLLSNGWHNFSLKLMMELIPELYETSEEQMTILTRLGKQKSKEVSKRTKYIDEKEVTEEIYNPVVAKSVRQAIKIINEATKKYGIFDNIVIEMARENNEEDAKKDYIKRQKANQDEKNTAMEKAAFQYNGKKELPDSIFHGHKELATKIRLWHQQGEKCLYTGKNIPISDLIHNQYKYEIDHILPLSLSFDDSLSNKVLVLATANQEKGQRTPFQALDSMDDAWSYREFKSYVKDSKLLSNKKKDYLLTEEDISKIEVKQKFIERNLVDTRYSSRVVLNALQDFYKAHKFDTTISVVRGQFTSQLRRKWGLEKSRDTYHHHAVDALIIAASSQLRLWKKQANPLISYKEDQFVDSETGEIISLTDDKYKELVFKAPYAHFVDTLSSKKFEDSILFSYQVDSKYNRKISDATIYSTRKAKLDKDKSEETYVLGNIKDIYSQAGYDAFIKIYNKDKSKFLMYHKDPHTFEKVIEEILRTYPSKEFNEKNKEVPCNPFEKYRQENGPIRKYSRKGNGPEIKSLKYYDNKLGNHIDITPDGSDNQVVLQSLKPWRTDVYFNHQTKKYELMGLKYSDLSFEKGSGKYSISIEKYNSIKINEGVDEQSEFKFTLYKNDLILIKDVEKGQEQLFRFLSRNNKGKHQVQLKPLNKSDFEKGEKLIDIFDTVPNSTTQCVKGLNKSNISIFKVKTDVLGNKHFIKKEGDEPKLKF

SEQ ID NO: 2879 - protein, 1121 aa, unidentified
  REGION 1..1121: note = Description of Unknown: Cas Enzyme sequence
MNGLVLGLDIGIASVGVGILEKNSGKIIHTNSRIFPAATADSNVVRRSSRQARRLNRRKKHRRVRFQDLFEDYGLLTDFSKVSINLNPYRLRVDGLNQQLTNEELFIALKNIVKRRGISYLDDASEDGGTVSSDYGKAVEENRKLLAEQTPGQIQLDRFERYGQIRGDFTVLENGEKCRLINVFSTSAYKKEAERILRKQQEFNSKITDEFIEDYLKILTGKRKYYHGPGNEKSRTDYGRFRKDGTTLDNIFGILIGKCTFYPNEYRASKASYTAQEFNLLNDLNNLSVPTETKKLSEEQKKTIIEYAKSAKTLGASTLLKYIAKMIDASVDQIHGYRVDVNNKPEMHTFEVYRKMQSLETISVGELSRNVLDELAHILTLNTEREGIEEAINTKLMGVFSQDQVLELVQFRKNNSSLFSKGWHNFSLKLMMELIPELYETSEEQMTILTRLGKQKNKETSKRTKYIDEKEVTEEIYNPVVAKSVRQAIKIINEATKKYGIFDNIVIEMARENNEEDAKKDYIKRQKANQDEKNAAMEKAAFQYNGKKELPDNIFHGHKELATKIRLWHQQGEKCLYTGKNIPISDLIHNQYKYEIDHILPLSLSFDDSLSNKVLVLATANQEKGQRTPFQALDSMDDAWFYREFKSYVKDSKLLSNKKKDYLLTEEDISKIEVKQKFIERNLVDTRYSSRVVLNALQDFYKSHQFDTTISVVRGQFTSQLRRKWGLEKSRETYHHHAVDALIIAASSQLRLWKKQNNPLISYKEGQFVDSETGEIISLSDDEYKELVFKAPYDHFVDTLRSKTFEDSILFSYQVDSKYNRKISDATIYATRKAKLDKDKSEETYVLGKIKDIYSQAGYDAFIKIYNKDKSKFLMYHKDPQTFEKVIEEILRTYPSKELNDKNKEIPCNPFEKYRQENGPIRKYSKKGNGPEIKSLKYYDKNIPESFINITPSNSNNKVLLRQLYPWRTDVYFNPQTDKYELLGLKYADLQFEKATGKYSITIDKYNEIKEKEGVSKESEFKFTLYKNDLLLIKDTKNNEEQIFRFLSRTMPNQNHYVELKPYDKGNFEGKEKIKVLKMTSNGRCIKGLGKKYLSIYKVKTDVLGNKHFIKKEGDEPKLFF

SEQ ID NO: 2880 - protein, 1128 aa, unidentified
  REGION 1..1128: note = Description of Unknown: Cas Enzyme sequence
MMNGLVLGLDIGIASVGAGILKKDTGEIIHANSRLFPAATADNNVERRGFRGGRRLTRRKKHRSVRLHDLFEEYGLLTDFSKVSINLNPYRLRVQGLDNQLTNEKLFIALKNIVKRRGISYLDDASEDGSTVSSDYGKAVEENRKLLSEQTPGQIQLDRFEKYGQLRGDFTVLENSEKRRLINVFSTYAYRKEAERILRKQQEFNNKITDEFIEDYLTILTGKRKYYHGPGNEKSRTDYGRYTTKKDSEGKYITLDNIFGVLIGKCTFYPDEYRASKASYTAQEFNLLNDLNNLTVPTETKKLSEEQKKTIIEYAKTAKTLGASTLLKYIAKLIGASVDQIHGYRIDPNKKPEMHTFEVYRKMQSLETIKVEELPRKVIDELAHILTLNTEREGIEEAINAKLKDTFSQDQVLELVQFRKNNSSLFSKGWHNFSLKLMMELIPELYETSEEQMTIITRLGKQKSKEISKRTKYIDEKELTEEIYNPVVAKSVRQAIKIINEATKKYGIFDNIVIEMARENNEEDAKKDYIKRQKANLDEKNAAMEKAAFQYNGKKELPDSIFHGHKELATKIRLWHQQGEKCLYTGKNIPISDLIQNQYKYEIDHILPLSLSFDDSLSNKVLVLATANQEKGQRTPFHALDSMDDAWSYREFKSYVKDSKLLGNKKKDYLLTEEDISKIEVKQKFIERNLVDTRYSSRVVLNALQDFYKNHHFDTTISVVRGQFTSQLRRKWGLEKSRETYHHHAVDALIIAATSQLRLWKKQNNPLISYKEGQFVDSETGEILSLSDDEYKELVFKAPYDHFVDTLRSKTFEDSILFSYQVDSKLNRKISDATIYATRKAKLDKDKSEETYVLGKIKDIYSQAGYDAFIKIYNKDKSRFLMYQNDPQTFKTVIEEILRTYPSKELNEKNKEVPCNPFEKYRQENGPIRKYSRKGNGPEIKSLKYYDNKLGNHIDITPNESMNQVVLQSLKPWRTDVFFNHQTEKYELMGLKYSDLNFEKGSGKYSISLEKYNSIKMNEGVSEESEFKFTLYKNDLILIKDALTKEAQIFRYGSRNDTSKHYVELKPYDMSKFEGDEKLIKVLGTVAKGGRCIKGLNKKDISIYKVKTDVLGNKHFIKKEGEEPKLKF

SEQ ID NO: 2881 - protein, 1422 aa, unidentified
  REGION 1..1422: note = Description of Unknown: Cas Enzyme sequence
MTQKILGLDLGTNSIGSSVRNLDLSDDLKGQLEFFSSDIFRSSVNKESNGREYSLAAQRSAHSRSRRLNEARRRKLWATLDLLITYGFCPMNPESLIRWRTYDKQKGFFREYPVDDKEFNAWILLDFDGDGKPDYSSPYQLRRELVTRQFDFERSIERYKLGRALYHIAQHRGFKSSKGETLLQQETNSKQSLTDETADVAGEMKASEEKLSKGLSTYMKENSLLTVGAAFAQLEDEGVRIRNNNDYRAIRSQFQQETEIIFKFQQSLSVENEFYERLVSEKKNIGTIFYKRPLRSQRGNVGKCTLERTKSRCAIGHPSFEKFRAWSLINNIKVRMPEEEQVEQLPIKLRFELYNDCFLAFVRTEFKFEDIRKYIEKRLGVHFSYNDKTINYKDSTSIAGCPITARFRKLLGEDWESFRVDGQKQRQAHGKNNASFHTVSYTVEDIWHFCYDAEEPEVVLSFAQDSLKWEKKKAEELVRIWSAIPQGYAMLSQKAIRNINKMLILGMKYSDAVLLAKVPEIVEITDGEILSVTEDYHRVEAQVGYEKQINNIVNALIAKYKSVSEEYRFADHNYEYQLDKSDDEDIIRQIENSLGAKRWSLMDADEQTDILQKVRDRYQGFFRSHDRKFVVSPKLGDSFEKYLTKKFPMVEREQWKKLYHPSQIAIYRPVSAGRDRSALRLGNPDIGAIKNPTVLRVLNTLRKRVNQLLDDGLIFPDETRVVVETARELNDANRKWALDTYNRIRHDENEKIRKIIEEFYPKRDIISTDDIDKARYVIDQREVDYFTESKTYNKDIKKYKLWLEQGGQCMYTGRTINLSNLFDPNAFDIEHTIPVSLSFDSSDMNQTLCDAHYNRFIKKNHIPTDMPNYDKAVTIDGKEYPAITSQLQRWIDRVERLNRNVEYWKGQARRAQNKDRKDQCMREMHLWKMELEYWKKKLEHFTVTEVTDGFKNSQLVDTRVITRHAVLYLKSIFTHVDVQRGDVTAKFRKILGIQSVDEKKDRSLHSHHAIDATTLTIIPASAKRERMLEFFAKIEEVNKMLSFSGNEDRTGLQQELEGLKNKLQMEVKACRIGHNVSKIGTFINDNIIINHHIKNQALTPVRRRLRKKGHIVGGVDSPRWQTGDVLRGEIHKASYYGAITQFAKDKEGKVLMKEGRPQVNPTIKFVIRRELKYKKSAADSGFASWDDLGKAIVDKELFALMKGQFPEDTSFKDACEQGIYMIKKGKNGMPDKKLYRIRHIRCNTVQKNALKIKEQTYKSEKEYKHYFYAAVGDLYAMCCYTNGKVREFRIYSLYDVSCHRKSGIEDIPEFITDKKGNRLMLDYKLHTGDMILLYKDNPEELYDLDNVKLSKLLYKINGFENDGLRIKMINHLVVKEAVGESVKDYTKLPDIIRCGVKTIKFLIMGEKRDFVIKNGKIIFNHR

SEQ ID NO: 2882 - protein, 944 aa, unidentified
  REGION 1..944: note = Description of Unknown: Cas Enzyme sequence
VSFCEFEKKEKVIRVKHTNKEGVEEFVEKTITIGPKVAPKSSPIFQVCKVWESIHNIRLYHPDGTERKLEQEEKQKLFDYLQKNDKLMLKNLYKILGGKDKDEEEKLWCDKLLEKGIAGNTTAAILRKVLKGYKQYEGLLRFDLTIRDSYEADEDGVIRPIIDESYQNEPLYKLWHILYSIEERAEMRSALIGQLGIKVEDLDAGLMDALYKIDFVKQGYGNKSAKFICKLLPHLQEDKMYSEAAEAAGVRHSDSMTAQERDERSLLEEIPLLQKNALRQPVVEKILNQMINLVNALKREHGEIDEVRVELARELKMSREEREEATKSNNAREKKNKAIAEDIHMKGDGLTPTKSRIQKYRLWEESAESCIYCGKHVDLVQFLRGEEIEVEHIIPRSILFDDSMSNKVCACRSCNQEKGNRFAMEYIQSKGWERGYIERVDSLFQGKKISYSKRQRLLMLPKDLPEDFIERHLRLSQYISREAQGILRKGIRLVSASEGGVTAKLRQLWGYDNILRDLNLERYRSMGETEVVTVEHRDGQRTDERIKDWSKRKDHRHHAVDALIVACTRQSYIQRLNRVNAEADREEMDAFIKEQQQEHKLSKKEKLSLLEHWLIRQPHFTTGEVTKHVEGILVSLRPGKRTISRGRNIYKRSGKTDVQRGVLIPRGALSEETVYGVIQAGGKDEIVCKYALQGLKAKDVDYIVDKALQEKVRERLSQYGEKQAFAEPLYLDEAKTQEVRSVRCFTGKDQSKLVPLRYNIEGEAVGFVAPGNNHHLALYKDDDGNVVESIVTFWQAVERARYGLPIVVVNPREVMEKALTIPELPESVLKALPASNLRLMEVLRMNDMFLIGMKDEEIKAAIKGEDYSTLSRYLYRVQKLSSMYYVFRYHLETEVKDEKKAEVKDEEEEEVKIPKFYRVQSMKAYVKLNPRKVKIDILGRISLA

SEQ ID NO: 2883 - protein, 1183 aa, unidentified
  REGION 1..1183: note = Description of Unknown: Cas Enzyme sequence
MGKKVLGLDLGVGSIGWCLITLDKDEKPQSILGMGSRIVPLSADDATEFTQGKAITKNKMRTVARTIRKGMDRYQLRREALKKVLREHGMLPDEVLIKLPLLELWELRARAATPGEQLSLTELGRVLLHINQKRGYKHAKADEAAEAETNKGKETGYVAQVKGRYQILKEKGQTIGQHFAGELRANQQTAPRGTYYTYRIKEQVYPREAYIEEYDRIMAVQRVFYPELLTDALIGRIRDRIIFYQRPLKSCKQLVSFCEFEKKEKVIRVKHTNKEGVEELVEKTITIGPKVAPKSSPIFQVCKVWESIHNIRLYHPDGTERKLEQEEKQKLFDYLQRNDKLTLKNLYKILGIKDKDEEDKLWCDKLLEKGIGGNTTAAILRKALKGYDQYEGLLRFNLTTRDSHEVNVIRPIIDESYQNEPLYKFWHILYSIEDRAEMRSALIGQLGIKAEDLDGGLMDALYKIDFVKQGYGNKSAKFICKLLPHLQEDKMYSEAAEAAGMRHSDSMTAQERDERSLLEEIPLLQKNALRQPVVEKILNQMINLVNALKREHGEIDEVRVELARELKMSREEREEATKTNNAREKKNKDIAEDIKVYNVTPTKSRIQKYRLWEESDNSCIYCGKHVDVVQFLRGEEIEVEHIIPKSILFDDSLSNKVCACRSCNQEKGNRFAMEYIQAKGWEEKYTGRLNALFESKKISYSKRQRLLMLPKDLPEDFIERHLRLSQYISREAQGILRKGIRLVSASEGGVTAKLRQLWGYDNILRDLNLERYRSMGETEVVIVEHRDGQRTDERIKDWSKRKDHRHHAVDALVVACTRQSYIQRLNKVNAEADRQEMDAFIKEHQEQKLSKKEKLSLLEHWLIRQPHFTTKEVMKHVEEILISFRPGKRTVTRGRNVYKRSGKTDVQRDVLIPRGALSEETIYGVIQAGGKDEVVCKYALRGLKVKDVDYIVDKALQEKVRERISQYGEKQAFAEPLYLDEAKTQEVRSVRCFTGKDQSKLVPLRYNVEGEAVGFVAPGNNHHLALYKDDDGNVVESIVTFWQAVERARYGLPIVVVNPREVMEKALAIPGLPESVLKALPASNLRLMEVLRMNDMFLIGMKDGEIQAAIEGEDYPTLSRHLYRVQKLATHDYVFRYHLETTLDGKDNVGEIPKSYRAQSLKAYVKLNPRKVKIDLLGRISLV

SEQ ID NO: 2884 - protein, 1185 aa, unidentified
  REGION 1..1185: note = Description of Unknown: Cas Enzyme sequence
MGKKVLGLDLGVGSIGWCLITLDKDEKPQSILGMGSRIVPLSADDATEFTQGKAISKNKMRTMARTIRKGMDRYQLRREALKKVLREHGMLPDEALIKLPLLELWELRARAATPGEQLSLTELGRVLLHINQKRGYKHAKADEAAEAETESKAKKEKESYVAQVKGRYQALKEKGQTIGQHFAGELRANQQTTPRGTYYTYRIKEQVYPREAYIEEYDRIMAVQRTFYPELLTDALIGRIRDRIIFYQRPLKSCKQLVSFCEFEKKEKVIRVKHTNKEGVEELIEKTITIGPKVAPKSSPIFQVCKVWESIHNIRLYYPDGTERELVQEEKQKLFDYLQKNDKLSLTMLRKELKIKPKDKLWCDKLLVNGIAGNTTATILRKALKGYDQYEGLLRFNLTTRDSHEVDVIRPIIDESYQDEPLYKFWHILYSIEDRAEMRSALIGQLGIKAEDLDGGLMDALYKIDFVKQGYGNKSAKFICKLLPHLQEGKMYSEAAKAAGIRHSDSMTAQERDERSLLDEIPLLQKNALRQPVVEKILNQMINLVNALKREHGEIDEVRVELARELKMSREEREEATKSNNAREKKNKDIAEDIKVYNVTPTKSRIQKYRLWEESDNSCIYCGKHVDVVQFLRGEEIEVEHIIPKSILFDDSLSNKVCACRSCNQEKGNRFAMEYIQAKGWEEKYTGRLNALFESKKISYSKRQRLLMLPKDLPEDFIERHLRLSQYISREAQGILRKGIRLVSASEGGVTAKLRQLWGYDNILRDLNLERYRSMGETEVVIVEHRDGQRTDERIKDWSKRKDHRHHAVDALIVACTRQSYIQRLNRVNAEEDRQEMDAFIKEQQQEQKPSKKEKLSLLEHWLIRQPHFTTKEVMKHVEEILISFRPGKRTVTRGRNVYKRSGKTDVQRDVLIPRGALSEETIYGVISVDGENKVVCKYPLRGLKVKDVDYIVDKALQEKVRGRISQYGEKQAFAEPLYLDEAKTQEVRSVRCFTGKDQSKLVPLRYNVEGEAVGFVAPGNNHHLALYKDDDGNVVESIVTFWQAVERARYGLPIVVVNPREVMEKALAIPGLPESVLKALPASNLRLMEVLRMNDMFLIGMTDEEIQVAIEAKDHSTLSRHLYRVQKLSSMYYVFRYHLETEVKDEKNDAGEIPKFYRIRSLKRYQELNACKVKIDLLGRILLV

SEQ ID NO: 2885 - protein, 1191 aa, unidentified
  REGION 1..1191: note = Description of Unknown: Cas Enzyme sequence
MGKKVLGLDLGVGSIGWCLITLDKDEKPQSILGMGSRIVPLSADDATKFTQGEAITKNKMRTVARTIRKGMDRYQLRREALKKVLREHAMLPDEALIKLPLLELWELRARAATPGEQLSLTELGRVLLHINQKRGYKHAKADEAAEAETESKAKREKEGYVAQVKGRYQALKEKGQTIGQHFAGELRANQQTAPRGTYYTYRIKEQVYPREAYIEEYDNIMAVQREFYPEILTDELIQRIRDRIIFYQRPLKSCKQLVSFCEFEKKEKVIRVKHTNKEGVEELIEKTITIGPKVAPKSSPIFQVCKVWESIHNIRLYYPDGTERELVQEEKQKLFDYLQKNDKLSLTVLRKELKIKPKDKLWCDKLLVNGIAGNTTATILRKALKGYDQYEGLLRFNLTTRDSHEVDVIRPIIDESYQDEPLYKFWHILYSIEDRAEMRSALIGQLGIKAEDLDGGLMDALYKIDFVKQGYGNKSAKFICKLLPHLQEGKMYSEAAKAAGIRHSDSMTAQERDERSLLDEIPLLQKNALRQPVVEKILNQMINLVNALKREHGEIDEVRVELARELKMSREEREKVLSNNRKRKAKNETIAKRIAAEGITPTKARIQKYSLWEESGGRCIYCGNPVGVVQFLRGEEIEVEHIIPKSILFDDSLSNKTCACRSCNQEKGNRFAMVYIQTKGWEQDYISRIETLFKGKKISYSKRQRLLMLPENLPEDFIERHLRLTQYISREAQGILRMGIRLVSASEGGVTAKLRQLWGYDNILRDLNLDRYRSMGETEVVTVEHRDGERTDERIKDWSKRKDHRHHAIDALVVACTRQSYIQRLNRVNAEADRQEMDAFIKEQQQEHKLSKKEKLSLLEHWLIRQPHFTTGEVTKYVEEILISFRPGKRTVTRGRNIYKRSGKTDVQRGVLIPRGALSEGTIYGTIRHYRKDRSGTELVRSYVKRIPLSKVNRSNVKNIVDSQIRKVVQAALLSLSNQDRVLPTELYIDDTQKRVVKSVRCLVRSNTLIPIRFNADGEAIGFIKPGGNHHVALYRDGVGKIRESVVPFFRAVERARYGIPMIISDPSKAREQARANPNLPESVLLSLPEEDWQLEEFLQRDEMFLLGMTDEAIDRAMETKDYTTLGRHLYRVQNLAAGDYVFRYHLETTLDGKDNVGDIPSSYRIASQKIYQELNPRKVKIDLLGRISLA

SEQ ID NO: 2886 - protein, 1190 aa, unidentified
  REGION 1..1190: note = Description of Unknown: Cas Enzyme sequence
MGKKVLGLDLGVGSIGWCLITLDKDEKPQSILGMGSRIVPLSADDATEFTQGKAITKNKMRTVARTIRKGMDRYQLRREALKKVLREHAMLPDEGLIKLPLLELWELRARAATPGEQLSLTELGRVLLHINQKRGYKHAKADEAAEAETNKGKETGYVAQVKGRYQILKEKGQTIGQHFAGELRANQQTAPRGVYYTYRIKEQVYPREAYIEEYDRIMAAQRVFYPELLTDALIGRIRDRIIFYQRPLKSCKQLVSFCEFEKKEKVIRVKHTNKEGVQELVEKTITIGPKVAPKSSPIFQVCKVWESIHNIRLYHLDGTERKLEQEEKQKLFDYLQRNDKLSLTVLRKELKIKPKDKLWCDKLLVNGIGGNTTATILRKALKGYEQYEGLLRFNLTTRDSHEVDEDGVIRPIIDESYQNEPLYKLWHILYSIEDRAEMRSALIGQLGIKAEDLDNGLMDALYKIDFVKQGYGNKSAKFICKLLPHLQEGKMYSEAAEAAGMRHSDSMTAQERDERNLLEEIPLLQKNALRQPVVEKVLNQMINLVNALKREHGEIDEVRVELARELKMSREEREKATKNNSSREKENKAIAERITEYGLTPTKSRIQKYRLWQESAESCIYCGKRVDVVQFLRGEETEVEHIIPKSILFDDSLSNKACACRSCNQEKGNRFAMEYIQAKGWEQDYIKRVDSLFHDKKISYSKRQRLLMLPKDLPEDFIERHLRLSQYIAREAQGILRKGIRLVSASEGGVTAKLRQLWGYDNILRDLNLERYRSMGETEVVTVEHRDGQRTDERIKDWSKRKDHRHHAVDALIVACTRQSYIQRLNRVNAEADRQEMDAFIKEQQEQKPSKKEKLSLLEHWLIRQPHFTTKEVMKHVEEILISFRPGKRTVTRGRNVYKRSGKTDVQRGVLIPRGALSEETIYGTIQLHRKDRSGTELVRSYVKRIPLSKVNPSNVKNIVDSQIREVVQAALLSLSGRKGVLPTELYLDDSRRRVVRSVRCLVRSSTLIPIRFNADGEAVGFTKPGGNHHVALYRDGVGNIRESVVPFFRAVERARYGIPMIISDPSKAREQARANPNLPESVLLSLPEEDWQLEEILQGDEMFLLGMTDEAIDRAMETKDYTTLGRHLYRVQNLAAGDYVFRYHLETTLDGKDNVGDIPSSYRIASQKRYQELNPRKVKIDLLGRISLA

SEQ ID NO: 2887 - protein, 1443 aa, unidentified
  REGION 1..1443: note = Description of Unknown: Cas Enzyme sequence
MKKILGLDLGTNSIGWALIERDFENEVGKILSMGSRIIPTDSDLLSKYEAGQAASKNAARRQARGARRLKQRYKLRRQRLIDALKILGWIPESFLPGHRFEVDEITLREMKTLFPGSDISDDWVVYYLRHKALSEKISERELAQIIYHMNQRRGFKSNRKTANEIAEIDDTAEENTGKKKREKKVEIVTIVSLRDTEEKLKGNTIFEIELVDGRKGTIARKSKPDWENKEIELEITWIPPTQKSPERLEFRPLTNSDADKWAKQKIAREEAIVKSGLQYPGSYYFHELLKNRQYQIKDVSIDRSFYVNELTAILHKQIELNPALQNKDAIIKIAENFYPKNLEKQKELKNHDLVHLFINDVIYFQRPLKSKKSSIADCRFAFKEYMAPDKLDKIRIPYKAAPISSPIFQEFRIWQTINNIRVLQRQYRDEAGKLHLEQDVTTQYVDCAGREQLFELFDNRESVNQKQILKAIGLDEKDFLVNLFRLNEQKEIPGNETKTAIRRQFKKAGYEAEGNLLISNPQKYYLLWHIFYSLDEDKHISKALCRQFAIPPAVAEIVSKIPAFKLQYGSLSHQAINRLLPLMRSGKYWSWNNIDTSTKLRLQKLITGEYDENISEHLRELFSKHQITNEDKCQGMLVAMAAYSVYGVHSERNQNSYDTPEQLLPKEPLNLRNPIVEQVVTETLRIVHDIWKTHGRPWEIHIELSRDLKRNAKEREEISKVISENENENKRIAAILRELKLGNPNSISDIERLKLWERQADEKAREEFKQIKFKRPTEPTRQEIERYKLWAQQNFLSPYSGKPIPLSKLFTRSYDVDHIIPRSRFFDDSQDNKVVVETTLNKEKDNKTAYEYIKSGSVNGNQLLSPSEYESHIIRYFFGKKRNLLLSEDVPERFSNRHLVDSRYISRKLTELLAPVSENTADPIISTTGSITSELKSAWGVGEKMKEVVRWRFERLTEKSGEPYVWYEEELDDKEQPTGRKTLRLKGYEKRIDHRHHALDALIVACTTRSHIKYLNDLNATQYRKRPTDNELKTYLPRLLETGKDNYWQSRKFRKPWKNFVTDTAEELNNIIVSFKKNIRLYGKKANKNLRYIQLPDGTFVKKYLPVLDEMGYRKLSPYVRASLHKATIAGKIMLKEYKQVSLSDAFKMPDQIANKEIKKYLTALLTEVNGDPKKAINLFKQKPLNDNDGNPIKKITIAETVSYFASRVDVSSGFDEKRIEKIPDPVLRSELKKHIKYIDTLNSSKSTDEKVDPFGAEGIEILNGQLIKSGKFPISKVTIKEESTAKFEIRPGAFTEADKGTNLFFVIYQNVNDPGDRCFESIPLRIVIEALAAGSGFVEEKPGYKWFTISPNDLVYLPDENENIASVDWQNKRLLSNKIYKLVSCNKGQAFFVPHTVSKVIVDKFEFDSLNKVERSLDGRMIKQFCIKLKIDRLGNITPTGT

SEQ ID NO: 2888 - protein, 1500 aa, unidentified
  REGION 1..1500: note = Description of Unknown: Cas Enzyme sequence
MKTILGLDLGTNSIGWAKVSMNDNGEYLHDIKLGSRIIPMSQDVLGKFDSGVTESQTKERTRFRGARRLRERCLLRRERLHRVLHVMGFLPYHYDQALGWDKKNGKTYGKFLNGEEPKLAWQRQEDGSMRFLFMNSFEEMLADFAKHQPQLVANSRRIPLDWTIYYLRKKALTQSIEKEELAWILLNFNQKRGYYQLRGEEKEEIPTKRKEYHELKVVSVEASDERKGGNTWYNVHLENGWIYLRSSKFSLEDWVGKTKAFIVTTDYETDGVTPKKDKDGNIKRSFRAPKEDDWELLKKRTESDLEASGKTVGSFIYDHLLQQPDDKIRGYYVRTIERNYYKEELQAILEQQRKFHKELYCADMLATCAEELYPKNEAHKQSLLKHDMIYLLITDLLFYQRPLKSKKSLIADCPYEYYEYVDKQTGEIKRQSIKCVAKSNPYFQEFRLWQFISNLRLFNRIDDKEVTNQYLTSEEDYVRLFTFLNDHKEIVQDTLMKDFFKLKKVIIGNEKTYPVRWNYVDDKDKKYPCNETRYELLTALDRAGMPHEWLNNPGREYKLWHLLYSVETKKEAEGALRKWNESEEFVNAFLRIKPFKKDYGAYSEKAIKKLLTMMRTGRLWHEEDICEQTRERIAKIVSGDIDERTRERMGNAYTLNEIGCFHGLPTWLACYVAYGRHSESTDIERWETPEQMMYYIRNFKQHSMRNPIVEQCVLESLRTVHDIWKEVGHIDEIHVELGRSMKTPSDKRKQMTENIQRNENTNLRIKSLLMELKNDNSIKDVRPYSPMQQDILKIYEEGALQELKKEDKEFDDISKISQKAQPTASELTRYKLWLEQKYRSPYTGKPISLSKLFTSAYQIEHVIPQSRYFDNSLSNKVICESEVNSLKRNLLGYEFIKKHSGEIVHCPTLGDVKIFNEAEYKAFVEDHYAGNRSKKKKLLMDDLPQEFLQRQMNDSRYVSKVVMSLLSNIVREDNEVEANSKHVIATTGGITDKLKKDWGLNDVWNTIVYPRFERLNRLTGNEQFGHWENKEGKHVFQTSMPLELQQGFNKKRIDHRHHAMDALVIALSSRNIINYLNNVSANDTKQREDLRQLLCEQNRKIRKPWATFTQDTMVALQAVVVSFRNYVRVINKATNHYEHYDTNGKKANIPQKGQDLWAVRKPMHKEIIYGHVNLHYKEQLSLSKALDTVPSICNKALRKYINSLLAKNYNKKQLVAHFKDMDYHWNGKDISKIDVWTYTDDKEKMVATRKPLDTSFDKKRIESITDTGIRKILISYLEAKDGKSDIAFTPEGIAEMNKNIALYNNGKWHQPIIKVRLMEPLGAKYPVGQSGTKKQKYVEAQSGTNLYFAIYEDADGKRSYKTVPLNEVVERLKQKLSPVEEYNKDGVPLKFYLSPNDLVYVPTDEEKEMHDIKLQRERIYKFVDSSGTTANFVPHTIASLIYAVDKKTAEQYCHKDLIQNELGLGSPQSKNQKAMSEEMVKAVCWKLVVDRLGNIIKVIK

SEQ ID NO: 2889 - protein, 1427 aa, unidentified
  REGION 1..1427: note = Description of Unknown: Cas Enzyme sequence
VHVKMENEKRYFLGLDIGTNSVGWCVTDRDYNIVRKHTKRNGKTVSLHLWGSRLFDEAETAAGRRGNRNTRRRLVRRRARVVMLQEIFAPEMNKVDKDFFDRLNNSAFRKEDNPFSNQYDCLLFNDKDYTDKEYYAKYPTIYHLRKAIMEHPEKRFDIREIYLAIVHMIKYRGNFLTEGEMSNIGNNTTDLKKLFNELDSLLLALNEETEEDENADTYSVFSLNEEHAQCLLDLFKKESGKSLLFEKEREILNLEKSNKDIRLSLLKLINGSSMKLVDLFKDLKGDENEEVEKTKLDFTSDDFIDNTFVRLPEMIGDNKAGLIEAAKNLYDFRVLANVLKGNQYISDAMVDRYETHQKQLKQLKELIKLYSPKQYKSFFRDVFEKGKNTPLKNYANYVGYSSTGAKKIKVAHSTSKDELYKEIKKLLPIDKVDDGNFEWKRAGDCEIFIAIKRAMDDGNYLPRQNGRENGVFPYQLNKLELKKIIDNQKQYYPFLAETAPDFNNPKKESYKLISLLEYKIPYYVGPLSGDKAWLKKTGFGENNKITPWNFNQAIDKEATEQAFIEGLKNSCTYIIGEPTLPSNSLLYSEYVFLNEVNNWKINNQDISKSDKEYLFLNVYLKGKPSIKRIKEAFNQKYNTTVELTTRTGKELKAEDIHADLKSYRDMMKVFGNEFYKDENLVKLAEEIIFDITILEDKKLLQERFEKMNLNKEQLKALSTLKYSGWGKLSRLFLDGIKTELDTYTGEVLDHTIIDLMREYPLNLMEIYEADERFSFKKQVEERLKDSNVDINTIIDEEYVSPSMKRSLRQTLKVVDELKKILKIDSFDSYFVECTRENDPDKKNQRKDSRKKQIQDLYKEAKDIDQKLKDQLEGKSDDELRGKKLFLYFMQMGRSVYTGKEIDIDSLETEYDIDHIIPQAKVKDDSLTNTVLVEKTVNTLKSDSYPIPDSCLTKQGREWIAVLSKNKLLSDEKKARLLRNYPLTEDEEASFVNRQLTMTNQAVKAVCDILKKTDKGANIVYSKAGLVSDFRKAFDLVKCRDINDFHHANDAFLNIVVGNVYNKVFTNKFTAEKVRRSKQYSEGLNLKADKFFATDKCVYGKDTKIWRAKETPELIRKQLAFNDPLVTHMLVTQTGKQGFFNKISISPASEGAATMPLKNKAPFNQPGFEKKYGGYNNLTCPYFILVESDDKKGKKYTLEFIPAVYIANIHSKEDMVQYFMNHNDEYKLKNPKVILEKVLIHSIVEFNTFVDGKKQSCRVGINGRTGNSIFAINDNQLHLKDDVKMYIHKISKALGKNGSFNKINDIKNINLNQLFNKDENYAAFDLLCQKAVSYPYKLLPELSGVLDKMSCQETRSLFIQLSLEEQLNVLYDFICLLGCKTIKINLSKLNLTSQAGGIRFNKQLKAGVKIITKSITGFYETVLFETPN

SEQ ID NO: 2890 - protein, 1453 aa, unidentified
  REGION 1..1453: note = Description of Unknown: Cas Enzyme sequence
MGKIGFDIGSSSIGWYMSENGENVKKGVLTFDTGMSKGQSGGYISPTKERREARSKRNLIRARKYRKWELLKILIKYNLVPLSENELEIWSKYKKEQIRKFPENANFLKWLACDFAYEDGIKYQNPYELRVKALDNKLSKHEFGRVLYHLIQRRGYKDIGESDSETKKQIERRGESGFQQSLKENRTIAEALSNDFLSKNKRARNQYPYRDEYECELEQICEAQGYNVSKKRKGKYIDSFVQSLWNAIIWQRPLRSQKGNIGKCVLEPSKLRCPVSHPIFEVFRTWQFINTIKYYDENDQKQNIPQEYRNQLFDFFLKKDKNFKFEEIKESLNKKFGSEKKYNYPIDRKGKYDTSVSGMPVCKGFIEVFGDVAKQAISTIHCYNMGNTPKIIHGYSINDLWHILFAFDEKQSENKKFLEEFAIDKLGVKNIVKKEKESNPFAKLKGAFTNGYSDLSFKAMCKIIPFLKEGFLYNEAVVLAKIPELLGKNWDTEKKNIFKITEKSNELYNWNKSIIGITNNLIDKYKGLDNEEIFAYKDYEYALDDADLKDIEKACQGYFGEKSWANRTDKDEIVNSVKNNYQEFFYDSKRSYRKLPLLTDIFEGKLKENKIEIIGKLYHHSNVENRYGNAATDKRTGIDILPEARIDSIKNPMFNKSMSILRKLVNKLIIDGVIDSDTEVIVELARELNDNNMRIAIERYQNERRNTREKYRMFLEEFKEKEQQNINIEESIPVFELWTEQTFAETIDDKRSKINNTHNDEILREKETVRRYELWMEQRGQCMYTGKMISLTQLFSNEIDIEHTIPRSLLPDNTMANQTVAYAWYNRDKKKTQLPKQCDNYYEEKNGWGTAIEPRIANWIEKREHYKNLYESKQKSRGNEDEDTKNKRIQDKHFWKMYYDYWKDKVERFEAEEVKDSWARRQLVDTQITSKYAREYLKTFFKKVSVQKGSTTADFRKMYGFQPEDEIKNRNKHTHHAIDAAVLTLIPVNSSKRDGLLKKMYEYNEKYHKQLTIKPYPNFNAQKLIQEIENTTLIVSCEKDNILKQTSKIIRKRGRVQYLKDKNGKFILDEKGDRILLKANGSTVRSGLYAQTYLGKIREVERDDFEKEIEVKNLNLKIKVKGLPAKRLNNDWTYKEGKDEFSYVVRKPIKDVLSKIDDIVDPCIRELVRKQKNNSEIKDYQGNIIRHVRIRTKAGKEVKERINYRSKHEHKNKFYSEAGSIPYAILLQKNINGKLEREMIPIPSFEIAKIFKENGMFDMEKYIQKYYPNNYKDWNKTLLKVGQKVFVLTNDDEYIQRKNVDFQKNRLYLITQFKYDGSKIMLQYHLEAQAKSDIDKNIKSIKDKIVREAELELGIPLIKEDESIDNLVDRKKDYKKRIEDFATRLKAIADYSSSENANTIKKYIEQYKTESSTITIEGQTSILGLSRNNWNFLLEGEDFGMSLDGTITFLNTD

SEQ ID NO: 2891 - protein, 1098 aa, unidentified
  REGION 1..1098: note = Description of Unknown: Cas Enzyme sequence
DDKSKDYPCNETGFDIRKRLKNVENIPENFLTPETEQNLWHIIYSVTDKNEFETALKTFAEKHNLDVESFVGNFKKFPPFESEYGAYSEKAIKKLLPLMRLGKYWKWDAIDDNTKERISKVITGEYDDKIRDRVREKAINLTEESHFQGLPIWLTSYIVYDRHSEADIAGKWNSVDDLEKYLKDFKQHSLRNPIVEQIITETLRVVKDIWIQYGKGVKDFFDEIHVELGREMKNTAEDRKWLTEQVTNNENTNLRIKALLMELKDNSDGKLFAEDVRPHSPMQQDALKIFEEYALQSNERYDEKENKFIYDPIEDDILKISKSAQPTKSELQRYKLWLEQRYRSPYTGQMIPLGRLFTEDYQIEHIIPKSRYFDDSFNNKVICESAVNQLKDKQLGLEFIQNHYGEEVELGMGKTARVFTEDAYKSFVKEHYTKNNSKRRNLLLDEIPEQMIARQMNDTRYISKFISALLSNIVRAEKEDDGINSKNLIPVTGKITTALKQDWGLNDVWNDLILPRFERMNELTNSKDFTTWNDNYQKYLPTVPLDLSKNFQKKRIDHRHHAMDALVIACATRDHVNLLNNQSAKSEISRYDLQNKLRHKEKKSWIDKKSNEKIERDVFKEFKKPWDNFAVDAKNELKKIIVSFKQNLRIINKTTNKYEKIVDGKKVKVSQQGTNWAIRKPLHKDTVSGIVNLRLKKTVRLSVAIDEWKNIVDKNLKTKIKQLINEGLDKTKIQKFFTQQKNKWQEKDISKVEVYYFSNDKEILVASRTALDVSFNSKKIESITDTGIQKILFNRLKQFDTVELPFEEALQYYDAVLEKQEIEAIINDKETTFQTIQDFANFMRLNDHKYGKKNYSKLNVFVEQVFNRNLREEFSDSIKEYPEIAFSPEGIEDMNKNIIQLNKEKTQDEGKPHQPILKVRTYEPKGNKFNVGNFGNKKDKFVEAAKGTNLFFAIYIDDEGKRSYETIPLNIVVERLKQGLKEVPEVNEKGNKFLFHLSPNDLVYVPTEEENITNINFDNFLNEEQITRIYKVEKFSETECYFTQQSIASLIKKYDAKTKIGELESQNKLQTTMTKDRIKIVEYCKKLTVGRLGNIKKR

SEQ ID NO: 2892 - protein, 1112 aa, unidentified
  REGION 1..1112: note = Description of Unknown: Cas Enzyme sequence
MNKKNILGLDLGTTSIGWALINTEDAEILGMGVRTFPEGINRDTKGAEISKNEDRRNARQTRRLFFRRRLRKNKVIRILRDLGLAPTDTNAFEEWKRSCPYTARYKSATEKADLYEIGRALFHIAQRRGFRSSRKGGTKEDSTIMKGNPQNLKTGIEETWHKVEQFGTLGKAMYDLLPKPGQPFELKERIRNRYTDREMYINEFQTIWKIQQIHYPEILTPQIEELLGNKEKGILFSQRELRSQKFLIGKCYLEKNKTRCPVSSLVFERVRALQFINNIRYGVQQNKLNEEQRKSALQFFLKSNTAKKFDQLVRTLKLTNEQFNYDLETKLPLAETTASLMNLFTEKVWNVKTPKEQNDIWHIFFWAKDNWWLEKYATEKWDFSPEQRKKLGTVKIKTDYGSLSNKALTNILPFLEEGFLYHHAVVLGGVKNAFGEQWNNLSENEKSFLIQAILKKEIERKKEGQNIGDHQLIEETKLLLTQLYNLSEKQLTKLYHHSEQNYNDILKEFLPEPPQIRNPIAQKALWEVRKLMNEIIRTFGKPDIVKLELATELKKSKFEREEMRFQNNKNEKENKEATKILLENGLADSRENRHRYLLWKELKTNEHGTPVCPYSGLSISLADLFDGNKFQIEHIIPRSRSLDDSFANKTLCEANLNREKGDKTPFEFFGSDLDNWKMMKKRAFKILPFNKARRFCEERQFTADDFIERQLNDTRIISKAAREFLLSVFRNVEVYPGRLTADLRHLWGLNNIINEKDDTKNRNDHRHHAIDALVIACTEVKFLQRLTKIYQKNNAIRAKEFPQPWEGFHENVKNIASNILVSCAQNRNLVTKASKIVRLNGKSIRVKSNAPRKQMHEETVYGRHIANDGNYYYHCNKNIDALTESMIEDIVDTNLKILIKNHLGYSPQQKVKNIPKNAFFDFDKTTQKKIPKLFLKNKRGNMVPIYSVRVKKVFNKAIQLKTGINQWVNPGANFITAIYKNNNILSGEVITFVEAVRRKIAGQEVAPKNSEKGNLILTLMINDMVLIGVNKNDLMNGEVDMQKISNNLYKVRKMSDTVIFTHHLISNINPDKQRTEIYPDGRRKVISISPSKMTDVVKVKIDLLGGISLIDL

SEQ ID NO: 2893 - protein, 1177 aa, unidentified
  REGION 1..1177: note = Description of Unknown: Cas Enzyme sequence
VSLVLGLDIGANSLGWSLCDSDILNYIDSGVRIFSDIDSSGAESNANANVERREYRQRRKLLYRKAYRKKLLFKYLKELGFINFSDFNDFLLAIQNMNPYILRAEALQRQLTTVELSRIFYHFIKRRGFLSNRKQLARTKEEERSVVKEGISATRNAMGENTLGAYLASIYPPDNEPFTESERIRKRFTSREMYIDEFNKIWEFQSQFYPDLLTEENKKLIGDPKKGIIFYQQPLKSQKHLRGKCTYETGKPRCNISRYEYEEYTFYQFVNNIELIDGYGEIRKLRTDEKATILELELALALNSKSRLTIKKIKNALKLNAFLCNYEDDVDLPTLLFMRFVNQFFPPHYRKEYIDPDFDKKIDTLWQILNYGDDDEWVIDKMKEKRYFPEDPKYNFYYDDNRIELLKKYYHREGYGSLSLKAIKNILPFLKKGYMYHIAVLLGGIRNAFGDDYKNLTQDDINKIEKFVNDVASQHHKEKELTEIISNWLIENYHIQPQQLAKLYHHTLENKELDIVERLPQFTENIRNPKVERALHEVRRLINSLIDKYGKPDKIVIEIANEIYLTKKQIINSIKHYSGGKLSKEMEEYPTWKLSAILKKKIQEYQLQNKKVNNEARNYLSNFAGVANPTREMLQKYQLFVEMLDKSDKNSNSMKVTVCPYTGKKITLENLFADGIVDIEHIIPYSRSLNDSLANKTLCYADFNRNLKKNSTSYEYFTKYEPNKWKEVKQRAEKLLPKDKYKRFISENVPDADTFASNKLNDTRYISRIVADYVKQLHCEVQVVAGTITATVRKFWGLNTILNELNKNLYSDEEESKISDEKNREDHRHHAVDAMVLCLITKSIIQRLSTLKSDDDIGTGSKKLEYPWPNFKNDVRKQVENILISLKQKDKIAVWKHQKIFDKGKVHRVTTFTPKGKLHDETFYGYHQHPKTKKKGFVHRIPIENINKMSQVEKIMDKSIRDKIIKYLSSNNLCKNGKEIEKGAFLDKTGDGELRYKVYLKNHRGQYVPIKKVRIFEESENNRAILKEKNKWVSPGSNHHAEIYKYQEGKYYQKLVSFWEAVDRVKNKQPVYGNLQNPDKYICSIKKNDIFLLNYPEDLDYSNKKLLSKYLYRVQKISFNGKLEAPYYTFRALNASTLKYEKQELRTQSMQAFISLNPKRVFINHLGEIEKIIPIEF

SEQ ID NO: 2894 - protein, 1043 aa, unidentified
  REGION 1..1043: note = Description of Unknown: Cas Enzyme sequence
VLVFGFDIGTTSIGFAAIEFDPQAGTGAIIRLGSRIFPEARDPDGTPLNQTRRTKRMMRRQLRRRRDRRRTLNEALHAAGLLPAYHSPSWQALISADPIALRIKGISEPLTPHELGRALYHLSKRRHFQGRDLETSETDEALDQTATADEKAARSGRDVTIAALKASGHTLAQYLNEFKPEDRKRGIHALRHYVRDEFERLWSTQAQHHPALANETLKSHIFDVVFAQRPVFWRLNTLGKCRLDPDGELAAKGGWLSAQRRMLEKLNNLEIAGGNARPLDDEERTAILTVLQAQQSMTWGGVRTALKPLFKARGLGTDTVRFNLELGGDPKLLGNPIEQKLLAVFGTHWNNHPHKDAIRAATHSRLWAADYGKIGQQRVVIKRAEERVSDRRRAAETFASDYGASADQVKALETLSFPTGWDAFSVSALEKLLPELERGTKMGTLLNSPDYVEWRQTHFPNREAPTGEIVDRLPSAKDEEEARRIAKLRNPTVVRSQNELRKVVNNLIDFCGRKPDLIRVELARDLGKGKREREEIQSAIRKQEKRRKDAAKDLQSKGIAEPSGRDIEKWLLWKECQDKDPYTGDQIGFSELFLEGLYEVEHIWPRSRSLDDSFRNKTLCRKDVNQTKGNQTPFECFQTQPDQWDAIKDRLQGMISSKGGVGMSPGKVKRFLAESMPDDFASRQLNDTGYAARQAIEQLKRLWPDVGPTSPVYVQSVNGKVTAHLRRLWGLNHILGDTGEKNRADHRHHAIDALTVACAHPGVTHFLSRYWQMKEAPRAFGGEGPSIPPPWPTIRQDAERAIAEVIVSHRVRKKVSGPLHKETVFGDTGEDTQTKTGTYREFVRRKSVTVLSPGEYDDIRDDAVRQVMKAWLADHGGDPKKIDWSTYPRLTPDGPQIKRVRILVRQQMKLMAPVSTGYADLGSNHHIAIYQRPDGKAEFEVVSLFEASQRLARREPVVRRQRQGAKFVMSLAQGDQIRVPKGDKHGNWTVKKLSGNGQVFLKEHNAATPAKVGLWGPNPNTFLSDGFFKISVDPIGRVRRAND

SEQ ID NO: 2895 - protein, 1551 aa, unidentified
  REGION 1..1551: note = Description of Unknown: Cas Enzyme sequence
MKKILGLDLGTNSIGWALVEQDFEKKQGKIIDAGSRIIPMSQDILGKFDSGQSISQTAERTGYRGTRRLYQRNNLRRERLHRVLNILEFLPKHYKNKIDFENRLGQFKSEVKINYRKNENGKYKFIFKDSFNEMIKEFQEKGITTKIPYDWTLYYLRKKALKEKINKEELAWVILNFNQKRGYYQLRGDELNKEDEKNEKYYAFTVSSIKETEDKNAKGTWYEVSFEENDWIYKRQSKEPLNDWIGKTKEFIVTTTIDKNGEPKRSFRAPKEDDWGLLKKKTEQDIEQSGKFVCEYIYETLLTNPNQKIRGKLIKTIERKYYKKELEAILQKQIEFHPEININTDLGKELYQKSINELYKHNEAHKNNIFNKGFDYLFINDIIFYQRPLKSQKSNIGGCQYEYRVFKKEINDTITGNTKEIEAKQPIQAISKSHPLFQEFRLWQWLHNLKIYQREKEIEGKTKIDYEVTNELFKTDEDWVKLFDFLNNKKEIKQSQLIDYLVKERYIEKSEKDNYRWNYVEDKTYPMSETRAQILLRLKKVKLNEGVAQSDTLITQNLWHIIYSVNDKEQYKKALEKFAAKNNLDIDSFVFAFEKFPPFKSDYAAYSEKAIKKLLPLMRMGKYWCENDIQESAKQQINNIIERLESIDYNKTKIDTISDDDIQKQMLKSFCEFKNKNPFTGLNTYQAGYAVYGRHSESNEITKWNNPEDIDSYLNNFKQHSLRNPIVEQVVTETLRTVRDIWKEYGDFNEIHLELGREMKNPADKRKKITQQVTENENTNNRIRQILKELMNDGIPDVKDFSPSHQEILKIYEEGVYLSSDVNDDIEKIRKNPKPSRNDIIRYKLWLEQGYISPYTGKIIPLNKLFTTYYQIEHIIPQSRYFDNSMSNKVICESEVNLDKGNKTAYEYIKEKSGSIIDGHKLLVIDEYEIHCKKYFAKNRTKLKKLLSEDIPESFIERQMNDSRYISKLVKGLLSNIVRDKDEQSETSKHLIPVTGAITSKLKQDWGLNDKWNEIIRPRFERLNKITNSNDFGYLDYEKDEKGNNTGKRFFRLTVPDELQKGFNKKRIDHRHHALDAIVIATTTRKHIQYLNSLNNEKEKYDLQPSLLIKNKEGHYTKHFQLPWNSFPVNVKNSLENIIVSFKQNLRVINRATNRYQKWIKDENSQYKKKLVKQEGENWAIRKSLHKETVAGKVFIRDRKQVTLNQSVIEKLDKENLPEKFIIVDKKLSKKIKQLKKANYDTKRILKYFKDRKYKFNGKEIKQIDVYFFKEATATRKSLSEIKSRKLLNDITDSGIKIILENHLKNYIDETGKENFENAFSPEGIEELNKNILELNNGKKHQHIFNVRVYEEGSKFAVGHKKEVNSKKYVEAAKGTNLYFNIYEDETHKRHFETVPLNEVIAWQKWKAEQPKEEQKVLPMVPVRNTFTEKNKEIPVKFLFSLSPNDLVYVPTDEELENINTIDFSNLSIEQKKRVYKMVSTTGGECHFVPNRNANEIIKNENGTNSKEQRMQQFFISDIDILDDKDKPVMIKDRCIKLKVNRLGQIVKVGE

SEQ ID NO: 2896 - protein, 1058 aa, unidentified
  REGION 1..1058: note = Description of Unknown: Cas Enzyme sequence
VSTSGYRLALDIGTNSIGWCILDLDEVCSPETIRAMGVRIFPDGRDAKSQASLAVDRRLARQMRRRRDRYLRRRSQLMDALIRHGLMPTTAEDRNELEGLDPYALRAKGLQEALSLFELGRVIFHLNQRRGFRSNRKTDKGSEAGKIKPAIKRLHDLMSEAGVSTLGEYLYLRRQSGHTVRSRLVGQGTKAQYEFYPDRSIVEDEFFRLWNAQAAYHPNLSDSARDEFHKIIFYQRPLKPVQPGRCTLEPTKERAPQAFPVSQWFRIYQELNQLRVVTPELHERELTFSERNTLAAILKQGKDLTFESLRTRLKLAPGHAFNLEGESRDKLKGDSTAYLLAKKDHFGPAWHELSPESQHDVVELLLEEESEDTLVAALMGRWQLDEKNARAIAALNLPAGYSRLCLEALCSITKELVKDVILYHEAVKRAGYASHSWFATGEIHERLPYYGLVLQRHVGFGTNHPADRAEVRYGRISNPTVHIALNQVRRVVNELIKLHGHPAQIVLEVARDLKNGLMARREIAKRQAEQKRANDRRRDQLKEFGIPVTGDALMRMRLWEELAENPAARCCPYTGEHVSMQRLFSNEVEVEHVLPFSRTLDNSPSNKTISLRRANMYKGNRSPFEAFGTSADGFDWSGIVSRAALMSSAKRWRFGEDAMSRYEREGDFLDRQLVDTQYIARITREYLTAVCDPCKVWVTPGRLTSLLASRWGFPRKNRDDHRHHALDAALIGVTDRALLKKVADKNSRERSQGVDNFLAGFEAPWNGFRSDVLAAYGGIVVSHKSDHGLGGCLHNETAYGILGPNGSQGNAQHYVPIGAITTPADVLKVKGFGLRASILSSIAGTPIRKCRDLLSRLVSMREREAKEFIRAFVGLDGKEFAKRLNDYATARGMRRVRLKETVTLVAINNREGKPYKGVKGDSNAYYAIYLDPDGRWVGEIVSTLQANSPSYRTRCDELGYPVVTHLFRNDMLELNENGVTKVVYVVRLSEKQIALAEHNEADVDGRTRDKSVDFTLIYKSSPASLQKSGAKIISVSPSGMIHYLEVPTHVAAGRGNSR

SEQ ID NO: 2897 - protein, 1082 aa, unidentified
  REGION 1..1082: note = Description of Unknown: Cas Enzyme sequence
MRYNIGLDIGIASVGFAVTELGEDDLPFRLVRIGSRIFDIAENPKDGSSLAVTRREARGMRRRLRRKRHRKERIRNLIVANGILTQSQLDNLFTQSVSDIYELRRDALERAITQEELARIMLHLAQRRGFLSNRRTDNKDKEAGKMLNAIMENNASISEKKYRTVGEMLFYDERYKVRKRNKSDYLNVVTRSMILDEAAIIFSTQRDFGNRLCNKETEEKYIKILSSQRKFDEGPGKGYEKSPSHYAENLIEKMVGFCTFEKEQKRAAKATYSFEYFNLLQKINNMRIEERGYSHPLTDEQRLSIVAIAHKSPSLTYSKIRKEINLPDSFRFNIRYSEDFAADEAKTKFEYLTCYHEMRKALAGVSKDRINFIAVDERNSIGQIFSMYKDEEKIKSEFANAGIDPIDIESLLNSKMNFRKFGHLSVMALDNIIPYLEQGLTYDKACEEAGYNFKGRNGEKRELISLKHLQEELENTITSPVVRRSLSQCAKVINAIIREMGKSPVFINMELSREMAKNYKERQKDEKSMLLNFEKNEKIKTKLKEDFGITNPSPQDIVKMKLYETQGGVCPYSISSLDPTRLLEYGYAEIDHIVPYSISFNDTYANKVLARGNIQQRKGNRLPLDFLSGKERDNFIVWVERSNLRPDKKKRLLKEEITAEETTMWKDRALVDTQTISRFLYNYLTDFLLFDEFATGRKRHVTAINGQTTGTLRKRWGLVKIREDGDLHHAADAAVIACTTQKMINDISNHHKYRENRYANTKQDPRGDIAEKFPQPYPFFREELMARLVPTKEQLDIAMGQLNPMPYPDDELSALKPVFVSRMPSRKVSGAAHKETIKGITSEGEQVKKTPLTALKLDKHGEIPNYYKPESDKLLYSALKEHLHKHGGDAKNAFANDFYMPNRDEKNKRVVRRVKTVDNKSGIAVHGGIAENDEMVRVDVFHVADDGFYLVPIYVADTIDSRLPNKAIVANKKPWKEMRDEDFIFSLYPNDLIFIKGKGSMEFKTPKTRKKSSLDATKLYEDAFVYYKGADRSTGAISIINHDNSYENRVGVKTLLIFEKYQVDMLGNISKVTHETRQPFSR

SEQ ID NO: 2898 - protein, 1101 aa, unidentified
  REGION 1..1101: note = Description of Unknown: Cas Enzyme sequence
MRYNIGLDIGIASVGFAVMEVGDDDTPLRIVRLGSRIFDTAENPKDGSSLAEPRRDARGMRRRLRRKRHRKERIRNLITAKQILTEAEMKCLFEQPVSDIYELRRDALERVLSRRELARVMLHLAQRRGFKSNRRVDSKDKEAGKMKGAIEKNCETMEKYRTVGEMLYCDERYAPRKRNKSDYLNTVTRDMVLNEARLIFAAQRDFGNACCNEEIEEKYIEILSSQRSFDEGPGMCPFRSCEKCRLDESEKCSKIRSPYAENQIESKIGFCTFEKNEKRAAKATYSFEISNLLQKVNHLRIEEPGDKRSLTEEQRIKLIGKAHESDNLNYSQIRKLLALSENQRFSTVRYSKDNNFTADEKKTKFNFLPAYHEMRKALDHVSKDRIKYISPDQRNAIGHIFSIVKYPGKDRAKIEKALANEFIAPDDISALIENMGTFRKFANLSVSALDRIIPFLEKGETYDKACESAGYDFKAHSGTEKKLLISPKHLAEEIESSISSPVVRRALSQCAKVLNAIIREMGESPVFINIELARDMAKDFTERRDIENHMESNRADNERIKKRLTDEFGLINPTGQDIIKLKLCKDQADECPYSLTKFDMSRLFEYGYAEIDHIVPRSISHNDTYANKILAKGTFQQRKGNRLPLEFLQGKERDNFIVWVNNSNLRPAKKSRLLKEQITDEDKNAFKDRALNDTRTMSRFLLNYLNDFLLFAPFETGRKRHVTAINGGTTSTLRKRWGLVKVRENGDIHHAVDAVVIACTTQKMINDISRHYDHEETRFADTSRDPRSAKEERFPGPYPFFREELMARLAPTKTQLDIAIETISPLPYPDEEIANLQPIFVSRMPQRKVGGAAHKETIKGKTEDGELVKKVSLTSLSLDKKTGEIAGYYRPDADMLLYSALKEQLLKHDGDGKKAFASDFHMPNRDRIVRKVKVLDTKSGINLRGGVAENENMVRVDVFHIANDGYYLVPIYVADTIKPDLPNKAIVAGKSHEHWKEMQDEDFIFSLYPNDLIFVRNKKIMMFNKIHSTSSLPPTQLHQETLVYYKKTGISTGSITVINHDSSYIINSLGVKTLLAFEKYQVDVLGNISRVSHEVRQPFSR

SEQ ID NO: 2899 - protein, 1077 aa, unidentified
  REGION 1..1077: note = Description of Unknown: Cas Enzyme sequence
MRYSIGLDIGIASTGFAVMELGEDDRPIRIIRIGSRVFDKPENPKDGASLALPRREARGMRRRIRRRSHRKQRIWRLIENEGILTNVQMKALYNGIISDVYELRCDALDRLITNEEFARILIHLSQRRGFKSNRSAQKTEDSNKLNKDDETGQLKGAVANNENEMKKAGLRTVGEMLYRREQKRNKSGTYLNTVSRDMVLDEVQKIFSAQRSFGNQFANESIEEKYVQILAGQRSFDDGPGGKSPYAGNLIERMLGNCTFEKEEKRAPKASYSFEHSNLLQKINNIRLIEGGFTFELTQEQRNKLCGYAHNTEKLTYKKIRKLLDIPITQLFNHVRYDKDKMQEENILAQEEKTKFEYLKGFHAMRLALKEIYPERISAITIPQRNEIARIFSLYKNEDKLRTALDATNLETLDKEALINNLGSFSKFGNLSVKALDKIIPHLEKGLTYDKACEAAGYDFKGHEGMHKSKTISLKHLAGETENTITSPVVRRALSQCAKVINAIIREMDDVSPVYINIELAREMAQTYKDRMKQEKSMLENQARNERAKNQIKEYGKFDPKGLDIVKLKLWEEQCGVCPYSLKSLAIERLFEVGYAEIDHIIPYSKCFNDGYSNKVLVFAAENQQKGDLLPLRYLTGKKRDDFIIWVNNQHLPQNKKRALLKEELTAEDEAGFIQRNLTDTQTISSFMYNYLTDFIEFSNFVTGRKKHVTAVNGAVTAQVRKRLGIAKIREDGDKHHAIDAAVIACITDGMIQDITTFSKYKETRYKNSATAIGPDEHFPRPYENFVRDLEGNLKGIFVSRAPSRKVTGAAHKETIKGADANGGLVKKVALTSLKLDNDGEIKDYYRPSDDRLLYEAIKTRLLQHGNDPKKAFAEPLYKPKSDDTEGPFVRGVKILEKSTLNVSVHDGKGRADNDSMVRVDVFYVDGKGGGYYLVPIYVADTLKDELPNRAIVAHKPYEQWEVMDDKDFIFSLYPNDLILAKHKKVLPLNLNKNNKVGTLPAKLEKQKEYLYYKGTNIATGNITTINHDNSYYFEGGAKTLLALEKWQVDVLGNISQIGRETRKGFSKLNTKIKSSW

SEQ ID NO: 2900 - protein, 1160 aa, unidentified
  REGION 1..1160: note = Description of Unknown: Cas Enzyme sequence
MRGCVLGVDVGVASLGAALIEVEIINGRMIYRGIIDGVSHIFPSAQGGAERRQQVAMRKSYQRQTLRLNALRKRLAQFFEVSSDFDDQPTDLGQAYVTACKSSDMPVVLSPNSRFRLRATGLTEKLSAGDLARTILHLAKNRGMRLTRAFDNGRDEKAGKQAQTEAVGMAREAQETAGSMKAHGVVTPGAFLWKIEQSASEGHKRPALRHRKGRVGGYLFTRQQVEAEFDAILKAQSGFHPELLTPEKITEIREQVFWEKDAPDPKVGPCLYFIDDLRIPIASDLFQNKRIYEEVNSILIKHSNEARRRLTIAQRELLVAELLAGENLKVSKIKKLLGLDRGLELSLEAGYGKRTEAREIKGHRIIVEFRKVQGLLDMFRSLSPVRQRELVELLRTERDREVAIVQLVSGFGLSDVMAHAVMDEVVLPTGYAATGARATEMLFETLRDEVMPDGEYAGRVMLPWDAEQFLGLERVGAQIVSQSRLPYYGKVFPHLVRDRMTPGDKGFDAATNEQKFGRIPNPVVHVAMTRMRKVVNGLLKKYAATYGQPIRVHVEFSREMSMSDDERAKYERRIQQEHKQNQEDDAEIIRNGGVPSRKARRMLRLAREQNWCCPYSLRQIAPTDLFKDFDLDHILPRAETLDDSLGNLVVVCRDSNRVKGKKSPFEAFGDGRDYERDDGKKISHEQMINYVRSCKGMAHKAWRFGPDAMDRFRDEKSFGERYLNDTRYIAKCAAQYLQCICRPGAMGAVKPVVALNGRIVSDLRYGWGLRKLVEEIAEFQEPDIYAADADGKTGKKDRRDHRHHLLDAIVTALTPYDLVRQLKDLAREKLKAGNDRIGNLVPRHPWEGFQSDIRDFIAQINASHRANRNLNAQMHEATGLGVIARLGDGSYLTRTRKRLDPADFTDPQKLEDVISVPDRIVMEMTKAVGDPKAQVFWSSSDPVGDLQDIAEDLEQVRNDILSLYETQPESETQERTDDEPLIRKLKPEERLGRAIRQYVKQTGRRTVKVFGTAQAVVIDHNDREVPTRTYRPGNNAWLDLYRAEDGKTSFEVVRTIDAMRPGFVPAWSLDGGNHLLLRLYQGDTVEITDKTGQRRRCVFRENSPGDWSFQPVNLAVNVRDTSLRSRLRFRSFKGLLAADPRLVVTDIVGNPVWRSPARNW

SEQ ID NO: 2901 - protein, 1078 aa, unidentified
  REGION 1..1078: note = Description of Unknown: Cas Enzyme sequence
MTGENQKIPYILGLDIGMASVGAALLAGDQIIGLHVRAFNKAETAKEGESLNKIRRDSRLTRRRLHRRAFRLLRLRRLFKRVGLMDSHAPSAFTIPDTSPWQLRAEGLDRRLTPNEWATTLYHLVKHRGFQSTRKSEAETDEKAGQMLSGVTHNAQLLAAGNFRSVGELAWKHEVFREAKRNKGGSYTHTFSRTHIEQELHTLFSQQRESGNPQTTTDFEQAVHRLLMARRPALAGEKLLELVGKCTFETKEYRAPKASHTAERFVWLTRLNNLRISGIGQARPLAESERQALMPLPFTQAKLTYKQVRKALDLGEAERFVSLNYRDKDPEGATLFEAKAFHTLRKAYESANLKSAWQRDSLDSERLDTLAYALSVFKEDTESRSWLAARGVDEAIIEAVLKVSFSDFVRLSLKALQKILPHMEQGKRYDEAVIDAGYAHHSQKDTSQKSRLLPAISKEDVINPVVYRSLNQARKLVNAIIEKYGSPSAVHIELARDLSKPFDERRKIEREQKEFRENKERDIKDFGGRFGFEPKGSHLIKWRLYREQNAQCAYSLAAFDLARLFQDGYAEIDHALPYSRSFDDGMNNKVLVLSRENRNKGNQTPYEYLDGKNDSLQWLRFVAWVVGNKQIRQAKRMKLLRKDFGKDEAEKFRERNLTDTRYACRVFKNMVETHLQLAEGSESKRCVVVSGQLTSFLRARWGLIKVRADGDLHHALDAAVVAACSHAFVKRLSDYSRRGELEYLNTHCLDPETGEVVDIVALRQLEKDFPQPWAGFRRELLARLAPNPAAVLPALEGIAPVRVSRAPQRRGTGSAHQETIRSAKQLEQNISSVKVPLEKLKMKDLPNIVGSRDPRNESLMMALEQRLSEHGDDGKKAFAEPLYKPGQANGFDCNKEQIERAVFDHLLPCAPQVRSVRLLDTQKSGLPIRGGIANNGDMLRVDVFTKGGKFFAVPLYVADAVKSELPNLAVVANKPESEWTVIDESYSFLCSLHPNDWVRVSFKKDAPKEGYYAGFDRATGAVNLWAHDRNQAVGKDGLIRGIGIKTALSVEKFHVDMLGNLYPARNEIRQPLKLNKKR

SEQ ID NO: 2902 - protein, 1121 aa, unidentified
  REGION 1..1121: note = Description of Unknown: Cas Enzyme sequence
MPVKDAITIGLDIGIASVGWAVLGENRIIDLGVRGFDKAETAKEGDSLNLVRRTARLIRRRLRRRAWRLTKLARLLRREGLISNINVLKRPPSKGFKAPNLWKVRVEGLDRCLANEEWARVIYHLCKHRGFHWLSRAEEREAEGDAKSEGGKVKQGLAGTKKLMQEKSYRTPAEMVLAEFPDAQRNKQGDYGKALSRALLSEELAFLFERQRELGNPHASAILEAAILDRKSGLFWAQKPALAGKDLLKMLGHCTFEKAEYRAPKASFTAERHVWLTRLNNLRIVVDGSTRPLNEQERRIALPLPYQQAGDFTYKQLRSALVKAGHLPERFRFTGLPYPSEKQKTEEKAKDPEGERLIKLPGWQTLRKLLNDAGLEGEWQAISVAALDGNPELLDQIAWVLSVYKDDEEVETELRKLALPNAGRMINALLDVRFDKFHSLSLKALRRIVPLMEHGQRYDEAVANIPEYGHHSQLHKVGEGEHRYLPPLYSGRDKNGRMVFSEDMDIPRNPVVVRALNQARKVVNALIRQYGSPHSVHIELARDLSRPLDERNKVKKAQEEFRDRNEKDKALFVQDFNIVGTPKGKDFEKWRLYREQQGKCAYSVEPMDVHRLFEEGYVEVDHALPYSRSFDDSKNNKVLVLARENRNKGNLTPFEYFRRKDGVDDGPLWRQFAAFVESNKAYRLAKRSRLLRKDFGEQESREFRERNLNDTRYICRFFKNYVERYLQLASESEEKRCVVLSGQMTSFLRARWGLIKLREESDRHHALDAAVVAVCSHGMVKRLSDYSRRKELDQVSEGFADAETGEIVNLAMFQQLRQHFPDPWPYFRDELQARLKMDDPALLRSTMEKLGTYPPQALDALRPLFVSRAPQRRNSGAAHKGTIYGQPERLKAQGGVTQKVALNSLKLSDLDKLIDRHRNEKLYAAIRARLEQQGGKADKAFPPDNPLRKPDRVGNPTGPIVRTVTMVIDKLSGIPIRGGIAKNDTMLRVDVFTKAGKFHLVPVYVHHRVAKELPNRAIVAFKDEAEWTLIDDSYAFCFSLHSNDLIQVTQKGKSPILGYYSSCHRGTGNINIWTHDRDERIGKEGQIEGVGVKTALALNKFHVDLLGNRYPAPPEKRRGLA

SEQ ID NO: 2903 - protein, 1094 aa, unidentified
  REGION 1..1094: note = Description of Unknown: Cas Enzyme sequence
MSQQAGGVKWVLGLDIGIASVGWCVRGDTRVVDLGVYCFDKAETADGEPLNAVRRSARLVRNRLRGRAARLRKLARTLKREGLIADAKFFVLQKPFVESLWKLRRDGLDRRLGDEEWARVIYHICKHRGFHFPRKSEADASEGGRVKKGLERTRELMRAKAYRTLAEMALSEYSEHQRNKRGDYGQSLPREMLADELAQLFAGQRQLGNPHASERFEAEILDAKTGILWQQKPALTADAMLKLLGKCTFERDEYRAAKHTWTAERFVWLSRLNNLRLSIDGTLRPLDDVEREAVVDLPYTNVSVKYLQIKQALIKRGLISDSARFVGLRYPSQQAGETSKDPEEAKVAELKGWHTLRKAFAKAGLETEWRGLSGDHEKLDRIASTLTLCKSDDEIRRELAAMGLPAPMVEALLGVSFSGFLRLSLKALGKIIAPMERGERYDQACESAGYRHSTPQASSVKTSTLPSFYAGRDRDGKMLLDDGLDAPRNPVVLRALNQARKVVNALIREYGSPERVHIEMARDLSRSLDERYKIEKEQKAYAERNQALRKQYESEIGSTAKAREFEKWRLYHEQNGQCAYSLEALDLNRVVDDPSYAEVDHVLPYSRSYDDSKANKVLVLKRENQQKGNRTPYEYLDGANDSERWQRFEAVVRANPQYRQAKRDRLLRKHFGKDEAAEFKERNLNDTRYICRFFKNFVERHLQLAGGDRRCVVLSGQLTAFLRARWGLRKVRDESDRHHALDAAVVASCEHGMVKRLSDYSRARELRDVRDGYRDAETGEVVDIVALRRLEQQFPMPWLHFREELEARLHIDTPEALRERLARLGTYDDEALRMARPLFVARAVKRRNGGAAHKETIYSQPAELKETSSATKKVALASLKIADFDKLVDPQRNEKLYKALRKRFDEFGAKADKAFPPGYEFRKPDKQGNPTGPIVRTVTLLKDKITGVDVRGGMAENDSMLRIDVFSKGGKFFLVPVYVRDRVAKTLPNRAIVGGKDERDWTNIDGTYKWCFSLYPNDLVRVTTRDTVHFGYYAGCDRSTAAVSLWVHDRDKNIGKDGLIRSIGVKTAKSVERFHVDVLGRIYRANPEPRRELA

SEQ ID NO: 2904 - protein, 1120 aa, unidentified
  REGION 1..1120: note = Description of Unknown: Cas Enzyme sequence
MDGKALAPIEPLTFGFDIGIASVGWAVLAPNRIVALGVRAFDKAETADKGESLNLVRRTARLTRRRLRRRAWRLTKLARILKRHGLIPSAAALMPGNPFRQSLWQLRVEALDRRLDAEEWARVIYHICKHRGFHWTSRAEERKAEGDAKGEAGKVKAGLAGTAKRMREAGYRTVAEMVIREFPDAQRNKQGDYSKALARAALGQELTLLFEAQRAHGNPHASPEMERQILGQGDRKSGIFWSQKPALAGDALLRMLGRCTFERAEYRAPKASFTAERHVWLTRLNNLRVVVAGRTRPLDDTERAKALPLPYEFKTDLTYKRLKSALVEAGLLPGTATFAGLSYRGLVRRTGDKVKDPEDTPLVKLPGWHELRKTLEQAGLTSEWQRLASEALSGNPEILDRLAWVLSVYKDDDDVRRELEMIDLPSKAKFVEALLDIRFDRFHALSLKALRAIVPHMELGSRYDEACAEAGYHHSVPAPRQTGRSRYLPPLYSERDKNGTMVVDRKLDAPRNPVVLRAVNQARKVLNALVRTHGAPHAVHIEMARDLSNPWDERKRIEKEQAEFRERNAKDREEFARHFGIVGNPRGGDFEKWRLYREQQGKCAYSIQAIDLTRLLEEGYVEVDHALPYSRSFDDSKSNKVLAFAKENRDKGNRTPYEYLDGAHDSTRWREFVGFVEANKAYRQAKRTRLLRKDFGASESAEFRERNLNDTRYICRFFKNYVEQSLQLAEDSDAKRCVVLSGQLTSFLRARWGLIKVREESDRHHALDAAVTAACGHAMVKRLSDYARRRELSQVRKGFVDPATGEIVDPAMHDQLREHFPEPWPYFRAELLARLLVDDPEEMRTTLRTFGTYSDDALAQAKPLFVSRAAQRRNGGAAHKETVYGKASDSGASESATERVPLSRLTMADLDRLVDPERNRKLYEAIRTRLAAHGGKADKAFPASHPLRKPDREGNPTGPIVRSVTLKIDKMSGIPVRGGIARNDSMLRVDVFAKAGKYHLVPVYVHHRVTGLPNRAIVAFKEESAWTLMDETFRFCFSLHPNDLVSIVQKGRSPIVGYFSSCHRGTGTISLRAHDRNRGVGKEGSIEGIGAKTAVAIEKFGVDVLGKRYRARPEARRGLA

SEQ ID NO: 2905 - protein, 1129 aa, unidentified
  REGION 1..1129: note = Description of Unknown: Cas Enzyme sequence
MAGNPNSGDTPMSKTKLKRGLTQAQIDALGPLTFGFDIGIASVGWAVLSENRIVDLGVRCFDAAEDPKTGESLGEKWRTQKVARRRLHRRVDRLKSLRRLFVQQGLLTEPDAGLLSAPPTEPRQLNLQTPWALRSRGLDERLDALDWARAIYHIVKHRGFLSTRKSERVQKEASTASAREKQGLLAGVAATARMLDAAGERRYRTLGELAFKSEAFHVAKRNKAGAYSRSFDRKLLLDEVRQLFAAQRALGNGHCATPFEQQVCELLMYQRPAVTGEAMLKLMARCTLEPSEYRAPRNSYSAERFIWLGKLANLRIIQNGERRALTSTEHALAVGMPYENKSGKVTYKQLRKQIGLGESNLIGFAGLSYGGKRNKKGEAVDPEEATLVQLKGWPAFREALSAAGLSHSWEKLSVNPAQMDSAAYALSVFQTDDELRPALAALDFSSEETEALLTIDFKGFIALSAKALANLLPHMELGVRYDEACSRAGYNHANPQGATAGARRLPKFAYEDIRNPVVFRALNQARNVLNALIDVYGAPARVHVELARTLAKSFEERRDIQRDQETYRKSREEAEKMFIEHFAGRAPNPRNQDLLKYRLYREQDGKCAYSLAPLDLSRIIEPGYCEVDHALPYSRSFDDSMNNKVLALTKENRDKANRTPFEYLGGDADSATWRAFEAWVIGNKQYRKAKRDRLLRRNFDDASAEGFRARNLNDTGWIVRLFANRIRDTLRFAPDATGKVAEQPVLTPSGGFTSFLRTRWGLHKDREASDLHHAQDASVIAAATPALIKRVSDYNRQRETLEILPGGAIVNKTTGEISKLAKAHFPEPWSHFRDEVLARLSHDPAKAVALVSPAYDAETLSRLRPILVSRAVKRRAGGAVHQDTVRSVKPHLGPQTSSKRTRLTDLNLAKLDQIVGAQDGRNAGLMQVLRARLEAHGGDGKKAFAPSQPPVFKPRRDGTDGPIIRTVQLKDVQKGGVPVRGGVADQASMWRVDVFEKGGKFYLVPIYQSDRVKGRQLPNHASTANTPRENWTVVDDTFKFVFSLYQNDLVRLVNKSERYFGYYVGTGISTASISIRSHDNNALVACGKTWQGIWVNLGVKVGIAEFRKFNVSVLGDIFPAPDEKRNDLA

SEQ ID NO: 2906 - protein, 1147 aa, unidentified
  REGION 1..1147: note = Description of Unknown: Cas Enzyme sequence
MSGNPSLPVANASKRKHKRGLANDQVQALGPLTFGFDIGIASVGWAVLSQSRIVDLGVRCFDKAETADKGESLNLARRQARLLRRRLRRRAWRLTKVGRCLKRHGVVADAKHFTNQPDVRDSVWRLRDAGRSRLLAPLEWARVIYHLCKHRGFHWVSKAEAFAADGDAKSESGRVKVGLAATQKLMREKNYETAAQMVLSEFPGAQRNKRGDYSKALSRALLNEEFRLLFQRQRELGNVHATEALEHDILGSGDRRSGLFWSQKPALAGSDLLKMLGHCTFERGEYRAPKASFTAERHVWLTRLCNVRISVNGVTRPLDDAERNVALPLPYSSGEKFTYKNLRTALEKVGLPKSFRFVGLNYPSQRQREEEKAKDPEAEVLVKLSGWHDLRLMFKRTNLESVWQQIAAPALAGNPTLLDKIAWVLSVYKDDDEVTRELRLLDLPEAEATIEALLTLRFDKFHALSLKALRQIVPHMERGLRYDEAVAAIPEYGHHSQPGARQRERYTLLPSFYRGSDKSGKLLFNDDLDIPKNPVVLRALNQARKVVNALIKIYGSPAQVNIEMARDLSRPLVERKRVKDLQDEFRARNDAARDHFAELFGRRPTGVELEKWLLYREQNCKCAYSLEALTAERVVNDPSYAEIDHALPYSRSYDDSKSNKVLVLKVENQRKGNRTPYEYLTSYDGGENGARWREFVGFVESNKAYRQAKRSRLLRKNYGKDESRSFMDRNLNDTRYICKFFKNLVEQHLRIAEDSSSKRCVVLNGQLTSFLRARWGLLKIREESDRHHALDAVVVAACDHGMVKRLADYARRRELEAVSAGFVDLDTGEVVDSAMFQRLERDFPAPWEYFRHEVQARLKLDDVSTMRDILQTLGNYDETALAAAKPLFVSRAPQRRNDGAAHKETIYAQPPESQLEREGAVKQRVPLSALTMKDLDRLVDRDRNEKLYAAIEQRMKDFNGKADKAFTPDNPLRKPDKYGELTGPVVQAVNLKIDKMSGIRIRGGVAKNDTMLRVDVFQNRKDRKYHLVPVYVHHRVTGLPNKAIVAFKNEDEWTEMGADFDFLFSLHANDLVRIAQKNKPPLLGYFASCHRGTAALNLWSHDRSSEVGKGGAIDGIGVKMVPLIEKLNVDVLGNVFPAPHETRRDLA

SEQ ID NO: 2907 - protein, 1129 aa, unidentified
  REGION 1..1129: note = Description of Unknown: Cas Enzyme sequence
MNPTTNNAPLPPDFLTLGLDIGIASVGWAVLSERHIVDIGVRCFDKAETAKEGESLNLNRRQARLMRRRLYRRSWRLTKLGRLLKQRGLIDSAAFFKHQPPATVSTWQLRVEGLDRQLSAQEWARVIYHLCKHRGFHWASKAEEVLAEGDAKGEGGRVKKGLADTAAKMAAKDYRTAAEMVLAEFPHAQRNKRGEYDKALSRVLLDQEFSLLFEQQRRLGNPWANAEFEQRIRGDGDRKSGLFWNQKPALAGSDLLKMLGQCTFEKSEFRAPKASFTAERHVWLTRLNNLRVVVDGASRPLTQNERILALLLPYQTDQLKYKTLKAALVKAGHIPDSARFGGLAYPSEAQKETGKTKDPEDQPLVRLPAWHDLRKALIKAGLQAAWQQISVAALDGQPQWLDSIGWVLSVYKDDAEVERELAALELPQAQAVIPVLLGLRFDKFHALSLKALRQIVPHMERGLRYDEAVAQIPAYGHHSQRVVLGTGAKRYLPSFYKDERSSTGSMVFRDDIDVPRNPVVLRALNQARKVVNAIIKKHGNLSSVHIEMARDLSRPLDERREVKKLQEEFRDRNDKARESFEADHGYRPKGIVFEKWMLYREQQGKCAYSLEGLDIDRVLKDANYAQIDHALPYSRSYDDSKNNKVLVLTRENQNKGNRTAYEYLTSFAGGEDGDRWRNYAAWVNSNKSYRMAKRNRLLRKNYGADEASGFKDRNLNDTRYICKFFKNYVEEHLQLAPRADGSANKRCVVVNGQLTAFLRARWGLSKVRSESDRHHALDAAVVAACNHGMVKALADYARNKEVAYLKEGFPDPETGEIINPEAHARGVQHFPEPWAHFRHELQARLYTDDLQALREDLQRLGTYSEQDLLGVRTLFVSRAPQRRNDGAVHKETIYAQSEALRKQGGVTQKVPLTSLNLKDLDNLADPHRNAKLYAAIRARLEANGGKADKAFGPDQPFYKPDKDGNPTGPIVRTVKLVIDKLSGIPIRGGIAKNDTMLRVDVFSKTGKFHLVPVYVHHRVTGLPDRAIVAFKDEEEWTLVDESFEFLFSAYSNDLLEISLKKDRHVGYYAGCDRSTGALNLWTHDRALHVGKDGLIRGIGAKTAQSIKKLNVDVLGITHPARPEQRHGLA

SEQ ID NO: 2908 - protein, 1115 aa, unidentified
  REGION 1..1115: note = Description of Unknown: Cas Enzyme sequence
VDHKPESEPLCFGFDIGVASVGWAVLAPNRIVALGVRAFDKAETDKEGESLNLIRRTARLTRRRLRRRAWRLKKLARLLKRRSVIDDVRLFQPQCPFVRSLWRLRVEGLDRRLNAEEWARVIYHICKHRGLHWLSRAEEKQADADAKGEAGKVKQGLAATARLMQEKGYRSAAEMVLAEFPEAQRNKHGEYSKALARRLLGEELALLFQRQRDLGNPHADPELEKEILGAGDRKSGLFWLQKPPLSGADLLKMLGRCTFERDEYRAPKASFTAERHVWLTRLNNLRVVVDGRTRPLSEAERLAALPLPYQQAGEFKYRQLRAALVRAGRLPDSFRFAGLAYPSEAQQATGKAKDPEEATLVKLPGWQALRLTLRKHGLETEWEGMAAAALEGRPELLDQLAFVLSVFKDDDEVRRELGRLPLPNASAMVEALLDLRFDKFHALSLKALRAIVPHMERGLRYDEACEKAGYRNSLPAPPIAGDRRHLPPLYAGRDKDGRMVFNPDLDVPRNPVVLRALNQARKVLNALVREYGAPHEVRIEMARDLSRPLDERRRIEREQAEYRERNEKDRDLFVEHFGREPKGAEFEKWRLYREQQGKCAYSVEAIDLARLLEEGYVEIDHALPYSRSFDDSKNNKVLVLAAENRNKGNRTPYEYLGGEHNSERWQRFVAFVESNRAYRQAKRNRLLRKNFGGDEAGEFRERNLNDTRYICRFFKNYVERYLQLADGSDARRCVVVSGQLTAFLRARWGLLKIREESDRHHALDAAVVAACTHGMVKRLADYARTKELEHVRAGFVDPETGEIVNPAAFARLERHFPAPWPEFRYELETRLKEDDPAKLRAAIEALGTYPAEALAELRPLFVSRAPQRRNGGAAHKDTIYAQPERLRAQGSATEKVPLASLTLKDLDNLIDPHRNQKLYAAIRARLEAHGGKGDKAFPPGNPLRKPDRNGNPTGPIVRTVTKVIDKLSGIPVRGGVAKNDTMLRVDVFAKGGRYHLVPVYVHHRVKGLPNRAIVGGKDERDWTEIDDSFAFRFSMYPNDLVRVRLKSEEHLGYYAGCDRSTGAISLWVHDRSSKVGKDGLIRSIGVKTALAFEKLHVDVLGRIYPAPPEPRRGLA

SEQ ID NO: 2909 - protein, 1118 aa, unidentified
  REGION 1..1118: note = Description of Unknown: Cas Enzyme sequence
MDGKLPATPIVFGFDIGIASVGWAVLAEDRIVALGVRTFDKAETPKEGAPLNLVRRTARLTRRRLRRRAWRLKKLARTLKRHGVIPTTGQFGPDHPYVGSLWHVRVAGLDRRLDPDEWARVLYHICKHRGFHWSSRAEEQKASQDTKGEAGKVKAGLADSARRMTARGYRTAAEMVLHDFPDAQRNKRGEYTKALARTLIADELALLFSRQRELGNPFSAKHLELEVLGNGDRRSGLFWSQKPPLAGSALLQMLGRCTFERDEYRAPKASFTAERHVWLTRLNNLRIIVDGRTRPLNDCEREVALPLPYVYDSPLSYGRLRTELVNKGLLPESFRFAGLPDPVAHRKAGVGPKDPESAILVKLPGWHELRLTFKRAGFTGEWQQVSGDALAGKPEALDSIAWVLSVYKDDDEVRRELTSLNLPGRGRLVEALLNIRFDRFHALSLKALRAIVPNMARGMRYDEACAAAGYRHSVPERKHAGRHRYIPPLYSGRDSRGTMVVDPDLDVPRNPVVLRSLNQARKVLNALIRNHGSPHAVHIELARDLSRPYDERRRIEKEQAEFRERNAHDRALFAEHFLVAGNPRGGDFEKWRLYREQQGKCAYSIQPLDLSRILEPGYVEVDHVLPYSRSFDDSKNNKVLVLSKENRDKGNLTPFEYLDGAGDGQRWRTYVAFVEGNKQYRLAKRNRLLRRDFGATESAEFQERNLNDTRYVCRFFKNLVENSLTLADKSDAKRCVVLSGQLTSFLRARWGLIKVREESDRHHALDAAVVAACSHFMVKRLSDYARRRELAEVRTGFVDVTTGEIVDTNRHGKLREHFPEPWPQFRDELLARLSIDDELELRTVLENIGNYSDTALAATKPLFVSRAPQRRNSGAAHKETVYGQSQRGDGQSRLTERVPLSSLSMADLDRLADLKRNEKLYDAIRNRMRAHGGKGDKAFSADNPLRKPGRDGSPSGPIVRSVTLQIDKMSGISVRGGLARNDVMLRVDVFSKTGKFYLVPVYVHHRVNGLPNHAVVANKSENEWTLIDATYQFCFSLYPNDLVSITQKGKSPTIGYFAGCDRNTGAISLWAHDRNSSVGKDGLIRSLGPRTATSIKKFDVDVLGNRFAARREARRGLA

SEQ ID NO: 2910 - protein, 1116 aa, unidentified
  REGION 1..1116: note = Description of Unknown: Cas Enzyme sequence
  MOD_RES 159: note = Any amino acid
  MOD_RES 210: note = Any amino acid
  MOD_RES 331: note = Any amino acid
  MOD_RES 334: note = Any amino acid
  MOD_RES 363: note = Any amino acid
  MOD_RES 365: note = Any amino acid
  MOD_RES 432: note = Any amino acid
  MOD_RES 450..451: note = Any amino acid
  MOD_RES 461: note = Any amino acid
ASLSGRIQYATRRWLLYCSNGSHPGKLQCSNCSHKGQHVQTKNLPYTLGLDIGMASVGATLLLPDQQRILALHVRTFDKAETAKEGESLNKIRRDARLIRRRIRRRAHRLIRLTRLMKRHGLIDAATPESFALPDASPWVLRAEGLDRLLEPKEWASVXYHLVKHRGFQSNRKSEAKADEKAGQMLSGVSRNQALLKATGYRTMGELAAXHESFTDAKRNKGGAYTHTFARADLEAELALLFERQRALGCRIASADFYTAVHTLLLARQPTLSGANLLKMIGKCTFEKNEFRAPKASYRAERFVWLGKLNNLKIVGGGDARPLSDAERRIXIDXPFTQAKLTFKQVRKALGLEAHQRFNLLSXRXDPKGKDKDPEEATLFEAKHFHTLRKAYEAAGLKTEWQRDAINPDRLDALAYALTCYKDDTEARDWMXSQGIEAPIIEAVLNESFXXFIQLSQKALXAILPHMEAGQRYDEAVKSAGYNHSQPDAATEKQKTLPAPDKDIIRNPVVYRALNQARKLVNALIAEYGPPAAVHIELARDLSKPYDERKKIEREQKEFQVEKEKAFADFEDRFNFRPKGPDLQKWRLFREQLDQCPYCQQALAVDRLFEPGYAQVDHALPYSRSFDDSMNNKVAVHTKCNQDKGNRTPFEAFDGASDSEHWQRFAAWVQNNKAIRQAKRNRLLRINFGTEEAEEFRDRNLNDTRYICKEFKRMVETHLAWHPDSTADNRCVVLSGQLTSLLRARWGLIKVRSEGDLHHALDAAVIAATSRSLIKRMSDYSRREELAQVRNRYIDPATGEVLDLSALRQIETDFPKPWPHFREELLARLSANPSQQLDRLANYDEATRASIQPVRVSRAPTRRGLGAAHQETIRSIGKEGKLLAGGQSAIKTPLASLTLKDLDNIAEQRDTALIEAIRERLTAFGGDGKKAFAPSQPPLRKPSAEGKTAPIIRSVKLLATQKSGIPIRGGIANNGAMLRADIFTKAGKFHAVPVYASDAIKAELPNRAVIAFKPEEAWTVMDETYQFLFSLHPNDWVTIKLKGETKEGYFSGLDRATGAISLWLHDRNQTIGTTGQWRGIGIKTALAVEKYHVDLLGGLHRVHHEERRPIHRKRIR

SEQ ID NO: 2911 - protein, 1079 aa, unidentified
  REGION 1..1079: note = Description of Unknown: Cas Enzyme sequence
MQEKQKKPYTLGLDIGMASVGAALLGNDRILGLHVRTFDKAETAKEGDPLNKTRREARLTRRRIRRRAHRLLRLARMFKRVGLVDVASPVAFALPGISPWDLRAEGLDRQLSSTEWASVLYHIAKHRGFQSTRKSEAKKDEKAGQMLSGVSANQQRMKEKNWRTVGEMAARDEAFAESKRNKGGAYTHTFARTDLTEELALLFKKQREHGNPQASADFENTVRALLLARRPALSGDALLRLVGKCPFEPAEYRAPRASYSAERFVWLTKLNNLRISEVGEQRTLTAGERQTLLDQPYLLAKLTYKQVRQKLGLADSAKFTVLTYRGDKDPESTAFFEAKSYHDLRKAYEKAGLQHLWLRDALDPARLDRLAWALTCYKTDDDIRAHLAENGVEPEIIEAVLGESFDKFVALSLKALRKILPFMEQGQRYDEAVQTAGYAHHSQLNNNALKGRYLPPPDKDQIRNPVVYRALNQARKLVNAIVREYGPPAAIHIELARDLSKPMDERRRIEREQKEFQERKAKDREAFIEQFGFEPKGLDLQKYRLYREQMSQCAYSQQAIDVARLFEPGYAEIDHALPYSRSFDDGQNNKVLVLTAENRNKGNRTPYEYLDGASNSPQWQQFEAWVLSNKAYRRAKRDRLLRRHFGEDEAEGFRERNLNDTRYICRAFKQMVEDHLQWHPDSDARNRCVVVAGQLTSLLRARWGLLKVRENGDLHHALDAAVIAASSRSLVKRMADYSKRNELAQVRDRYIDPATGEILDIAATRQVEEHFPVPWPHFRSELLAWLSPDPAHGLDGLTHYPPDELERLRPVRVSRAPTRRGLGAAHQETIRSVGREGRLLANGQSAIRTPLSSLKLKDLDNIVGAEDPRNASWIAALRERLEQFKGDGAKAFAANQPPLLKPSAPGKPAPVIGSVKLLATQKSGIPIRNGVANNGNMLRVDVFGKGGRFYAVPVYVADAARTELPNKAVVAFKPESEWPEMDETFAFLFSLHPNDWVCLRYKNAPSREGYFSGLNRATGAIDIWVHDRNPATVKNGLFEGNGMKTALAVEKYHVDLLGNLHRVHAETRQPIHRSGNNRG

SEQ ID NO: 2912 - protein, 1091 aa, unidentified
  REGION 1..1091: note = Description of Unknown: Cas Enzyme sequence
MQKENIPYTLGLDIGMASVGAALLLPDAQRILALHVRAFDKAETAKEGESLNKIRRDARLIRRRIRRRAHRLVRLTRLMKRYGLIEAATPESFALPDASPWGLRAEGLDRLLEPKEWASVLYHLVKHRGFHSNRKSEAKADEKAGQMLSGVSRNQALLKETGYRTMGELAAKHETFTDAKRNKGGAYTHTFARADLEAELALLFERQNAFGCRIASADFYAAIRDLLLARQPTLSGANLLKMIGKCTFEKSEFRAPKASYRAERFIWLGKLNNLKIVGGGDARPLTDAERRIILDLPFTQAKLTFKQVRKALDLETHQRFNLLSYRFDPKGKDKDPEESTLFEARHFHTLRKAYEAAGLKTEWQRDAINPDRLDALAYALTCYKDDTEAREWMAAQGIEAPIIEAVLSESFEQFIQLSQKALKAILPHMEAGQRYDEATKSAGYNHSQPDDATEKQKTLPAPDKDIVRNPVVYRALNQARKLVNALIAEYGPPAAVHIELARDLSKPYDERKKIEREQKEFQVEKEKAFADFEDRFNFRPKGPDLQKWRLFREQLDQCPYCQEALEVDRLFEPGYAQVDHALPYSRSFDDSMNNKVAVHTKCNQDKGNRTPYEAFDGASDSEHWQRFEAWVQSSKAIRQAKRNRLLRVNFGAEEAEEFRDRNLNDTRYICKEFKRMIETHLAWHPDSTADNRCVVLSGQLTSLLRTRWGLIKVRAEGDLHHALDAAVVAATSRSLIKRMSDYSRREELEQVRNRYIDPETGEVLDLSALRQIETDFPKPWPHFREELLARLSANPSQQLERLANYDQALRASIQPVRVSRAPTRRGLGAAHQSTIRSIGREGKLFQQEKSAVKVLLNQLRFSDIEKISGQHDPRNATWITALSERLEPHKDEDKKKGKCAGAKAFADNQPPLYKPSAEGKKAPQIRSVSLVDTQKSGVLVRNGIADNGAMLRVDIFFKGKNFYAVPVYVSDAIPNTPLPNRAAKAHTREDQWPEIDESFHFRFSLYPNDWVWIKLKNGIKEGYYCEMDRGSGASLSIYTHDRNQSVGEKGKIRGIGISTALAVEKYHVDLLGGLHRVHFEARQPIHRKRGR

SEQ ID NO: 2913 - protein, 1083 aa, unidentified
  REGION 1..1083: note = Description of Unknown: Cas Enzyme sequence
MQKENRPYTLGLDIGMASVGAALLLPETQRILSLYVRTFDKAETAKEGESLNKIRRDARLIRRRIRRRAHRLVRLARLMKRYGLIESATPESFALPDVSPWGLRAEGLDRLLEPKEWASVLYHLVKHRGFQSNRKSEAKADEKAGQMLSGVSRNQALLKETGYRTMGELAAKHETFMDAKRNKGGAYTHTFARADLEAELALLFERQNAFGCRIASADFYAAVHELLLARQPTLSGANLLKMIGKCTFEKSEFRAPKASYRAERFVWLGKLNNLKIVGGGDARPLSDAELRIIIDLPFTQAKLTFKQVRKALDLEAHQRFNLLSYRFDPKGKDKDPEESTLFEAKHFHTLRKAYEAAGLKTEWQRDAINPDRLDALAYALTCYKDDTEAHDWMAAQGIESQIIQAVLGDSFDQFIQLSQKALKAILPHMEAGQRYDEAVKSAGYNHSQPDAATVKQKSLPAPDKDIIRNPVVYRALNQARKLVNAITAEYGPPAAVHIELARDLSKPYDERKKIEREQKEFQVEKEKAFADFEDRFNFRPKGQDLQKWRLFREQLDQCPYCQQALEVDRLFEPGYAQVDHALPYSRSFDDSMNNKVAVHTKCNQDKGNRTLYEAFDGASDSEHWQHFEAWVQSNKAIRQAKRNRLLRVNFGAEEAEEFRDRNLNDTRYICKEFKRMIETHLAWHPDSTADNRCVVLSGQLTSLLRARWGLIKVRAEGDLHHALDAAVIAATSRSLIKRMSDYSRREELEQVRNRYIDPETGEVLDISALRQIETDFPKPWPHFREELLARLAANPSQQLERLANYDEATRESIHPVRVSRAPTRRGLGGAHQETIRSIGKAGKLLAGGQSAIKTPLASLTLKDIDNIVEQRDTALIEAIRERLTAFGGDGKKAFAPNQPPLRKPSGEGKTAPIIRSVKLLTTQKSGIPIRGGIANNGAMLRVDIFTKAGKFHAVPVYASDAVKAELPNRAVIQAKPEEEWTLMDETYKFLFSLHPNDWVTIRLKNEVREGYYSGLNRATGNIDLWLHDRNQTQGKKGMLEGNGIKTALAVEKYHVDFLGGLHRVHHEERQPINRKTGVKHELA

SEQ ID NO: 2914 - protein, 1074 aa, unidentified
  REGION 1..1074: note = Description of Unknown: Cas Enzyme sequence
MQTKNLPYTLGLDIGMASVGAALLLPDQERILALHVRTFDKAETAKEGESLNKIRRDSRLTRRRIRRRAHRLVRLARLMKRVGLIADANPEAFALPGVSPWHLRADGLDRLLEPKEWAGVLYHLVKHRGFQSNRKSEAKADEKAGQMLSGVGRNQALLKEAGYRTVGELAARHEDFKEAKRNKGGSYSHTFARADLNAELNLLFERQRALGSRLASADFQENVRDLLMARRPTLSGANLLKMVGKCTFEKSEDRAPKAGYRAERFVWLGKLNNLKIVGSGDARPLTDAEHRIVIDLPFTQAKLTFKQVRKALELETHQRFNLLSYRPDPKGKDKDPEESTFFEAKSFHTLRKAYEGAGLKKEWQRDALDPDRLDALAYALTCYKDDTESRQWLVAQGIGTPIIEAVLAESFDKFIHLSQKALKAILPHMEAGQRYDDAAKSAGYDHSQPDAGTGKRATLPPPDKDTIRNPVVYRALNQARKLVNAIVAEYGPPAAVHIELARDLSKPIDERRDIEKGQKEFQALKEKLAAAFEETFHRKPSGLDLLKYRLFREQLDQCPYCQKALVVDRLFEPGYAQIDHALPYSRSFDDGMNNKVVVHVACNQDKGNRTPYEFLDGAGDSERWQRFVAWVQGNKAIRQAKRNRLLRVNFGTDEAKEFSKRNLSDTRYICREFKRTIETQFAWHSDAEGNERCVVLSGQLTSLLRARWGLIKVREDGDLHHALDVAVIAAASRSLVKRMADYSRRNELEMVRNRYVDPATGEVVDVAALRQIEDHFPKPWPLFREELLARLAPEPKLQLTCVSSYDEGLRESIRPIRVSRAPTRRGLGAAHQETIRSLRDGSQSAIKTPLRDLNLKDLENIVGFERDTALIDAIRTRLEAFGGEGKKAFDDKQPPLRKPSKDPDKAPIIRSVKLLVTQKSGIPIRGGIANNGAMLRSDIFTKAGKFYAVPIYVADAVRGELPHRAVAQAKPELEWPMMDESYQFLFSLHPNDWMTIRLKNEVREGYYAGLDRATGNISLWLHDRNQNVGQKGLLTGNGIKTALAVEKYHVDLLGKLHRVHKEERQPIHIKPGKR

SEQ ID NO: 2915 - protein, 1103 aa, unidentified
  REGION 1..1103: note = Description of Unknown: Cas Enzyme sequence
MEIRYTLGLDIGIASVGWCLLGENRIIDLGVRAFDKAETAKEGDPLNLTRRQARLARHRLAQRAWRLKKLTRELKRQSLIDDKRFFQPANPVSISPWQLRIKGLDRKLERDEWARVIYHLCKHRGFHWVSRAEEKQAAGDTKSEGGKVKQGLAGTKRLMEEQGYRSIAEMVLAEFPEAQRNKRGEYTKALSRVLLGDELKQLFAGQRRLGNPFANESLETTLLGNGDRKSGLFWVQKPPLSGAALLKMLGKCTFEKGEFRAPKASFTAERHVWLTRLNNLRIVCAGETRPLNAQERALALPLPYRQPKELSYKQLHDALTKSGLLPETFEFAGLRPGKDGKDPKSEKLIKLPAWQELRSTLKAAGLETEWEGLAGEACRGQPQILDEIARVLSVYKDDDEARAELNKLPLPNREAMVEALLDIRFDKFHALSLKALYGIVPQMEAGLRYDEACVEAGYHHSQLHEPGEGTSRTLPPLYAGRDPDGRMRFAEDEDIPRNPVVLRALNQARKVVNAIVRRYGSPMAVNIEMARDLSRPLDERNKIRKEQEEYRARNDKDKAFFAEEFGQAPKGGEFEKFRLYREQLGKCAYSQEAIDLARLLEPGYVEIDHALPYSRSFDDSKNNKVLVLAKENRDKGNRTPYEYLGGAENSPRWLQFVAFVESTKSYRLAKRSRLLRKDFGAKEAEDFKERNLNDTRYICKFFKNYVERHLKLADGSDAKRCVVLSGQMTAFLRARWGINKIRSESDRHHALDAAVVAACTHGMVKRLADYSRTKELAQVHTGFVDTTTGEIVDPAMFRQLKQHFPEPWQHFHHELEARLKIDNPALLREEMTHLGTYDTAALDGIHPLFVSRAPQRRNGGAAHKDTIYGQPEKRREKGSVTQKVPLTSLTLKDLDKLIDPHRNARLYDAIRERLETHGGKGDKAFPTDSPLRKPDRDGEPTGPVVRTVTMLIDKLSGIPVRGGIAKNDTMLRVDVFTKAGKFHLVPVYVHHKVAGLPNRAIVAYKDEGEWTLIDGSFDWCFSLYPNDLIKIKLKNASYLGYYGSCNRSTGAINIWTHDRNTNCGKDGMIESIGVKTALSLEKLHVDTLGNIHPAKPEPRRGLA

SEQ ID NO: 2916 - protein, 1116 aa, unidentified
  REGION 1..1116: note = Description of Unknown: Cas Enzyme sequence
MGTTYTIGLDIGIASVGWCVLGETRIIDLGVRAFDKAETAKEGESLNLARRNARLMRRRLFRRAWRLKKLSRLLKNEGLITDTKAFQPENACTKPLWQLRVDGLDRLLNDEEWARVIYHLCKHRGFHWISRAEAKQADGDSKSEGGKVKQGLAATAKLMVERGYRSAAEMVLSEFPEAQRNKQGEYTKALSRELLAKELALLFAKQRGFGNPHASIALEATILGNGDKKSGLFWQQKPAIAGADLLKMLGTCTFEKGEYRAPKASFTAERHVWLTRLNNLRIVTDGVTRQLTEQERQLCLPLPYQQAGDLTYKQLGAALTKAGLLAAGSFKFTGLAYPTEAQKAEGKAKDPESATLVKIPAWQELRQTFVKAGLDDEWKKLSGDALCGKPEIIDQIAWVLSVHKDDDEVHAELAKLLLPSQDALIDALLDIRFDKFHALSLKALRTIVPHMEKGLRYDEACVEAGYHHSQLHKVGEGEHKYLPPLYAGRDKDGRMRFAEDADIPRNPVVLRSLNQARKVLNAIVRRYGSPTAVHIEMARDLSRPFDERNKIKKEQDEYQARNQHDREQFIELFGHPPKGLEFEKWRLYREQNGQCVYSQLALAPSGNVAEIFHEGSTEIDHALPYSRSFDDSKNNKVLVLTRENRNKGNRTPYEYLGGTENSERWQRYVAFVEANKAYRLAKRTRLLRKDFSAKEAEDFRERNLNDTRYICRFFKNYVEQYLKLAEGSEARRCVVVSGQLTNFLRARWGLLKVRSDSDHHHALDAAVVAACSHSMVQRLSNYSRTRELEQVRDGFVDIETGEIVNPAMHQQLREHFPDPWPYFRHELEARLKIDSPELLREEMARLGSYSEAELAALKPLFVSRAPQRRNGGAAHKDTIYGQPEKFKEKGSVTQKIALSSLTLKDLDSLADPHRNTKLYGAIRERLEAHGGKGDKAFSASNPLHKPDKDGNPTGPIVRTVTKVIDKLSGIPVRGGIAKNDTMLRVDVFTKAGKFHLVPVYVHHRVTGLPNRAIGAFKDEEDWTLIDESFEFLFSLHPNDLVQVHQKGKQQILGYYASCHRGTGNLNIWAHDRNTAIGKDGVLEGIGVKTALSLEKFHVDVLGNIYPAPPEKRRGLA

SEQ ID NO: 2917 - protein, 1135 aa, unidentified
  REGION 1..1135: note = Description of Unknown: Cas Enzyme sequence
MSATYTIGLDIGIASVGWCVLGETHIIDLGVRAFDKAETAKEGESLNLARRSARLIRRRLFRRAWRLKKLARLLKSEGLIADAKAFQPEHAFTHPLWQLRVDGLDRRLNGEEWARVIYHLCKHRGFHWISRAEAKQAEGDNKSEGGKVKQGLAGTAKLMAEKGYRSAAEMVLGEFPEAQRNKQGEYTKALARELLAKELALLFEKQRELGNPHASSTLQTAILGNGDKKSGLFWQQKPALAGADLLKMLGTCTFEKGEYRAPKASFTAERHVWLTRLNNLRIVTDGVTRQLTEQERQLCLPLPYQQAGDLTYKQLATALTKAGLLEAGSLKFIGLAYPTDAQKAEGKAKDPESATLIKIPAWQELRQTLTKAGLDDEWKKLSGDALCGQPEIFDQIAWVLSVYKDDDEVRAELAKLPLPNRDALIDALLNIRFDKFHALSLKTLRAIVPHMEKGLRYDEACVEAGYHHSQLHKVGEGEHKYLPPLYAGRDKDGRMRFAEGADIPRNPVVLRSLNQARKVVNAIIRRYGSPTAVHIEMARDLSRPHDERNKIKKDQDEYQARNQRDREQFIELFGHPPKGLEFEKWRLYREQNGQCVYSQKPLAPSGNVAEIFFEGSTEIDHALPYSRSFDDSKNNKVLVLTRENRDKGNRTPYEYLGGAENSERWQRYVAFVEANKAYRLAKRTRLLRKDFGTKEAEEFRERNLNDTRYICRFFKNYVEQHLKLAKGSEARRCVVVSGQLTNFLRARWGLLKVRSDSDRHHALDAAVVAACSHSMVQRLSNYSRTRELEQVRDGFVDIETGEIVNPAMHQQLREHFPDPWPYFRHELEARLKIDSPELLREEMARLGSYSEEELATLKPLFVSRAPQRRNGGAAHKDTIYGQPERMKRTGGVTQKVPLSSLTLKDLDSLVDPHRNVKLYEAIAKRLEAHGGKSDKAFPSSNPLRKPDKEGNETGPIVRTVTKVIDKLSGIPVRGGIAKNDTMLRVDVFTKAGKFHLVPVYVHHRVTGLPNRAIVAFKDEEEWTLIDESFEWCFSLYPNDLLQVTQRSGETVFGYYRGCHSGTGALNIALHDRFAFGEKTTSLACFKKDPNKPIPNDKLGLIEGVGVKMAAKLEKFHVDTLGNIYPAPPEKRRGLA

SEQ ID NO: 2918 - protein, 1114 aa, unidentified
  REGION 1..1114: note = Description of Unknown: Cas Enzyme sequence
METPTYSLGLDIGIASVGWCLLGQTRIIDLGVRAFDKAETAKEGESLNKVRRDARLMRRRLRRRAWRLTKLARTLKRHGVIRETQLFQPQHPFLPSLWKLRVEALDRMLNAEEWARVIYHLSKHRGFHWISRAEEKCAEGDKAGEGGKVKKGLAGTKKLMAEKNYRSVAEMVLAEFPDAQRNKAGDYGKALSRAALGEELALLFEQQRAFGNPHAGVGLENEILGNGDRKSGLFWAQKPALAGADLLKMLGHCTFEKSEYRAPKASFTAERHVWLTRLNNLRIVVDGVTRPLNEQERQLALPLPYQQASAFTYKQLRAALIKAGRLPETFRFAGLAYPSAIQIENGKAKDPEAGTLVKLDAWQTLRTAFKKAGLETEWQGMAGAAMSGEPKMLDDIAWVLSVFKDGTEVERELHALDLPGGNAAVQALSEESFDKFHALSLKALRRIVPLMDSGLRYDEAVAAIPEYGHHSQRPPAENGKLKYLPPLYAERDKDGRMVFSEDLDVPRNPVVLRSLNQARKVVNAIVRKYGAPQAVHIEMARDLSRPLDERRNIEKEQKEYRDRNDKDKALFIEHFGQAPKGVEFEKWRLYREQQGKCAYSIEAIDLNRLLEPGYVEVDHALPYSRSFDDSKNNKALVLAKENRDKGNRTPYEYLDGKNDSPRWLAFKTFVETNKTYRLAKRSRLLRKDYGEKEAGEFRERNLNDTRYICRFFKNYVEQHLALAEGSEVKRCVVVSGQLTAFLRARWGLLKVRSDSDRHHALDAAVVAACSHSMEQRLANYARNKELEKVREGFVDPATGEICNPAMYHQLHQHFPDPWPNFRHELEARLKIDDPALLRETIANLGTYPAEVLETLRPLFVSRAPQRRNSGAAHKDTIYAQPERLKQKGGVTQKVALSSLTLKDLDQLIDPHRNEKLYAAIRARLEAHGGKGDKAFPADNPLHKPDRDGNPTGPVVRTVTMVIDKLSGISVRGGIAKNDSMLRVDVFAKAGKFHLVPVYVHHSVAKELPERAIVAFKDEDGWTPIDIGFEFRFSLYPNDLVKVTLRNETHLGYYGSCNRSTAAVNLWAHDRNTLVGKDGMIQSIGVKTALALEKFHVDVLGNIYPAPPEPRRGLA

SEQ ID NO: 2919 - protein, 1193 aa, unidentified
  REGION 1..1193: note = Description of Unknown: Cas Enzyme sequence
MRRPDRFPCRAGFGRHPKVTPYCSNGSHPGKLHGVILRTLNKKLQIMSATYTIGLDIGIASVGWCILGETHIIDLGVRAFDKAETAKEGESLNLARRNARLMRRRLFRRAWRLKKLARLLKSEGLIADTKTFQPEHAFTHSLWQLRVDGLDRRLNDEEWARVIYHLCKHRGFHWISRAEAKQAEGDSKSEGGKVKQGLAGTARLMAEKGYRSAAEMVLGEFPDAQRNKQGEYTKALARELLAKELALLFEKQRELGNPHTSNALETAILGNGDKKSGLFWQQKPALAGADLLKMLGTCTFEKGEYRAPKASFTAERHVWLTRLNNLRIVTNGVTRQLTEQERQLCLPLPYQQAGDLTYKQLGTALTKAGLLEAGSFRFTGLAYPTEAQKTEGKAKDPEAATLVKIPAWQALCKTLTNAEFGLNEEWAKLSGDARCGQPEIFDQIAWVLSVYKDDDEVQTELAKLPLPNSGKIIEALLSCPRTAFAKFHALSLKALRAIVPHMEKGLRYDEACVEAGYHHSQLHKVGEGEHKYLPPLYAGRDQDGRMRFAEDADIPRNPVVLRSLNQARKVVNAIIRRYGSPAAVHIEMARDLSRPFDERNKIKKEQDEYQARNQRDREQFIEAFGQPPKGLEFEKWRLYREQSGKCAYSLHALDLHRLLEAGYVEVDHALPYSRSFDDSKNNKVLVLTPENRDKGNRSPYEYLVGAENSERWRNFVAFVEGNKSYRLAKRTRLLRKDFGTKEAEEFRQRNLNDTRYICRFFKNYVEQHLKLAEGSEAKRCVVVSGQLTNFLRARWGLLKVRSDSDRHHALDAAVVAACSHSMVQRLSNYSRTRELEQVRDGFVDIETGEIVNPAMHQQLREHFPDPWPYFRNELKARLEIDSPEHLREELSVLGRYSEEELSKVKPLFVSRAPQRRNGGAAHQATIYALPKVRHKLKIQDKNTKSIRSATEHELQSLAVERIGVFDTANQGKTYKFNSERLDDIVGCERDTGLLHALRLWLDKRKDNPKAPGTQDFPRKPKLGDPADGPFSGPAIKKVKLNAGRTSGIKVRKGKAANESMLRVDIFSKAGKFHLVPVYVHHRVTGLPNRAIVAYKDEQEWALIDDSFEWCFALYPNDLVKVRLKNEVFLGYYAGTDRSTGAISIHAHDRNNAVGKDGLIRGIGVKTALKVEKFHVDTLGNIYPAPPEKRRGLA

SEQ ID NO: 2920 - protein, 1078 aa, unidentified
  REGION 1..1078: note = Description of Unknown: Cas Enzyme sequence
MEQSNENNAPVSYTLGLDIGMASVGAALLNEGQILALHVRTFDKAETDKEGESLNLIRREARLTRRRIRRRAFRLLRLLRLFKREGLIASHDTAAFADAASPWDLRAEGLERPLEPNEWAAVLYHIVKHRGFQSNRKSEVADDEKAGQMLSGVSDNQARMKAGGWRTMGEMAARDNEFAHAKRNKGGEYTHTFARADLADELHQLFAAQRLHANPHSAPEFETAVHDLLMARKPTLSGENLLKMVGKCTFEPSEYRAPKASYSAERFVWLTRLNNTRITGLGETRALTDDERQALLELPFTQTKLTYKQARKAANLNEHERFIGLAYRADKDPESAVLFEAKAFHKLRKAYEDAGLKTEWARDAINPERLDTLAFAQTAYKDDREARDCLAQQGIEPSIIEAVLNVSFSDFVRLSLTALRKIIPHMEAGLRYDEAVLAAGYAHHSDLSQAESKTRRIPRINKEDFPNPVVYRALNQARKLVNAIIDEYGAPAAVHIELARDLSKPWDERKQIERDQKTFRDNKEKTAEKYRELFRQAPKKDQLDKLRLYDEQDGKCAYSLTPFDLRRLDETGYVEIDHALPYSRSFDNGMNNKALVLTHINRDKGNQTPYEYLGGAHSDPRWHAFEIAVRSNKKIRQAKRDRLLRKDFSEKEAIGFRERNLTDTRYIARAFKTLVEKHLQLAEGSEAKRCVVVSGQLTAFLRARWGLLKVRADGDLHHALDAAVVAATSHSMVKRLSDYSRHKELEQIRHGYIDPQSGEVIDIAALRRLEEHFPEPWPHFRDELKAWLSPDPALNLEHVSGYDKVRAQTIKPIRVSRAPLRRGLGQAHQETIRSAKLLDQGLSSVKTPLENLNFKDIDEDIKRIVGWNDPRNAKLIEAIRQRLQAHKGDGKKAFKEPFYKPSKPGKAAPIVRSVNLTDTQKSGLPVRGGIANNGSMLRVDIFTDGKKFYAVPLYVTDSVKALENLPNRAVVAYKPEEEWTVMDENYRFLFSLHPNDWVNIRLNGKPLIDGYFSGLDRATGAVSLWAHDRNQAVGKDGLIRGIGIKTALSVEKFHVDMLGRLYPVKQETRQPLNHKRKG

SEQ ID NO: 2921 - protein, 1118 aa, unidentified
  REGION 1..1118: note = Description of Unknown: Cas Enzyme sequence
MQSKNQPYTLGLDIGIASVGWCVLGEEHILDLGVRAFDKAETAKEGDPLNLTRRMARLMRRRLFRRAWRLKKLTRLLKRHGVIENGKLFEPDRPAPISPWQLRVEGLNRLLNKEEWARVLYHLCKHRGFHWISRAEAKKAEEDKSEGGKVKQGLAATQRLMNKKGYRSAAEMVLAEFPEAQRNKQGEYSKALSRLLLADELALLFQQQRTLGNPHASEALQAEILGNGDRKSGLFWAQKPTLSGADLLKMLGKCTLERGEYRAPKASFTAERHVWLTRLNNLRIVVDGITRPLNAQERAIALPLPYQQAKELTYEKLGKALVKAGLHETGSFKFAGLSYPSEKQKAEDKAKDPESANLVKMPGWQELRATLKKAGLETEWEGMAGAAISGQPELLDQIAWILSVYKEDVEVEAELQNLPLPNKAKMVEALLDIRFDKFHALSLKALRQIVPHMENGLRYDEACQQAGYHHSHLHKAEDADQKFLPPFYNGRDRDGRMVFRDDEDIPRNPVVLRALNQARKVVNALIRKFGAPMSVHIEMARDLSRPLDERRSIEKEQKEYRERNDKDKAEFCRQFNIVGTPRGGDFEKWRLYREQQGKCAYSQEPIALERLLESGYVEIDHALPWSRSFDDSKNNKVLALTKENRDKGNRTPYEYLKAIDGCENGARWRQFVAFVETTKAYRQAKRNRLLRKDFGNKEAEEFRERNLNDTRYICRFFKNYVERHLKLAEDSEAKRCVVLSGQMTAFLRMRWGLLKMRSDNDRHHALDAAVVAACSHCMVQRLSNYARTKELAQVRQGFVDPETGEIDNPAMYAQLHEHFPDPWPHFHRELDARLKIDDPALLRAEIERLGSYTAADLDELRPLFVSRAPQRRNGGAAHKDTIYGQPQGLKEQGGVTQKVSLASLTLKDLDKLIDPHRNEKLYAAIRERLEAHGGKSDKAFPPTNPLRKPDRDGNPTGPMVRTVTTVIDKLSGIPVRGGIAKNDTMLRVDVFTKAGKFYLVPVYVHHKVKGLPNRAVVAFKDEDEWTLIDDSFSWCFSLHPNDLVRVKLKNESHLGYFSGCDRSTGAINLWAHDRDARIGKDGLIRGIGVKTALSVEKFDVDVLGNLHPAKSEKRRGLA

SEQ ID NO: 2922 - protein, 1130 aa, unidentified
  REGION 1..1130: note = Description of Unknown: Cas Enzyme sequence
MNATYTIGLDIGIASVGWCILGETHILDLGVRAFDKAETAKEGESLNLARRSARLMRRRLFRRAWRLKKLARLLKSEGLIADTKLFKPEQPFSNSLWQLRVEGLDRLLSDEEWARVIYHLCKHRGFHWISRAEAKQTEGDSKSEGGKVKQGLAGTAKLIDEKGYRSAAEMVLAEFPDAQRNKQGEYRKALSRELLAKELALLFAKQRAFGNLHASNALETAILGDEDRKSGLFWQQKPALAGTDLLKMLGTCTFEKSEYRAPKASFTAERHVWLTRLNNLRIVTDGVTRQLTEQERQLCLPLPYQQAGDLTYKQLGNALTNAGLLAPDSFKFIGLAYPTDAQKVEGKAKDPESATLIKIPAWQELRKTLTNAKTSLSDEWKKLSGDALCGQPELFDQIAWVLSVYKDDDEVRTELAKLPLPNPQVLTEALLNIRFDKFHALSLKALRAIVPHMEKGLRYDEACVQAGYHHSQLHKVGAGEHKYLPPLYDGRDGDGRMIFAENADIPRNPVVLRSLNQARKVVNAIIRKQKCSPMAVHIEMARDLTKPLRGHWNSQGKFIEGRQDIQKEQLEFQARNQRDREQFIELFGHPPKGLEFEKWRLYREQNGQCAYSQKPLAFSGDVAEIFLDGSTEIDHALPYSRSFDDSKNNKVLVLTRENRDKGNRTPYEYLGGGENSERWQRFVSFVESNKAYRLAKRTRLLRKDFGAKESEEFRERNLNDTRYVCRFFKNYVEQHLKLAEGSEAKRCVVVSGQLTNFLRARWGLLKVRSDSDRHHALDAAVVAACSHSMVQRLSNYSRTRELEQVRDGFVDIETGVIVNPAMHQQLREHFPDPWPYFRHELEARLKIDSPELLREEMARLGSYTEEELAALKPLFVSRAPQRRNGGAAHKDTIYGQPERLKKNGSVTQKVALASLALKDIDLLADPHRNAKLYGAIRERLEAHGGKGDKAFPATNPLRKPDKEGNPTGPIVRTVTKVIDKLSGIPVRGGIAKNDTMLRVDVFTKAGKFHLVPVYVHHRVTGLPDRAIVAFKDEEEWTLIDESFQFLFSLHPNDLVRVAQKGKQPIQGYYSSCHRGTGNLNIWAHDRSNAVGKNGILEGIGVKTALSLEKLHVGTLGNIYPAPPEKRRGLA

SEQ ID NO: 2923 - protein, 1138 aa, unidentified
  REGION 1..1138: note = Description of Unknown: Cas Enzyme sequence
MSATYTIGLDIGIASVGWCILGETHIVDLGVRAFDKAETAKEGESLNLARRSARLMRRRLFRRAWRLKKLARLLKSDGLITDTKLFKPEQPFATSLWQLRVDGLDRRLSNEEWARVIYHLCKHRGFHWISRAEAKQAEGDSKREGGKVKQGLAGTAKLMNEKGYRSAAEMVVNVFVKPRLDESGLTKLDKQGNPIPDGAARNKQGEYTKALSRELLAKELALLFAKQREFGNPHTSSKLESAILGNGDKKSGLFWQQKPALAGADLLKMLGTCTFEKGEYRAPKASFTAERHVWLTRMNNLRIVTDGITRQLTDQERSLALPLPYRQAGDLTYKQLGAALTQAGLLEAGSFKFIGLAYPTEAQKAEGKAKDPESATLVKIPAWQELRKTLTNTGVGLDDEWKKLSGDALCGQPEIFDKIAWVLSVYKDDDEVRAELAKLALPNPQAMTEALLNIRFDKFHALSLKALRAIVPHMEKGLRYDEACVQAGYHHSQLHKVGEGEHKYLPSLYDGRDNEGRMIFAEDADMPRNPVVLRSLNQARKVVNAIIRRYGSPSAVHIEMARDLSRPFDERNKIKKDQDEYQARNQRDREQFIELFGHPPKGLEFEKWRLYREQNGQCAYSQRPLTASGNVAEIFLDGSTEIDHALPYSRSFDDSKNNKVLVLTRENRDKGNRTPYEYLGGAENSELWQRYVSFVESNKAYRLAKRTRLLRKDFGAKESGEFRERNLNDTRYVCRFFKNYVEQHLKLAEGSEAKRCVVVSGQLTNFLRTRWGLLKVRADSDRHHALDAAVVAACSHSMVQRLSNYSRTRELEQVRDGFVDIETGEIVNPAMHQQLREHFPDPWPYFRHELEARLKIDSPELLREEVARLGSYTVEELAALKPLFVSRAPQRRNGGAAHKDTIYGQPEKLKKNGSVSQKVALASLTLKDIDLLADPHRNAKLYGAIRERLEAHGGKGDKAFPATNPLRKPDKEGNPTGPIVRTVTKVIDKLSGIPVRGGVAKNDSMLRVDVFTKAGKFHLVPVYVHHRVKGLPDRAVVAFKDEDDWTLIDDSFDWCFSLHPNDLVQIRLKNESFLGYYSGTDRSTGAVSIWAHDRNQAVGKDGLIRGVGVKTAIKVEKFHVDTLGNIYPAPPEKRRGLA

SEQ ID NO: 2924 - protein, 1123 aa, unidentified
  REGION 1..1123: note = Description of Unknown: Cas Enzyme sequence
MSATYTIGLDIGIASVGWCAFGETHILDLGVRAFDKAETAKEGESLNLARRSARLMRRRLFRRAWRLKKLARLLKSEGLIADAKLFKPEQTFSTSLWQLRVEGLNRRLNHEEWERVIYHLCKHRGFHWISRAEAKQAEGDSKSEGGKVKQGLAGTAKLMDEKGYRSAAEMVLAEFPNAQRNKQGEYTKALSRELLAKELALLFANQREYGNPHAPVSLETAILGNGDKKSGLFWQQKPALAGADLLKMLGTCTFEKTEYRAPKASFTAERHVWLTRLNNLRIVTDGITRQLTEQERSLALPLPYRQAGDLTYKQLGAALTQAGLLEAGSFKFIGLAYPTEAQKAEGKAKDPESATLVKIPAWHELRQTLTKAGLTDEWEKISGTALCGQPEIFDQIAWVLSVYKDDDEVRAELAKLPLPNPEALTEALLNIRFDKFHALSLKALSAIVPHMEKGLRYDEACVEAGYHHSQLHKVGEGEHKYLPPLYDGRDKDGRMIFAEDADIPRNPVVLRSLNQARKVVNAIIRRYGSPTAVHIEMARDLSRPFDERNKIKKDQDEYQSRNQRDREQFIELFGHSPKGLEFEKWRLYREQNGQCAYSQNPLAASGNVAEIFLDGSTEIDHALPYSRSFDDSKNNKVLVLTRENRDKGNRTPYEYLGGVENSERWQRYVAFVEANKAYRLAKRTRLLRKDFSAKEAEEFRARNLNDTRYICKFFKNYVEHHLKLAEGSETKRCVVLSGQLTNFLRARWGLLKVRSDSDRHHALDAAVVAACSHSMVQRLSNYSRTRELEQVRDGFVDIETGEIINPAMHQQLREHFPDPWPYFRHELEARLNIDSPELLREEMARLGSYSAEELAALKPLFVSRAPQRRNGGAAHKDTIYGQPERLKKNGSVTQKVVLANLSLSDLGEEDDERNPCKLVDENRNKKLYAAIRKRLKDHGGKGDKAFPATNPLRKPDKEGNPTGPIVRTVTKLIDKLSGIPVRGGIAKNDTMLRVDVFTKAGKFHLVPVYVHHRVTGLPNRAIVAFKDEEEWTLINESFDWCFSLYPNDLVQVKLKSECYQGYYAGSDRATGAIGLWAHDRSANVGKDGLMRIGVKTAFSIEKLHVDVLGNIYPALPEKRRGLA

SEQ ID NO: 2925 - protein, 940 aa, unidentified
  REGION 1..940: note = Description of Unknown: Cas Enzyme sequence
MQQEKLPYTLGLDIGIASVGWCVLGENRIIDLGVRCFDKAETAKEGDSLNLVRRSARLMRRRLRRRAWRLTKLARLLKRHGVIDDLRFFQPQHPFQHSLWQLRAEGLDRLLNAEEWARVIYHLCKHRGFHWISRAEEKQAEADSKGEGGKVKKGLADTRKRMEEKGYRSAAEMVLAEFPDAQRNKQGDYGKALSRVLLADEMALLFRRQREFGNPQATVQLETAILGSGDRKSGLFWEQKPPLAGNDLLKMLGKCTFEKKEYRAPKASFTAERHVWLTRLNNLRIVVDGVTRGLSETERRVALPLPYKQASDFTYKQLRAALVKAGQLPDAFKFTGLSYPTAAQQAEGKAKDPETEKLVRLPAWQELRKTLKEKGLETEWEGMAGAATGGNPDVLDSIAWVLSVFKDDEEVTAELRRLTLPGGEKMIDALLDIRFDKFHALSLKALRKIVPHMETGLRYDEACAAAGYHHSQLRKAGEGKHKTLPPLYAGRDMDGRMVFSEELDIPRNPVVLRALNQARKVLNALVRRYGSPAAVHIEMARDLSRPLQGHWTDNGKYIEGRRDVQKAQDEYRERNEKDKAAFEAEFNMQAKSREFEKFQLYREQQGKCAYSLEPLDLHRVLHDIGYAEVDHALPYSRSFDDSKNNKVLVLARENRNKGNRTPYEYLDGAKDSDRWRQFAIYVESNKSYRLAKRSRLLRKDFAGKAAEEFRERNLNDTRYICRFFKNYVEDYLKLAEGSDAKRCVVLSGQMTAFLRARWGLVKLRGESDRHHALDAAVVAACSHGMVKRLSDYARRRELEKVREGFVDVETGEIVNPAMFQQLHEHFPDPWPHFRNELDARLHLDDHAELRTRITALATYPQEALESLRPLFVSRAPQRRNSGAAHKDTIYAQPARLKAQGSVTQKVPLANLTLNDLGKLIDPHRNKLQPAAGDGKPCCRL

SEQ ID NO: 2926 - protein, 1087 aa, unidentified
  REGION 1..1087: note = Description of Unknown: Cas Enzyme sequence
MANTSSPPSPYTLGLDIGMASVGAALLGEDRIIALHVRCFDKAESPDGESLNALRRMARGTRRRLRRRKYRLLKLVRLFKREGLIPVADPAAFQLRETSPWDLRVKGLDRKLTSVEWAAALYHLCKHRGFQSTRKTEAAGDKEATAMLEAIRQNQAGLTKYRTPGEMAVKDPTFAEAKRNKAGAYLRTFQRADLVRELELLFERQRALGNPHTSDALREEVHRWLMARRPALSGQALAKMVGKCTLEPTQPRAPKHAYRSERFVWLSMLNNLRLLNQGRSRGLTEAEREAIRELPFTQAKLTYAQVRKKLALDPDDRFNRVDYGSRDGKDPEASTLYEPKGFHRLRKAFEEAGEGTRWESVRQDTDLLDTLAEILTYEKTDDDIRKRLAPLALPEALVEALLGVSFDQFIQLSIRAIGKLIPHLEAGLRYDEAAAAAGYHHSVRQNEEARSRFLPAPDRVEIRNPVVYRALNQARKLVNAIVREYGPPAAVHIELARDLSRPFDERQKIVREQRKFQKQKETAVLEFARELGVQPRRDGLQRFQLYREQHGQCAYSGKPVELHRLMEDGYVEVDHVLPFSRSFDDSKANRVLVLTAENRKKGNRTPYEYLDGASDSPRWREFVARVKANKQLRPAKRDRLLRKHFGKDEASEFKERNLNDTRYICRAFKTLVERHLAFHPASEGSERCVVVTGQFTSLLRARWGLVKVRENGDLHHALDAAVVAACSRAFVQRVARHSKAGELQYIRVDDRLVDPETGEVIDGADLLPEDRFPRPWPHFREELLGRLDRNPRLALTGRPGYPPEMLETVQPVRVSRSPKRLGLGQAHQETIRSKGKNDRLIAEGRSAIKKPLTSLDAKALKQMVGYDDPRNRTLVAALEARLAAAGGDPTKAFAEPFRKPSKDGKQAPVVRTVNVWDTQKSGLEIRGGVANNGDMLRLDVFEKGGKFFAVPVYVHAAAQGSLPDRAAVQAKPESEWPVMDETYRFLFCLHANDWVRIEKKDGVKIEGYYSGFDRASACINVTVHDRYPNPEAPDGSGKPLYADLPVGGTWRGVGIKTAVKFERFEVDLLGRVFPARVGGARPPLAGR

SEQ ID NO: 2927 - protein, 1112 aa, unidentified
  REGION 1..1112: note = Description of Unknown: Cas Enzyme sequence
MQDKTHSPITIGLDIGIASVGWAVLTPDRIVALGVRAFDKAETAKEGESLNLARRMARLMRRRLRRRAWRQTKVARLLKREGLIEDARFFQTSPTFPVSPWRLRVEGLDRRLSPEEWARTIYHLCKHRGFHWTSRAEEKKAEEDTKGEGGKVKQGLAATSKLMREKGYRSAAEMVLTEFPDAQRNKQGDYGKALSRVLLAEELRLLFRRQHEFGNPHAGEAFQAALLGNGDRKSGLFWSQKPALSGENLLKMLGKCTFEKSEYRAPKASFTAERHVWLTRLNNLRIVVDGVTRPLNEQEHRVALPLPYNQAGDLTHKQLRAALVRSGALGDDFRFANFAYAQSADGKVKNPESTVLVKLPAWQELRKTLKEKGLETEWQGMAGAAQSGAPELLDQVAWVLSVYKDDDEVAEQLAKLALPNPGPIIDALQGIRFDKFHALSLRALRKIVPHMETGLRYDEACEEAGYHHSQLFKVGEGEARFLPPFYSGRDKHGRMVFNDDMDIPRNPVVLRALNQARKVVNALIREYGSPTSVRIEMARELSKPFDERRKVEKEQTEYRDRNEKDKALFAEHFGQAPKGKEFDKWRLYREQQGKCAYSIEPLDLERLLEPGYAEIDHALPRSRSFDYSKNNTVLVLAKENRDKGNRTPYEYLGGAEDSERWRRFVAYVEGNKAYRLAKRTRLLRKNFGEDEAREFRERNLNDTRYICKFFKNYVERYLKLADDSESKRCVVLSGQLTAFLRARWGLLKIRSESDRHHALDACVVAACSHGMVKRLSDYSKRKELDQVRDGFVDLETGEVVNPAMYRQLKEHFPEPWPGFRHELEARLNIDDTAQLHAALEGLGTYPVNALDNIKPVFVSRAPQRRNGGAAHKDTIYAQPERLKAQGGVTQKVPLASLTLKDLDNFIDPHRNEKLYAAIRARLDANGGKGDKAFPASNPLRKPDRDGNPTGPIVRTVTLVIDKLSGIPVRGGIAKNDTMLRVDVFSKGGKFHLVPVYVHHRVNGLPNRAIVAFKDEDEWTLIDDSFAFCFSLHPNDLVRVTQKGKSPIIGYYSSCHRGTGNINIWAQDRSQAIGKGGMIEGIGVKTALSLEKLHVDVLGHIYPAPPEKRRDLA

SEQ ID NO: 2928 - protein, 1084 aa, unidentified
  REGION 1..1084: note = Description of Unknown: Cas Enzyme sequence
MTDKSLGPLTFGFDIGIASVGWCVLGENRIVDLGVRCFDKAETAKEGESLNLARRTARLMRRRLRRRAWRMTKLARLLKRCGVIADAEFFRQPQSAEPNPWQLRVAGLDRRLEADEWARVLYHLCKHRGFHWISRAEEKKAEGDTKGEGGRVKKGLADTQRRLAEKGYRSAAEMVLAEFPEAPRNKQGDYGKALSRILLGDELKRLFAHQRDLGNPYATPELEAAILGDGSRKRGLFWQQKPPLAGADLLKMLGRCTFEKSEFRAPKASFTAERHVLLTRVNNLRIVVDGHTRPLNPDERRIALALPYEYAEAKATYKQLRTALKKIGQDHFQFAGIAEDKEKETLVKLPAWEALSKALKGKGLETEWKSIAGAAIGGDPTLLDEIARVLSVFKDGDEVEAELRKLALPGGEAMIDALGEISFDRFHNLSLGALRKIVPHMEAGMRYDEAIAAIPEYRHHSQLHVVGAGEEKYLPPLYSHRDKDGRMVFDQNLDVPRNPVVLRALNQARKVLNALIRKYKCSPAAVHIEMARDLSRPLDERNKVKKAQDEYRERNEKDKTAFAEEFGMSAKSREFEKYQLYREQQGKCAYSLAPLDLDRVLRDTGYAEVDHALPYSRSFDDGKNNKVLVLTEENRNKGNRTPYEYLDGAGNSPRWRAFAAFVESTNYRLAKRQRLLRKDFGDKTAAEFRERNLNDTRYICRFFKNWVERHLKLAEGSEAKRCVVLSGQTTAFLRARWGLIKLRGASDRHHALDAAVVAACSHAMVQRLARYSKEKELSRVRDGFVDLETGEILDPAMHRQLERHFPDPWPGFRQELNARLHLDNAEELRAKMAALGSYDEASLDALRPMFVSRAPQRRGSGPIHEETIRSTKHVPANTSHVTVPLHKLKLSKLPDIVGATFSRNAPLIALLRQRLEAHSDDGKKAFAEPVFKPSKAGKGSLVKSVKLASTQNSGIRLRGGVAELGDMHHVDVFRAGVRYHLEPAYLASVDCRLNLPSVPENAEYLFSVSKNDYIEVTFGDTKHVGYFVMYENDGRVTLRAHDQPKPDKEYFRRSVATATRIRKFHVDTLGNIYPAPPEQRRGLA

SEQ ID NO: 2929 - protein, 1110 aa, unidentified
  REGION 1..1110: note = Description of Unknown: Cas Enzyme sequence
MDGKGLGSLTFGFDIGIASVGWCVLGENRIVDLGVRCFDKAETAKEGDPLNLTRRTARLMRRRLRRRAWRLVKLARLLKRSGLDSDPRQPSTVSPWKLRVDGLDRPLTDDEWGRVIYHLCKHRGFHWISRAEEKKAEGDKKEGGKVKKGLSDTQRRMTEKGYRSAAEMVLAEFPDRYDAWRNKAGDYGKALSRALLADELALLFHRQRELGNSHAGAELEAKILGNGDRKSGLLWEQKPPLAGADLLKMLGKCTFERDEYRAPKASFTAERHVWLTRLNNLRIVVDGVTRPLNETERRVILPLPYKQAGDFTYKQLRAVLSKSGLDGFNFAGLAEDKEKDILVKLPAWQTLRKALKGAGLETEWESMAGAATGGNPKLLDEIARVLSVFKDGTEVEVELRKLNLPGGKKMIEALTEISFDKFHNLSLKALRKIVPHMEAGLRYDEACQAAGYHHSQLHEAGAGEHKYLPPFYDRRDKDGRMVFAEDMDVPRNPVVLRALNQARKVLNALVRTHGSPAAVHIEMARDLSRPLDERNKVKKAQDEYRERNEKDKAAFAAEYGIAAKSREFEKFQLYREQQGKCAYSLKPLDLNRVLHDIGYAEVDHALPYSRSYDDGKNNKVLALVEENRNKGNRTPYEYLTALGGENGECWRNYVAFVESNKSFRLAKRQRLLRKDFSGKAADEFRERNLNDTRYICKFFKNYVERHLKLAPKVGAGGTADATMNKRCVVLNGQTTAFLRARWGLLKVRGDNDRHHALDAAVVAACSHGMVKRLGDYARTKELAKARDGFPDPETGEILDPAMFQQLHAHFPDPWPHFRQELEARLDIDDPQELHARLEVFNTYPPESLASVRPLFVSRAPQRRNGGAAHKDTIYAQPERLKVQGGVTQKVPLASLKLSDLDKLIDPHRNEKLYAAIRSRLEAHGGKGDKAFPPDNPLRKPDRDGNPTGPVVRTVTMVIDKLSGIPVRGGIAKNDAMLRVDVFTKAGKFHLVPVYVHHAVAKDLPNRAIIGGRDEHNWTLIDDSFAYCFAMNPNDLLRVTLNDGVRFGYYAGCDRSTGAIHLWAHDRNQQVGKDGLIRSIGVKTAMAFDKFHVDVLGNIYPAPPEQRRGLA

SEQ ID NO: 2930 - protein, 1139 aa, unidentified
  REGION 1..1139: note = Description of Unknown: Cas Enzyme sequence
MPVKMNEPLTIGLDIGIASVGWAVLSPNRIVSLGVRCFDKAETAKEGEPLNLARRQARLMRRRLRRRAWRLTKLVRLLKREGLITDVLTLKQQPSKGFKTPNLWQLRVEALERKLDADEWARVLYHLCKHRGFHWISRAEEKKAESDTKGEGGKVKQGLAGTAKLMTEKGYRTAADMIVKEFPEAKRNKQGEYSKALSRVLLSQELTLLFEKQRTLGNHHANESIQDALLGNGDRKSGLFWAQKPALSGQDLLKMLGHCTFERAEYRAPKASFSAERHVWLTRLNNLRIAVNGEVRALNTAERQAALPLPYQQAGDFTYKQLHAALVKAGLLPDSFKFMGLRYPAIGQKEESKTKDPESERLVKLPAWQEIRKTLKDHGLETEWQSIAGAAQSGEPEMLDQIARVLSVFKDDEEVELELGKLGLPADERMILALQEIRFDKFSNLSLKALRKILPQMESGLRYDEACEKAGYHHSQLHEVGKGEHKYLPPLYSGRDKTGRMLFNEEMDVPRNPVVLRALNQARKVVNALIRTYGSPHAVHIEMARDLSRPLDERRSIEKEQTEFRERNNKDREEFAKEFDIPGNPKGGDFEKWRLYREQHGKCAYSLQPIDLERLLEAGYVEVDHAIPYSRSFDDSKNNKILVLARENRDKGNQTPYEYLGGADNSERWRNFAAYVEGNKSYRLAKRSRLLRKDFGGKEAEGFRERNLNDTRYICKFFKNYVEQYLKLADDSEAKRCVVLSGQLTSLLRARWGLLKIRGDSDRHHALDAAVVAACNHGMVKRMSDYSRRKELAQVREGFVDLETGEIVNPAMFQQMREHFPEPWPLFRDELQARLYNDDPAQLREDIIRLGSYSDEALATLKPMFVSRAPQRRNSGAAHKDTVYGQPEHLKKEGGVTQKIAVTALTPKDFDNLVEPHRNVRLYAALRLWVEGRDEREKRAKEIEKSARESKRTLTRDEKLEIDRLRALPRKPDKNGNPTGPVVRTVTAVIDKLSGIPIRGGIAKNDTMLRVDVFRGKTDGKFQLVPVYVHHRVKGLPNKAVVGKKSEDQWTVMDDRFSFQFSLYPNDLFHLDIGDESIIGYFGGINTNDGGLKYFPHDLRTIDSQRKKGISGAKAFLKIHVDVLGNAFPAPLEQRRDLA

SEQ ID NO: 2931 - protein, 1116 aa, unidentified
  REGION 1..1116: note = Description of Unknown: Cas Enzyme sequence
MAGNTHEALTFGFDIGIASVGWCVLGENRIVDLGVRCFDKAETAKEGESLNLARRTARLMRRRLRRRAWRLTKLARLLKHEGLIADAVAIQSPAFRSPWLLRVEGLDRKLDADEWARVIYHLCKHRGFHWISRAEEKKAEGDTKGEGGRVKKGLFDTQRRMLEKGYRSAAEMVINEFPEAQRNKQGDYGKALSRVLLAGEMALLFQRQRELDNPLAGAALEAKILGNGNRKSGLFWEQKPPLAGADLLKMLGKCTFEKDEFRAPKASFTAERHVWLTRLNNLRIVVGGETRELNMEERRISLPLPYQQVGDFTYKQLRAALVKNGLLPDHFKFAGLRYPTGAQLDESKPKDPETERLVKLPAWQELRKTLKEHGLETEWESMAGAATGGDPTLLDEVAHVLSVYKDGDEVIGELRRLTLPGGEKMVEALSELSFDKFHALSLKALRKIVPHMEAGMRYDEACLAAGYHHSQLHRVGEGKEKYLPPLYSGRDKDGRMVFRDDIDVPRNPVVLRALNQARKVMNALIRRYGSPAAVHIEMARDLSRPLDERNKVKKAQDEYRDRNDKDKAAFAEEFKMEAKSREFEKFQLYREQQGKCAYSLAPLDLHRVLHDVGYAEVDHALPYSRSYDDSKNNKVLALTEQNRNKGNRTPYEYLDGANNSPRWREFAAFVESNKQYRLAKRSRLLRKDFAGKAAEEFRERNLNDTRYICRFFKNYVEQFLKLSDKNDAKRCVVLSGQMTAFLRARWGLAKVRGDSDRHHALDAAVVAACSHGMVRRLADYSRTKELAKVQQGFVDPETGEIPDPAMFQQLHAHFPDPWPRFRDELLARLNIDDTAELRAKMESLGTYLPAALDALRPIFVSRAPQRRNGGAAHKDTIYGQPERLREQGGVTQKVSLSSLTLKDMDKLIDPHRNEKLYAAIRARLEAHGGKGDKAFPAADPLRKPDRDGNPTGPIVRTVTMVIDKLSGIPVRGGVAKNDSMIRVDVFRHKKDGKFHLVPVYVHHEVAKELPNRAIVQAQEENEWTIIDGNFDFCFSLYPNDLVQVKLRDGIRFGYYAGCDRSTGCIHLWGHDRNARFGKDGLMRSIGVKMAMSVDKFHVDTLGNIYPAPLESRRGLA

SEQ ID NO: 2932 - protein, 1075 aa, unidentified
  REGION 1..1075: note = Description of Unknown: Cas Enzyme sequence
  MOD_RES 365..370: note = Any amino acid
MAGKTQEPYTLGLDIGMASAGAALLLPQDKRIHALHVRTFDKAETADRGESLNKIRRDARLIRRRTRRRAHRLLRLIRLMKRIGLIDAATPESFALPGTSPWKLRAAGLDRRLDNKEWASVIYHIVKHRGFQSNRKSEAKSDEKAGAMLSGVGRNMELLKDYRSIGELVAKHEAFRKSKRNKGGDYSHTFARADLADELKLLFERQRALGCRLANADFQAAVHVLLMARRPMPSVLGMVGNCTYEKSEKRAPKASYRAERFVWLGKLNNLKIVGIGEARSLNEPERRAIIDQPFIKSKLTFRQVRTALGLEPHEHFNLLSYRPSRKGQDKDPEDATFFEAKAFHTLRKAYEAAGLDKEWLRDALXXXXXXALTYALTCFKDDTQARDWLSGQGVASNIVEAVLEESFDKFIHLSQKALKAILPFMETGQRTDEALLSASYMQPAEIGERRKRLPPPDKEIIRNPVVYRALNQARKLVNAIVDTYGPPAAVHIEFARDLSKPIDERRRIEQGQKEFQAEKKKATDEFIDNFGHVPSGLDLQKWRLYSEQHAQCPYCQQEIAINNLFDAGYAQVDHALPYSRSFDDSMNNKVLVHGKCNQDKANKTPYEHFNGADDSERWRRFVGWVQGNKTIRQAKKNKLLRKDFGEEEAEKFRDRHLNDTRYICREFKRMVENNLEWHPQAEGDERCVVLSGELTSLLRTRWGIVKNREAGDLHHAQDAAVIAAASRALVKRMSDYSRRNELEMVRENLPDPETGEIIDVAALRQLDAHFPKPWPHFHEELRAHLSPTPAPLLAGMPGYDAERIAEVRPVRVSRAPTRLGLGAAHQETIRSIRPKNMSAIKTPLTSLKYSDIDNIVQDGRDTAWIDELKRRLEPFKGEDKKTNSCAGAKAFGPGQPPLVKPSKDPTRAPIIRSVKKLDTQKSGLPVRGGIANNGAMLRVDIFTNGGRFHAVPVYVADAVKKELPNRAVVANKPEEEWTIMDESHRFLFSLYPNDWVCIRYKNAPAREGYYSGLNRATGAIDLWVHDRNQSLGKKGLLESNGIKIALAVEKYHVDLLGKLHRVHHEERQPIRKSKR

SEQ ID NO: 2933 - protein, 1132 aa, unidentified
  REGION 1..1132: note = Description of Unknown: Cas Enzyme sequence
MAQYVFGLDIGIASVGWAVLDAQRIVDLGVRCFDKAETAKEGDPLNLTRRQARLLRRRLYRRAWRLTQLARLFKREGLIDDAKLFAKAPSWTENAWELRLRGLDHLLTPLEWARVIYHLCKHRGFHWTSKAEEAKAESDAEGGRVKQGLAHTKALMQVKNYRSTAEMVLAEFPGAQRNKRGQYDKALSRVLLGEELALLFATQRRLGNPHASEHFEQLILGHGDRKSGLFWQQKPALSGADLLKMLGKCTFEKTEYRAPKASFSAERHVWLTRLNNLRIVVDGRARPLNDAERQAALLLPYQTETFKYKTLKAAFVKVGLWGDGVRFGGLAYPSQAQAEAEKAKDPEDQFLVKLPAWHELRKAFKAAGHEALWQQISMPALEEDPTLLDQIATVLSVYKDGTEVVQQLRQLALPEPDASIAVLEKIRFDKFSSLSLKALRRIVPLMQGGLRYDEAVAQIPEYGHHSQRIDPGATRHLYLPPFYEAQRKYAGKGDRIGSMQFREDADVPRNPVVLRALNQARKVVNALIREYGSPVAVNIEMARDLSRPLDERNKVKRAQEEFRDRNDKARSEFERDFGYKPKGAVFEKWMLYREQLGQCAYSQQPLDIQRVLDDPNYAQVDHALPYSRSYDDSKNNKVLVLTRENQNKGNRTPFEYLTSFPGGEDGERWRAFVAWVQGNKAYRMAKRNRLLRKNYGTDESRGFIDRNLNDTRYICKFFKNYVEEHLQLAARTDGDTARRCVVVNGQLTAFLRARWGLAKVRGDSDRHHALDAAVVAACTHGMVKALADYSRRKEIAFLQEGFPDPETGEILNLAAFDRAREHFPEPWPHFAHELKARLFIDDLVALREDMQHLGSYAQDDLDRLRTLFVSRAPQRRNGGAVHKGTIYAQPENLKQQGSTIEKILLTGLKLQDFDKLLNPESSDHFVEPHRNERLYAAIRRRLEEFGGKADKAFGPDKPFYKPDKNGQPTGPIVRSIKLVRGKQTGIPIRGGLAKNDSMLRVDVFTKAGKFHLVPVYVHHRVTGLPDRAIVAFKDEEEWTLIDESYAFLFSVYPNDFVCVQQRGKPLIEGYYAGLDRANGNINVWAHDRAASVGKDGLIRGIGVKTALSLEKLNVDVLGRIYPAPPETRRGLA

SEQ ID NO: 2934 - protein, 1100 aa, unidentified
  REGION 1..1100: note = Description of Unknown: Cas Enzyme sequence
MPDKTTSPITIGLDIGIASVGWAVLTSNRIVALGVRAFDKAETAKEGESLNLARRNARLMRRRLRRRAWRQTKVARLLKREGLIEDARHFHAHQPSTISPWKLRVEGLDRRLSPEEWARTIYHLCKHRGFHWTSRAEEKKAEEDAKGEGGKVKQGLAATAKLMREKNYRSAAEMVLAEFPDAQRNKQGDYGKVLARALLAEEMLILFQRQRELGNPHASGAFQVALLGNGDRKSGLFWSQKPALSGENLLKMLGKCTFEKSEYRAPKASFTAERHVWLTRLNNLRIVVDGITRPLNEQERRIALPLPYNQAGDLTHKQLRAALVKSGTLDDGFRFAKFTYAQSADGKNKDPESAILVKLPAWQDIRKTLKEKGLETEWQGMAGAAQSGAPELLDQIAWVLSVYKDDDEVAEQLAKLPLPNPARMIDALQGIRFDKFHALSLRALRKIVPHMETGLRYDEACEQAGYHHSQLFKVGEGESRYLPPFYSGRDKHGRMVFNDDMDIPRNPVVLRALNQARKVVNALIREYGSPASVHIEMARELSKPFDERRKVEKEQTEYRDRKNVDWDEFKKYATTYGLAEPANRDKHGREFMKWQLYREQLGKCAYSLEAFELDRLLERGYAEIDHALPYSRSFDDGKNNKVLVLAKENRDKGNCTPYEYLGGAEDSERWRRFTAYVEGNKAYRLAKRSRLLRKNFGEMESREFRERNLNDTRYICKFFKNYVERYLKLADDNGSKRCVVLSGQLTAFLRARWGLLKVRSDSDRHHALDACVVAACSHSMVQQLSLYARRKELDQVRDGFVDPVNGDVKDIHIHHQLKVRFPDPWAGFRHELEARLKLDNPEDLRSAVEGLGTYPQEALDTLKPLFVSRAVQRRGTGALHEETIRSAKLLDKGVSHVKTPLHKLKLANLPNIVGSEDPRIAPLIDALQERLTRHGDDGKKAFAIPVYMPSKTGKGALVKSVKLASTQKGGMFVRGGVAELGDMLRVDVYRHGKRFLVEPAYAVDNAKRVKPTILPTDSVFLFSLTKHDFVRVTLGNVIHEGYFVMYESDGRLTLRAHDQPKPDKLYFRKAISGATRIEKLHVDILGNLYPALPEKRRDLA

SEQ ID NO: 2935 - protein, 1139 aa, unidentified
  REGION 1..1139: note = Description of Unknown: Cas Enzyme sequence
MGQVFGLDIGVASVGWSVINDERIVDLGVRCFDKAETAKEGDPLNLIRRQSRLLRRRLYRRAWRLTKLARLLKKEELVDRAGFFKQQPGFIDSAWQLRVAGLDRLLEPTQWARVIYHLCKHRGFHWMSKAEEAKSESDSEGGRVKKGLQGTGRLMQEKGYRTAAEMVLSEFPQAQRNKNGQYEKALSRVLLDDELRQLFEAQRRLGNPHSSERFEQLIRGTDHKRAGLFWEQKPALSGENLLKMLGRCTFERKGGPDGNGEYRAPKASFSAERHVWLTRLNNLRVVIDGQARPLTDAERATVLLLPYTKETVKYKSLKSALVKAGYWASDARFGGMAYPSEAQQEAGKAKDPEDQTLVKLAAWHELRQAFEKAQGLTLWQQISTPALDGQPELLDSIAWVLSVYKDGEEVHQHLRQLPLPEVDTCVAILEKISFEKFSNLSLMALRQIVPLMDKGMRYDEAVASIPAYGHHSQLRDNNAPGSMYLPPFYEPVRRYNAKTDRVGSMVPRQDANLPRNPVVMRSLNQARKVVNALIKRYGSPTAVHIEMARDLSRPLYGHVAPNGKRIEGRKDVEALQKEFRDRNLQARADFEQEYGYQPKAAVFEKFMLYREQQGQSAYSQLPLDIARVLDDPNYVQIDHALPYSRSYDDSKNNKVLVLSRENQEKGYRTPYEYLTALDGGQEGDRWRAFNAWVQANKAYRLAKRNRLLRKNFGGDEARGFADRNLNDTRYICKFFKNYIEEHLQLAPKADGDTNRRCVVVNGQLTAFLRARWGLTKNREESDRHHALDAVVVAACSHGMVKALADHARRKELEFLKEGFADPETGDILNPAAFDRGRQHFPEPWPHFRHELQARLWTDDLATLRGDMARLGTYDQQALTDLRTLFVSRAPLRRNGGAVHKDTVYAQPEHAKKEGKVIKKVALSALKPKDLDNLVEPHRNARLYQAIRDRLAAYGGKAEQAFAPDKPFYKPSRDGETQGPLVSSVKVLDSETGIPIRGGLAKNDSMLRVDVFAKAGKYHLVPVYVHHRVTGLPDRAIVAFKEEKDWTLIDNGFQFLFSVYPNEYVRVQQEGKPKIEGYFGSAHRGTGTINIWLHDRNTKVCKAGAVEGIGVKTALTFEKFNVDILGHIYPAPAETRRGLA

SEQ ID NO: 2936 - protein, 1123 aa, unidentified
  REGION 1..1123: note = Description of Unknown: Cas Enzyme sequence
MANKQENTFTFGLDIGIASVGWAVQAEDHLIALGVRAFDKAETAKEGESLNLARRSARLMRRRLYRRAWRQTKVARLLKREGLIDDAQFFHSQQPARVSPWRLRAESLDRPLTPEEWARVIYHLCKHRGFHWVSRAERKKAEEDTSSEGGAVKKGLAQTAQKMKEKGYRTAAEMVLAEFPDAQRNKQGHYDKSLSRALLADELALLFQRQRELGNPHTEEAFRIQILGNGDQKSGLFWSQKLPLSKDNLLKMLGRCTFERDEYRAPKASFSAERHVWLTRLNNLRIVVEGDTRPLNDAERQIALPLPYQRAGDFKHEHLRSALTKTGLWNEHVRFAKFPYAQSADGKSKDPESAVLVKLPAWQTLRKHLKDKGLETEWHSLAGAAQAGDPTLLDAIAWVLTVYKDDAEIEHELGQLNLPGGRSMVEALAELSFDQFSALSLKALRQIVPHMETGLRYDEACERAGYHHSQIFETGAGEEKYLPALYETHRGKGPGQENRMIFSERIEREITGGIPRNPVVLRALNQARKVVNALIREYGAPQAVHIEMARDLSKPRDERNRIDKEQAEYRDRNEKGKALFAEHFGQSPKGQEFEKWRLYREQQGKCAYAIAPIDLARLLEPGYVEIDHALPYSRSFDDSKNNKVLVLAKENRDKGNRTPYEYLGGTEDSPRWRLFVAFVEGNKAYRLAKRTRLLRKHFGKEEAEGFRERNLNDTRYICKFFKTYVERYLKLAEGSESKRCVVLSGQLTAFLRARWGLLKIRSDSDRHHALDAVVVAACSHGMVKRLSDYARRKELESVREGFVDLETGEIVNVAMYHQLKAHFPDPWPGFRHELEARLFTDDANKLREAVEELGTYSPAELADLKPLFVSRAVQRRNGGAAHKDTIYAQPERLKTQGGVTQKVPLASLTLKDLDNLIDPHRNEKLYTAIRTRLDAHGGKGDKAFPASNPLRKPDKSGQPTGPIVRSVTRVIDKLSGIPIRGGIAKNDTMLRVDVFTKGGKFHLVPVYVHHKISNLPNRAIVAFKDEADWTLIDDSFAFCFSLHPNDLVQIKQKNKPPILGYYSSCHRGTGNLNLWAHDRNQRIGKDGLIEGIGVKTALSLEKFHVDVLGNLYPAPPEIRRELA

SEQ ID NO: 2937 - protein, 1125 aa, unidentified
  REGION 1..1125: note = Description of Unknown: Cas Enzyme sequence
MSGNPTPTLAPTPKRRLRRGLTPEQIESLGPLTFGFDIGIASVGWAALSDTRIVDLGVRCFDAAEDPKTGESLGEQWRTQKVARRRLHRRGDRLKALRRLFVHEGLLGKPDSNLLAAPPTQARQINLQTPWALRSRGLDERLEPIDWARVIYHIVKRRGFLSTRKSERMERSAKTATAKEKQGLLAGVAATARMLHVDGERRYRTLGELAFKSDAFYTAKRNKAGAYSRSFDRNLLLDEVKTLFAAQRKLGNAHTSDDFENQVAHLLMYQRPAVTGVAMLKLMARCTLEPDEYRAPRNSYSAERFIWLGKLANLRIVQNGDRRELTDGERALAITMPYENKSGKVTFKQLRNHIGLGDSAQVGFAGLAYGSKRNKKGDAVDPEEATLIQLKSWPAFREALLEANLKESWEKLAVNPAQMDSAAYALSVYQTDDELRPALSALDFSPAEVEALLTIDFKGFIALSSKALGKILPHMELGLRYDEACDRAGYNHAQPQAGSRNHGRLPKFSYEDIRNPVVFRALNQARNVLNALIDVYGSPARVHVELARSLSKSFEERRDIQRDQETYRKSREEAEAMFREHFAGRSPQPRNQDLLKYRLYREQDGKCAYSLAAIDLERIVEPGYCEVDHALPYSRSFDDSMSNKVLALTKENRDKGNRTPFEYLGGENDSPAWHAFEAFVVGNKQYRKAKRDRLLRRNFDDASAEGFRNRNLNDTGWVVRLFANRVRDNLRFAPGRDGQIAEQPVLTPSGGFTSFLRTRWGLHKDRESSDLHHAQDACVIAAATPTLIKRVSDYNRKRETLEILPGGAIVDTTTGEVKKDAKAHFPEPWPHFRDEVLTRLSNDPAKAVALVSSAYDAETLAHLRPVLVSRAVKRRTGGAVHQDTVRSVKPHLGPQTSSKRTRLTDLNLAKLDQIVGAQDARNAGLMHALRSRLEAFGGDGKKAFAPSQPPVHKPRRDGTDGPVIRTVQLKDVQKGGVPVRGGVADQASMWRVDVFEKAGKFYLVPIYQSDRVKGRALPHRAATGNTPRDQWRLIDDSYRFHMSLFPNDLIRLKNRKMDFTGYFAGLDVATAAISILAHDRSSAIGKDGLLRGLGVQQGTELFGKYLVDVLGTKFSAKQFVRDDLA

SEQ ID NO: 2938 - protein, 1107 aa, unidentified
  REGION 1..1107: note = Description of Unknown: Cas Enzyme sequence
MTGNPAAHPLTFGFDIGIASVGWAVLDDRRIVDHGVRAFDKAETADRGEPLNLARRTARLLRRRLRRRAWRLVRVARLLKREGLIADSRWFLAQPSFADSTWRLRIEGLNRRLSDEEWARVIYHLCKHRGFHWTSRAEERMAEADAQGEGGKVKQGLAGTERLMKQKNYRSIAEMVLAEFPEAQRNKQGEYTKALPRRLLGDEFALLFRRQRELGQPHSGEGLEAALLEPKKGLFWTQKPSLTGEALLAMLGRCTFERAEYRAPRASFTAERHVWLTRLNNLRIVVDGIVRPLNPAERDAALPLPYELVQVTFKQLHAALVDKAGLPDEATFSGLRPAKEGKDPLSERLIRLPAWQELRTTLKRANLETEWKSIAGAAVGGSPGLLDDIARVLSVYKEDDEVRAELARLPLPGARSAVANALLDIRFEGFHALSLKALRKIVPLMATGLRYDEACVQAGYHHSQIVEPGSGEHDLLPPFYKYRDRSGRMVLRDDGDIPRNPVVLRALNQARKVMNALVRRYGAPAEVHIEMARDLSRDFDERRKIEKEQSQFRERNEKDRQDFAQAFHIAGRVQGSDFEKWRLYREQQGKCAYSLSAIDVDRLLEPGYVEVDHALPYSRSFDDSKNNKVLVFASENRTKGNLTPWEYLGGAQDSERWRHFAAFVQANKAYRIAKRSRLLRKDFDEKAAAEFMDRNLNDTRYVCRFFKNYVERHLKLAHGSSAKRCVVLSGQLTAFLRVRWGLLKLRAESDRHHALDAAVIAACSHALVKRLSDYSRRRELEQVRSGFVDPATGEIVDLAALRQLEQAFPAPWPHFRHELEGRLKIDDAEQLRAEMARFGTYPADALEALRPLFVSRAPQRRNGGAAHKDTIYGQSARMKASGSVTQKVPLQSLTLKDLDRLADPQRNQKLYAAIRARLEMHGGKGDKAFPADAPLRKPGRDGMPDGPVVRTVTMVVEKMSGIPIRGGIAKNDSMLRIDVFSKNGKFHLVPVYVHHRVSGLPNLAIVAHKDESEWPAMDETFLWCFSVYPNDLLRVTLKRETHQGYYAGCDRGSGTINIWTHDRSRSVGNEGLIRGIGVKTALNIEKFNVGVLGDVHPAKPEKRRGLA

SEQ ID NO: 2939 - protein, 1145 aa, unidentified
  REGION 1..1145: note = Description of Unknown: Cas Enzyme sequence
MNVEKFLHLESNAGLSFGLDIGIASVGWAVLSPNRIVDLGVRCFDKAETAKEGESLNLARREARLLRRRLYRRAWRLTQLARLLKKEGLISHARFFKQQPGFAENDPADPTGKKQIAASTWVLRKKGLDNLLNPTEWARVIYHLCKHRGFHWVSKAEEAAADGDAKGEGGRVKKGLADTTARMAEKGYRTAAEMVLAEFPDAQRNKRGDYSKALSRKLLDDEFRLLFEAQRRLGNPHTGENFELLVRGSGDRRAGLFWKQKPALAGADLLKMLGKCTFEKSEFRAPKASFTAERHVWLTRLNNLRVVVDGVSRPLFESERQTALNLPYQSGEKFTYKNLRSALEKTGLPASFRFGGLAYPSAKQKEEEKAKHPEDQILVKLSAWHTLRLALNKAELKDAWQQISVAALDGQPEALDHIGWVLSVYKDDDEVKTALEKLALPQAEKTISVLLGIRFDKFHALSLKALRKIVPLMERGWRYDEAVAQIPEYGHHSQLVKPEDGKVRYLPPFYEGRDQRGTMVFREDLDIPRNPVVLRALNQARKVVNALIKQYGSPVAVHIEMARDLSRPLDERREVQKLQDEFKERNQKAREDFESQFLRKPNGKDFEKWMLYREQGGQCAYSQQPLAPSGDCNEIFLEGKTQIDHALPYSRSFDDSKNNKVLVLTRENQNKGNRTAFEYLSSFSGGEDGDRWRNFVAWVNQNKAYRAAKRNRLLRKNYGAEEAKGFKDRNLNDTRYICKFFKNYVEQNLQLAAKADGETNQRCVVVSGQLTAFLRARWGLLKIREESDRHHALDAAVVAACSHGMVKALADYSRLKEVEFLKDGFPDPETGEIINPAAFDRGRHHFPGPWAHFRHELEARLKTDDLTALREDMQRLGTYSESDLEQLRTLFVSRAPQRRNGGAVHKDTIYAQPERLQAEGSVVQKVPLTSLSIKDLDRLADPHRNAKLYTAIRERLLAHSGKADKAFAPDKPFYKPDKDGKPNGPIVRTVKLVIDKLSGIPLRGGVAKNDSMIRVDVFTKAGKFHLVPVYVHHRVTGLPNRAVVAHKEETDWTVLDETSSFLFSLYPNDLVRVTQKTQTTIGYYAGCDRGSGNINLWAHDRSNSIGNAGLIRGIGVKTALSIEKFNVDLLGHIYPAQPEQRRGLA

SEQ ID NO: 2940 - protein, 1108 aa, unidentified
  REGION 1..1108: note = Description of Unknown: Cas Enzyme sequence
MQGNDSRPGLVFGFDIGIASVGWAVLAVDRIVDLGVRCFVAAEEPKSGKPLNEQRREARTARTRLARRAWRMKRLRRFLAAADVMPSSEPHALQVQRGAATESGALDPWTLRCEGLDRRLQTHEWARVLHHLVKRRGFHVARRSETAASESEGGRLSQGVRRTASLMQGRWRTLGEMAVRDEQFATHKRNKAGSYDHSFSRALLADELALLFESQRRLGNPHATPELQREVTRLFWLQKPALQGAAMLAMIGRCTFEPGEYRCPRQSFAAERFVWLSRLNNLRIVERGERRALTSDEHRAVLTLPYERAKVTYRQLRDAIGLEASSQVGFAGLSYGSRRNKKGEPVDPEEATFVALDGWHQMRRAFAKAGLEQAWQRRAEKALAGDAGALDRIAQAIAIHKTDAELRPALIASGCSQEEADALLEIDFRGFLQLSFKAILRLLPHLEQGLRFDEAKMACGYTDHQAYCPSRLLPDWPHHFTVQHGKRVKRYEIGNPVVIRALHQARKVLNALVEEYGSPAAVRVELARDLSKPFDERQDIKRGQQEFQAEKQRAFDYFLDQIGRRPRGDELLKMRLYREQDGQCAYSQQPLAPFGDLRQMFDACEVDHVLPYSRSFDDSQNNKVLVLARENREKGNRTPYEYLDGAGASETWRRFEAWVSGHKQLRKAKRDRLLRKHFGDDEAGEFRNRNLVDTRYVTRAFAEFVRHRLHFAPDETGAPKANPVLYPSGALTSFLRARWGLLKDREMNDLHHALDACVIAAATPALVKRVADFSRRGELIQLGDGTFADRLSGEVLSAQQARSLGERFPQPWPEFRDEVLARLAPDPKAALGDRFPAYDLEARQALRPLLVSRPPKRRAAGAIHEDTVRSVASHLGAVTSSTRVRLEKLTLERLESVVGASDPRNGGLMALLRQRLQEHGGNGQKAFGPQAPPVHKPLHDGTPGPIVRAVKIAERQNGGVRVRGGIANQASIWRVDVFGKGGKFYLVPIYVADQRKRIPVPDRAATAGATPPEWTRMDESYEFRFSLFSDDLVRFKTKKIDMLGYFAGVDVNTASIRLRAHDRDRRVGKGGELRSLGVKLGVECFEKLHVDVLGRCFRARPERRHELA

SEQ ID NO: 2941 - protein, 1136 aa, unidentified
  REGION 1..1136: note = Description of Unknown: Cas Enzyme sequence
MGNLVFGLDIGIASVGWAVLNDTRIVDLGVRCFDKAETAQKGESLNLARRQARLLRRRLYRRAWRLTKLARLLKHEGLINSVDYFKQSPPTTDSTWQLRVDGLNRLLTPLEWARVIYHLCKHRGFHWVSKAEQAKAESDSEGGRVKQGLDYTRKLMEEKHYRSAAEMIMAEFPEAQRNKRGSYDKALSRVLLDRELALLFKSQRQCGNPHTSERFEALIRGTNEQPNGLFWQQKPALSGENLLKMLGKCTFEKTEVRAPKASFSAERHVWLTRLNNLRVVVDGVSRGLNAAERAATIQLPYTSGEKFTYKNLRTTLVKQGLLPETFRFGGLSYPSIAAQEQNKTKDPEGQTLVKLPAWHELRLAFKRAQQDNLWQQISTPALEGQPQLLDEISWVLSVYKDDAEVEQALRKLDLPHTEDSACTCIKVLRDIRFDKFSNLSLKALQRIVPLMDTGLRYDEAVARIPEYGHHSQLQSADAPRSRYLPPFYEAQRKYESKTDRLGSMKFREDIDIPRNPVVLRALNQARKVVNGLIREYGSPTSVHIEMARDLSRPFDERNKVKKAQNEFRDNKQKALEIFEKDFGYKPKAATFEKWMLYREQNGQCAYSQQPLDLNRLLNDASYVQIDHALPYSRSFDDSKNNKVLALSRENQNKGNRTPHEYLTSFSGGESGERWRNFAAWVQGTKSYRMAKRNRLLRKNYGVDEAQGFRERNLNDTRYVCRFFKNYVEQNLQLAIPTDEEVNRRCVVVNGQLTAFLRARWGLLKVRSESDRHHALDAAVVAACSHSMVKALADHSRRKEIEFLKEGFPDPETGEIINPTAHAQGSQYFPEPWAHFRRELQLRLYTDDLTTLHEELTRLGTYDPHVLKAVRTLFVSRAVQRRNSGAVHKETIYAQADRRSPSPDGPFERVRVTIEKTPLISLTLKDLDKLADPHRNEKLYAAIRERLEAFQGKADIAFGPDNPLYKPGKDGSPNGPVVNSVKLIREKMSGIPIRGGIAKNDSMVRVDVFTRAGKFHLVPVYVHHRITGLPDKAIMAFKDEPEWTQIDGSFEFLFSLHRNDLVRIQQKGKLPIQGYFASAHRGTGAISLWLHDRNSTAAKDGAVEGIGVKTALSIEKLNVDVLGHIYLAPKEKRRGLA

SEQ ID NO: 2942 - protein, 1116 aa, unidentified
  REGION 1..1116: note = Description of Unknown: Cas Enzyme sequence
MNYNHDIMRDKILPSKSKKQKNAEPLTFGLDIGIASVGWAVLSPERIIDLGVRAFDKAETTDGKPLNLARRTARLTRRRLRRRASRLIKLAELLKHEGLINNARIFKEQKPFHKSLWQLRVEGLERKLDAEEWARVIYHLCKHRGFHWTSRAEEKAAESDSKGEGGKVKDGLAGTEKLMREKNYRTVAEMVLAEFPKAQRNKLGDYSKALSRILLARELVLLFQHQRELDNVFASKAIEAKIHGNDDKKTSLFWEQKPALAGKDLLKMLGKCTLDKTEYRAPKASFTAERHVWLTRLNNLRIIDKGIVRGLNEQERQIALLLPYQQAGDLSYKQLRAALVKLDCLSDSFLFIGLAYPGGKQEAEEKAKNPETATLVKLPAWQQLRTALKKAGMEMEWQSIAAAALEGKPELLDQIACVLSIYKEDDEVTNELRKLPLPDPERMINALLDIRFDKFHALSLKVLYRIVPHMESGSRYDEACVCAGYHHSRLQKAGKADKYLPPFYAGRDENGCMVPNDDLNIPRNPVVLRALNQARKVVNALIRKYGSPHGVRIEMARDLSRPLDERKKIQKTQEEFRDRNEKDKALFATEFSSIAALNGKNFEKWQLYREQQGKCAYSIEPLDIHRLFEQGYVEIDHALPRSRSFDYNKNNKVLVFAKENQNKGNRTPYEYLGGAENSDRWRQYVAFVESNKSYRLAKRSRLLRKNFGEKEAKEFRDRNLNDTRYICRFFKNYVEQYLQLATDSEEKRCAVLSGQLTSFLRARWGFSKSRGESDRHHALDAAVVAACSHGMVRHLSDYSRRKELSRVSKDFLDPATGEAVNPALLKQLREHFPEPWSHFRDELLARLQINDPELLRKKIEPLGTYPRDTIDALRPLFVSRAVNRRTGGEIHKAQIFSVKNNDPTKALERVPLRSLTLAKLERMVGKHDPRNKALYEVLKDRLNSFGNDPDKAFGPQQPKLVKPSKVGDKAPEIRSIRVEVTQNSGLMLRGGIADLGNMMWVDIFRHETQGYSVVPRYQASVDKIRGVSENRTGYTFCFSLTKNDFVEINIGGETVRGYFILYESDGRMRLRMHDQPQLEKYFFRKSITSAKSISKFHVDILGCIYPASPEKPHDLA

SEQ ID NO: 2943 - protein, 1125 aa, unidentified
  REGION 1..1125: note = Description of Unknown: Cas Enzyme sequence
MASKHDNLGALTFGLDIGIASVGWAVLGEDRIIGLGVRCFDKAETAKEGESLNLARRSARLLRRRLRRRVWRLTKLARVLKREGVIADSNLFRNKIEKNTAVPKSSWQLRVDALDRQLAAEEWARVIYHLCKHRGFHWISRAEEKAAEGDSKSEGGKVKQGLAGTKKLMAEKGYRTAAEMVLAEFPDAQRNKQGDYSKALERKLLGRELTLLFKQQRELGNPYTSTELETKILGSGDRKSGLFWAQNPALAGSDLLKMLGHCTFEKTEYRAPKASFTAERHVWLTRLNNLRIVVDGTTRSLNEVERRITLPMPYQQAGDLTYKQLRTALNKAGYLPESFRYAGLAYPSGQKTDEKSKDPESAVLVKLPAWQELRKTLEKKELASEWVKISSDALDGKPQLFDQIAWVLSVYKDDGEVGTELRKLNLPNAEKMIDALLDIRFDKFSNLSLKALRQIVPFMEQGLRYDEAVANIPEYGHHSQLHKAGTGEHKYLPPFYKERDKTGRMVFNDDMDIPRNPVVLRALNQARKVVNALIKEYGSPHEVHIEMTRDLSRPLDERRNIEKLQKEFRDNNEKVKAQFAQDFSIVGAVKGKEFEKYQLYREQQGKCAYSIDPIDIHRLFEQGYVEIDHALPYSRSFDDSKNNRVLVFAKENRDKGNRTPFEYLDGKENSERWRQFVAFAEGNKAYRLAKRSRLLRKDFGEIEAKEFRERNLNDTRYICKFFKNYVEQYLQLHEDSEAKRCVVLSGQMTSFLRARWGLVKVRSDSDRHHALDAAVVAACSHSMVKRLSDYSRRKELEQVREGFVDVDTGEIINPDMFEQIEKHFPNPWQNFRHELEARLKLDDPALLREEMQRLGTYSEDELQSLRPLFVSRAPQRRNSGAAHKDTIYAQPERLKAQGGVTQKVALTSLTLKDLDKLIDPHRNEKLYDAIRSRLEQHGGKGDKAFPASNPLRKPDCAGNPTGPIVRGVTMVIDKLSGIPIRGGIAKNDSMVRVDVFAKAGKFHLVPVYVHHTVAKVLPDRAIVQAKDEAEWTLIDDSFEFCFSLHPNDLVQVQQKGKSAILGYYSSCHRGTGNINLWAHDRSLQVGKDGMIEGIGVKTALSIEKFNVDVLGNRYPAPPEKRRDLA

SEQ ID NO: 2944 - protein, 1195 aa, unidentified
  REGION 1..1195: note = Description of Unknown: Cas Enzyme sequence
MTSKQDNLGALTFGLDIGIASVGWAVLGESRIIDLGVRCFDKAETAKEGESLNLARRTARLLRRRLRRRAWRLTKLARLLKREGLIADANLFKCKIEKNTPVPKSSWQLRVDALDRQLSAEEWARVIYHLCKHRGFHWISRAEAKPVEGDSKSEGGRVKQGLADTEKLKKAKNYRTAAEMVLAEFPEAQRNKQGDYSKALSRLLLNDEFVLLFQRQRELGNTHTSAEFQEKILGTGDKKSGLFWTQNPALAGNDLLKMLGHCTFEKTEYRAPKASFTAERHVWLTRLNNLRIVVDGSTRSLNEAERRVALPLPYLQAGDLTYKQLRAALTKAGYLPESFRYTGLAYASGQKADEKSKDPESATLVKFPAWQELHKTLEKKELASEWQKISTDALDGKPQQFDQIAWVLSVYKDDAEVEAELRKLNLPSAEKMIDALLDIRFDKFSNLSLKALRQIVPLMEQGQRYDEAVANIPEYGHHSQLHKVGEGEHKYLPPFYKERDKTGRMVFNDDMDIPRNPVVLRALNQARKVVNALIKKFGSPHEVHIEMARDLTKPLRGHWNAQGKFIEGRQDILKKQEEFRERNEKDKAQFAQDFNIMGAVKGKEFEKYQLYREQQGKCAYSIEPMDIHRLFEHGYVEIDHALPYSRSFDDSKNNRVLVLARENRDKGNLTPFEYLDGKDNSEHWRQFVAFVEGNKAYRLAKRSRLLRKDFGEKEAKEFRERNLNDTRYICKFFKNYVEQYLQLHEDSDVKRCVVLSGQMTSFLRARWGLVKVRGDSDRHHALDAAVVAACSHSMVKRLSDYSRRKELEQVREGFVDVNTGEIINSDMFDQIEKHFPNPWPHFRDELEARLKLDDPALLRDAMQRLGTYSDDALQSLRPLFVSRAPQRRNSGAAHMDTIYTKPRDGHVLMVEDKEAKKIAKDNAEKVLRPATIEEKASMAIARIGVTDKDSKGNYKLTLEKLGDILDPRRNERMIEALRLWIASRDEREKAAKAIEANFGRGKEKRKPTDAENAELERLRALPRKPLQADPDSGPFTGPIIRAVKVNAGKTTGISVRNGIAANDTMLRVDVFTKTGKFHLVPVYVHHSVAKVLPNKAVVSKKDESQWTVMDDSYAFHLSLYPNDLLQLKIDGESILGYFAGININDGGLKYFPHDQRSADSLKKRGISSAELFTKLNVDILGNRYPAPPEKRRDLA

SEQ ID NO: 2945 - protein, 1540 aa, unidentified
  REGION 1..1540: note = Description of Unknown: Cas Enzyme sequence
MNYYNGFIITENAMTSKHENLSPLTFGLDIGIASVGWAVLSQNQIVDMGVRAFDAAEDKDGKPNNQTRRGARVSRNRYDMRTWRLKKLTRLFRDVGMLTKSEIKHLFSAQHEKNVKHVSPWQMRAEGLSRPLTKQEWAQVIFHVIKHRGFKFFSKSEDPTKSGNDDADTIDASAKAERDGLRDGLTYTSKLLEKYPQFQTLGQAAHQLANAQQDKNEIYRDSKGNELNAKDCEEFQNAYRNKGKSYRHAFRRDDLIAELNALFDTQHKHDNPYTELALPDGIERLTEIAVSSETRRVEPTFRAQVFALLELQHPPISIEQMDAMIGDCELESEARNGKGKAERRAAKHTFSNERATWLQTLNNLRIKRDGKETTLTEQERNILLNLPYTQSKLTFKQAREILREQNGFPTHWREASFTKLSYRNKRKDDGSWLNIVTTDGTKTALGKYIKSEKERKDINKKLKQRLETGTMTFAELRQLYKLSENETFECQRKNEEIIPVALEDQYPISFDELDHKKAFIKMMPAKSKSAKKLTPKAIRALESLRAKPDASLADLRIAIEQTEELESGWQFEKSQKDIQPIQSANEDKTDVPIEYEDAQKAEEEILIELKGWHTFKRTLENNRPEWWASLQAAWREPQSDAGKTTAHQLDGIAEVLTKAQTDADVKKGFAPLQLDEAKLEALEGIRFKRYRNLSLKALRNILPDLEQGKSYKEACDRAGYQPITPPSRTRHLPPLESYLYERVRHGRTNGFGKTGYSEQRYKDLTNPVVARAFNQARLVLNELIDRYDQSPAYVHIELARDIARPLKGKWSNDKYIEGRLDVQKKQEENRNKRQLIRNNFAETHRISNPSEFQILKERLYHEQQCKCLYTLEELDLDRVVRDENYAQIDHIWPRSLTFDNSMENLALVHAHANQDKGSRIPYDYINSHSRFGSIETQRAEHWRKVAAHVMTCKGMSDNKQKRLLATELDADEFLARNLVDTRYATRLFARMVRDRLLFDGQTEDKTEDIDPSESGKSRLEKFHKTRVRTPQGGVVNFLRRRWLGDIKDRDAGDKHHAMDACIIAACTPKLIHHVNSWFSNQEKVPNQFKKRDDGTYTDKGTGEIISKDEARERGLYLPAPWDGFRHEFLEKYESIFVSRAIRKKRNVELHDANPMALRYYPVNLCELTPEMLDKKQLPPNLPESRLPLIESIRHRLLSNNGDAVSAFKDGFLIKNKKGKESVIHTLPLPIISLPADYFKRTSKQLGKSNKENFKDTAMKNVPLSQLSLKRLSEEKLGSTFHHRNNRMIEAIKAQLNNFKDDAEKAFAEPFYPFGKDRPFIKSIRLPAPCSSGIHVRGGAAKLGDALYTEMYKHDGAYWFRARYKVAQENSFGLPVMPKGAQHIGNFMKNDYVRIKHPNLTHCYREVGRHKDAYGNTLIDVEAIFENGIFEGYWNYFEPSNDRPVVQLHDNSPFFLLEAEKTLDKESLTLIAKPKEKKNSKAKTTEQVEYFEFCETPQDPPLKFSLVGDIKRKVSDAAFIEKLKVSILGSIQEGKDANDLA

SEQ ID NO: 2946 - protein, 1139 aa, unidentified
  REGION 1..1139: note = Description of Unknown: Cas Enzyme sequence
MQGNQNLGPLTIGLDIGIASVGWAVLGETRIVDLGVRCFDKAETADRGESLNLARRSARLLRRRLRRRAWRLTKLARLLKREGLIADVGVLKQPPSPGFKTPDLWKLRTEALDHKLDDEEWARVLYHLVKHRGFHWISKAEEKRADDDKEGGAVKKGLAGTKKLMQEKHYRTAAEMVMHEFPDAHRNKRGDYSKALSRVLLAEEMKLLFERQRQFGNSHASEKLQATLLGNGNRKSGLFWAQKPSLSGEALLKMLGKCTFEKGEYRAPKASFTAERHVWLTRLNNLRIVVDGKMRPLTSAERGIALPLPYLQASDFSYKQLRKALLKAGLSDEFRFVGLAYPSERQKTEEKAKDPEDEKLVKLPGWQALRKTFKDAGLETEWQQISVAALDGKPQLLDEIARVLSVYKEDEEVERELTSLDLPSKDRVIQALLATRFDKFSNLSLKALYSILPHMEVGLRYDEACSQAGYHHSQLHEVGAGEHKYLPPFYAGRDKDGRLKFNEELDIPRNPVVLRALNQARKVVNALIKKYGAPHEVHIEMARDLSRSFDERRDIKKAQDEFRGRNEKDRAAFNAEYNTAGELKGREFEKWQLYREQHGKCAYSLQPLDINRLFEMGYVEIDHALPYSRSFDDSKNNRVLVLASENRNKGNMTPFEYLGGKDNSEQWRQFVAYVNSNKLYRQAKRNRLLKKDFDENESRDFRDRNLNDTRYICRFFKNYVECYLKLHDESEAKRCTVVSGQLTSFLRARWGLVKVRADSDRHHALDAAVVAACSHGMVKRLSDYSRRKELENVREGFVDMDTGEIANKSMFDRLEQHFPSPWPHFRQELLARLNQDDLVALRAELENLGTYTQDALEELRLLFVSRAPQRRNSGAAHKETIYAQPGSLKSQGGVTQKVAVADLKLTDIDKLIDPHRNEKLYAALREWVANRDAREKRAREIEKAARETKRQLTDDENSEIERLRALPRKPDRSGNPTGPVVRTVTMVIDKLSGIPIRGGIAKNDTMLRVDVFSKAGKFHLVPVYVHHRVTGLPNRAIVAFKDEDEWTLIDDSFQFCFSLYPNDLVQVALKKESQFGYYAGCDRSTGAINLWAHDRNQSVGKDGLIRGIGVKTALNVEKFNVDILGNIYPAPSEARCDLA

SEQ ID NO: 2947 - protein, 1147 aa, unidentified
  REGION 1..1147: note = Description of Unknown: Cas Enzyme sequence
MASKHENLGPLTIGLDIGVASVGWAVLGENRIIDLGVRCFDKAETAKEGDSLNLVRRSARLLRRRLRRRAWRLTKLARLLKREGLITDANLFKNKIEKKSVAPKSSWQLRVDALDRQLTSEEWARVIYHLCKHRGFHWISRAEEKAAEGDSKSEGGRVKQGLAGTKKLMAEKSYRTAAEMVMTEFFTQRTDGNGEPALTKKTGEPLLDGAARNKQGDYSKALSRVLLNDEFALLFQRQRELGNTHTSTSLQEKILGTGDRKSGLFWAQNPALAGNDLLKMLGHCTFEKSEYRAPKASFTAERHVWLTRLNNLRIVVDGTTRSLTEAERREVLPMPYKQAGDLTYKQLRTAMTKAGYLPDSFKFTGLAYPSGIKTDEKAKDPESAALVKIPAWHELRKTLDKQELADEWKKMSTDALEGNPNLLDDIAWVLSVYKDDAEVEAQLRKLALPNADKLVDALLDIRFDKFSNLSLKALRQIVPFMELGQRYDEAVANIPEYGHHCQIHTVGAGEHKYLPPFYSGRDKDGRMVFNDDMDIPRNPVVLRALNQARKVVNALIKEYGSPHEVHIEMARDLSRPLDERREVEKLQKEFQVEKEKGVEHFISVVKREPKRDELLKMRLFRQQLDQCPYCQKELDIHRLFISSDDMYAQVDHILPYSRSFDDSMNNKVLVHTKCNQDKANRTPFEYLDGKFDSPQWRSFVGFVEGNKAYRLAKRSRLLRKDFGEKESKEFRERNLNDTRYICKFFKNYVEQYLQLHEDSEAKRCVVLSGQMTSFLRARWGLVKVRGDSDRHHALDAAVVAACSHSMVKRLSDYSRRKELEQVREGFVDIDTGEILNPAMFDQVEKHFPNPWPQFRNELEARLKLDDPALLREEMRRLDTYSEEALQSVRPLFVSRAPQRRNSGAAHKDTIYAQPERLKAHGGVTQKIALSSLTLKDMDKLIDPHRNEKLYAAIRTRLEQHGGKGDKAFPASNPLRKPDSAGNPTGPIVRGVTMVIDKLSGIPIRGGIAKNDSMVRVDVFTKAGKFHLVPVYVNHAVAKELPNRAIVAFKDEEEWTLIDGSFGFCFSLYPNDLVRVKLKKETREGYYASTHRGTGCINLWAHDRNSNVGKDGSIEGIGVKTALSIEKFNVDVLGNRYPAPPEKRRDLA

SEQ ID NO: 2948 - protein, 1121 aa, unidentified
  REGION 1..1121: note = Description of Unknown: Cas Enzyme sequence
MTSKQENLGALTFGLDIGIASVGWAVLGENRIIDLGVRCFDKAETAKEGESLNLTRRSARLLRRRLRRRAWRLTKLARLLKREGLIADANFFKYKIEKNSPVPKSSWQLRVDALDRQLTSDEWARVIYHLCKHRGFHWISRAEEKAAEGDKGEGGKVKQGLAGTKKLMAEKNYRTAAEMVLAEFPEAQRNKQGDYSKALSRVLLGDELKALFEHQRKLGNSFASEKLEASILGSGDRKSGLFWTQNPALTGDKLLEMLGYCTFEKSEHRAPKASFTAERHVWLTKLNNLRIMVDGTTRGLNEMERRLALPMPYQQAGDLTYKQLRAALTKSGFLPESFRFTGLSYASGQKADEKAKDPETGVLTKLPAWHELRKILKDAGLESEWQKISTDALEGKPELLDQIAWVLSVYKEDDEVVTELRKLSLPNAEKMIDALLDIRFDKFSNLSLKALRQIVPFMEQGQRYDEAVANIPEYGHHSQLHKVGAGEYKYLPPFYKERDKTGRMVFNDDMDIPRNPVVLRALNQARKVVNALIKKYGSPHEVHIEMARDLSRPLDERRDIEKLQKEFRDNNEKIKAQFAQDFNIVGAVKGKEFEKYQLYREQQGKCAYSMQPIDIIRLFETGYVEIDHALPYSRSFDDSKNNRVLVFASENSNKANRTPFEYLDGKFDSPQWRSFVGFVEGNKAYRLAKRSRLLRQDFGEKESKEFRERNLNDTRYICKFFKNYVEQYLQLHEDSEAKRCVVLSGQMTSFLRLKWGFVKIRGNSDRHHALDAAVVAACSHGMVKRLSDYSRRKELEQVREGFVDADGVILDLAMFDQIEKHFPNPWAHFRNELEARLKLDDPAMLREEMQRLGTYSEEALQSVHPLFVSRAPQRRNSGAAHKDTIYAQPERFVAQGGVTQKVPLSSLTLKDLDKLIDPHRNEKLYAAIRSRLEEHGGKGDKAFSASNPLHKPDSEGNPTGPIVRGVTMVIDKLSGIPIRGGIAKNDSMIRVDVFTKANKFHLVPVYVHHAVAKVLPDRAVVAFKDETEWTLIDDSFEFCFSMYPNDLIHTKLKNESYWGYFSGCDRATGAIGLWAQDRNKLIGKDGLNRVGVKMALSMEKFNVDVLGNRYPAPPEKRRDLA

SEQ ID NO: 2949 - protein, 1124 aa, unidentified
  REGION 1..1124: note = Description of Unknown: Cas Enzyme sequence
MTSKHKDLGALTFGLDIGIASVGWAVLGEKRIVDLGVRCFDKAETAKEGESLNLARRTARLLRRRLRRRAWRLTKLARLLKREGVIADANIFTKPFNLKDANGKGLSFWQLRVDALDRQLTSEEWARVIYHLSKHRGFHWISRAEAKDEEDGKSESGRVKKGLAGTKKLMAEKKYRTAAEMVLAEFPDAQRNKQGDYSKALSRVLLNDELTELFKRQRELGNQHTSAKFQAQILGNGDKKSGLFWAQNPALAGNDLLKMLGHCTFEKNEYRAPKASFTAERHVWLTRLNNLRIVVDGTTRALTEVERSVALPMPYQQAGDLTYKQLRAALSKAGYLPDSFKFTGMSYPSELKPDDKKKDPETAILVKIPAWQELRKTLEKKGLGDEWQKLSSAALEGNPKTLDDIAWVLSVYKDDAEVETELGKLPLPNAAKMIDALLDIRFDKFSNLSLKALRQIVPFMEQGQRYDEAVANIPEYGHHSQLHQVGAGEHKYLPPFYSGRDKDGRMVFNDDMDIPRNPVVLRALNQARKVVNALIKQYGSPHEVHIEMARDLSRPLDERREVEKLQKEFRDTNEKHKAEFAKDFNIVGAVKGKEFEKYQLYREQQGKCAYSIEAIDLHRLFETGYVEIDHALPYSRSFDDSKNNRVLVLAKENRDKGNRTPYEYLGGKDNSERWRQFVGYVEGNKAYRLAKRSRLLRKDFGEKEAKEFRDRNLNDTRYICKFFKNYVEQYLQLHEDSEAKRCVVLSGQMTSFLRARWGLVKVRGDSDRHHALDATVVAACSHGMVKRLSDYSRRKELEQVREGFVDIDTGEILNPAMFEQIEKHFPNPWPHFRNELEARLKLDDPALLREEIQRLGTYSEEALQTVRPLFVSRAPQRRNSGAAHKDTIYAQPEQLKAQGGVTQKVALASLTLKDIDKLIDPHRNEKLYAAIRTRLEQHGGKGDKAFPASNPLHKPDSAGNPTGPIVRGVTMVIDKLSGIPIRGGIAKNDSMVRVDVFTKAGKFHLVPVYVHHGVLGLPNQAIVGGKDESEWTKIDDSFDWHFSIYPNDLIQVSLKGESRFGYYAGCDRSTAAIHLWAHDRSQQIGKDGLIRSIGVKTALSLEKFNVDVLGNIYPAPPEIRRDLA

SEQ ID NO: 2950 - protein, 1138 aa, unidentified
  REGION 1..1138: note = Description of Unknown: Cas Enzyme sequence
  MOD_RES 556: note = Any amino acid
  MOD_RES 681: note = Any amino acid
MTSKNKNLGPLTFGLDIGIASVGWAVLGESRIIDLGVRCFDKAETADKGESLNLARRAARLLRRRLRRRAWRLTKLARLLKREGVISDIDLFKQSPTQGTPAALPWQLRAEALNHKLEAEEWARVLYHLVKHRGFHWMSRAEEKKADDDKEGGAVKKGLAGTKRLMQEKNYRTAAEMVLAEFPDAQRNKRGDYSKALSRALLAEELTELFARQRQFGNPHASEPLEAAMLGNGDKKSGLFWAQKPALSGEALLKMLGKCTFEKNEYRAPKASFTAERHVWLTRLNNLRIVVDGKTRPLTDAERRFALSLPYLQAGDFSYKQLGNALAKEGFLQKDHFKFAGLSYPSDKQKEEDKAKNPEDEKLVKLPGWQELRKTLHAAGLETEWQKISVAALDGQPQLLDEIARVLSVYKEDEEVERELGRLDLPNKTRMLEALLTTRFDKFSNLSLKALYNILSHMEAGLRYDEACAQAGYHHSQLHEADSGEHKYLPPFYAGRDKDGRLKFNEDLDIPRNPVVLRAINQARKVVNALIKVYGSPHEVHIEMARDLSKPFDERXDIKKAQEEFRDRNEKDRAAFNAEYNTTGELKGREFEKWQLYREQHGKCAYSLEPLDINRLFEMGYAEIDHALPYSRSFDDSKNNRVLVLAAENRNKGNMTPFEYLGGKDNSERWRQFVAFVESNXIYRQAKRNRLLKKDFGEDEAQSFRDRNLNDTRYICRFFKNYVERHLKLADDSAAKRCVVVSGQLTAFLRARWGLVKVRSDSDRHHALDAAVVAACSHGMVKRLSDYSRRKELEKVREGFIDMETGEIVNPVMLDRLEQHFPAPWLHFRDELLARLSVDDSATLRTEIEQLGSYPPEALEALHSLFVSRAPQRRNSGAAHKETIYAQPESLKTQGGVTQKVAVADLKPSDIDKLIDPHRNEKLYAALRAWVEKREEREKHAREIEKSAKEAKRDLTADEKTNIERLRAMPRKPDKDGNPTGPIVRTVTMMIDKMSGIPIRGGVAKNDTMLRVDVFTKAGKFHLVPVYVHHRVTGLPNRAVVSKKSEDQWTVMDDSYSFRFSLYPNDLFRLNLDGENIVGYFGGINTNDGGLKFFPHDNRSVDSLKKKGISNAKSFEKFNVDVLGNIYPAPPEQRRDLA

SEQ ID NO: 2951 - protein, 1140 aa, unidentified
  REGION 1..1140: note = Description of Unknown: Cas Enzyme sequence
MTSKNKNLGPLTFGLDIGIASVGWAVLGSNRIIDLGVRCFDKAETADKGESLNLARREARLLRRRLRRRAWRLTKLARLLKREGVISNINLLKQSPNKGTPAALPWQLRVTALDHKLETEEWARVLYHLCKHRGFHWMSKAEEKKADEDKEGGAVKKGLAGTKKLMLEKNYRTAAEMVLAEYPEAQRNKRGDYSKALSRTLLAEELKKLFEQQRKFGNPHAGENLEAAILGNGNKKSGLFWAQKPALSGQDLLNMLGKCTFEKNEYRAPKASFTAERHVWLTRLNNLRIVVDGKIRPLTDIERRIALPLPYNQASDFSYKQLRKALVKAGLSDEFRFVGLSYPSERQKSEEKAKDPEDEKLVKLPGWQELRKTLQAAGLETEWQKISVAALDDQPQLLDDIAKVLSVYKEDEEVERELGKLDLPNKAKMVEALLTVRFDKFSNLSLKALYNILPHMDAGLRYDEACMQAGYHHSQLHEVGAGEHKYLPPFYAGRDKNGRLKFNEDLDIPRNPVVLRALNQARKVVNALIKVYGSPHEVHIEMARDLSKPFDERRDIKKAQEEFRDRNEKDRATFNTEYNTTGELKGRDFEKWQLYREQHGKCAYSLEPLDINRLFEMGYVEIDHALPYSRSFDDSKNNRVLVLARENRNKGNMTPFEYLVGKENSDRWRQFVAFVESNKIYRQAKRNRLLKKDFGEDEAKSFRDRNLNDTRYICRFFKNYVERYLKLSGDSEAKRCVVVSGQLTAFLRTRWGLVKVRSDSDRHHALDAAVVAACSHGMVKRLSDYSRRKELEQVREGFIDMGTGEIVNPAMLDQLEQHFPAPWSHFRDELLARLSVDNPATLRAEIEQLGSYPPEALESLHALFVSRAPQRRNSGAAHKETIYAQPERLKTQSGVTQKVAVADLKASDVDKLIDPHRNEKLYAALRTWAEKREEREKRAREIEKSAKEAKRELSGDEKADIERLRALPRKPDKNGNPTGPIVRTVTMVINKLSGIHIRGGVAKNDTMLRVDVFTKAGKFHLVPVYVHHRVTGLPNRAIVAFKDEEEWTLIDDSFLFCFSLYPNDLVRVTLKKEGHLGYYTSCNRSTGAINIWAHDRNQKIGKAGMIESIGVKTALNVERFNVDVLGNIYPAPLEYRRDLA

SEQ ID NO: 2952 - protein, 1517 aa, unidentified
  REGION 1..1517: note = Description of Unknown: Cas Enzyme sequence
MTGKQNNLGPLTFGLDIGIASVGWAVLGKDKIVDMGVRAFDAAEDKDGKPNNQIRRGARVSRNRYDMRSWRLKKLTRLFRDVGMLTKPEIKHLFSARHEKNVKHVSPWQLRAEGLSRLLTKQEWAQVIFHIVKHRGFKFFSKSEDPTKSVNEDEDTTDSAAKAERDGLRDGLTHTSKLLEKYPQFQTLGQAAHQLANAQQDKNGIYRDSKGNELNAKDCEEFQNAYRNKGKSYRHAFRRDDLIAELNALFDAQHKYDNPYTELALPDGIEHLTEIAVSSENRHVESTFRAQVFALLELQHPPISIEQMDAMIGDCELESESRNGRGKAERRAAKHTFSNERATWLQTLNNLRIKRDGKETTLTEQERNILLNLPYTQAKLTFKQAREILREQTGFPAHWREASFTKLSYRNKRKDDGSWINIVSTDGTRTTLGKYIKNEKERKDINKKLKLRLETGTMTFAELRQLYKLTEGETFECQRKNEEIIPFALEDQYPIPFDKLDNKKAFIKMMPAKSKGAKKLTPKAVKALESLRAKQDATLADLRIAIEQIEEMERGWQFEQSQKDIQPIQLESEDKTEVPIEYEDAQKAEEETLIELKGWHTLKRALESNQPEWWESLQAAWHKPQSDAGKSAAYQLDGIAEVLTKAQTDADVKKGLAPLQLDGAKLEALEGTRFKQYRNLSLKALRNILPFLEQGKSYKEACDQAEYQPVTPPPRTRHLPPLETYLYERVRHGRASGFGKTGYKEQRYKDLTNPVVARAFNQARRVLNALIDRYDQSPAYVHVELARDIAKPLKGKWSNGKYIEGRLDVQKKQEENRNKRASARNIFIERYNINDPDDWQLLKERLYREQQCHCPYTLKKLDLDQVVSDGNYAQIDHIWPRSRTFDNSMENLVLVHADANQDKGNDIPYDFIRRKYGDEHWRHVTAHILGCKEMSDNKQKRLLATELDADEFLARNLVDTRYATRLFARMVRERLLFDGQIEDRLEDIDPSESGKSRLEKFHKTRVRTPQGGVVDFLRRRWLGNIKDRDAGDKHHAMDACIIAACTPDLIHRVNSWFSNQEKVPSRFRKMDDGKYADKGTGEIISKDEARERGLYLPPPWDGFRNEFLEKYESVFVSRAISKKRNVELHDANPMGMRYYAVRLLDLTLDMLDENRLPPELPGKRASLIRAVKHQLLSCDGNAEAAFSNGFRTMNSKGKDEIIHTLPLPLISLPEDYLKKARKQETESKAAENFDKTAKKNFDLTELTLSKLEEKSVGSAFFNRNKHMIDALRAQLEEFKDDAKKAFAEPFYPFGKDHPPIKSIRLPITCSSGIFMRGGVAGLGNILYTEMHKHEGTYWFRARYKAPEEATFGLPVMPKGAQQVCNFRKNDFVRIKHPNLSHCYREVGRHKDSLGNTLIHVEAIFKDGVFEGYWDQYQPTPPNERPVVKLHDASPFFLLEDGKTLNKESLTLIAKPKVKKSKTKSKEEELEYFEFSATPQESPLKFSLVRDIKRKINDAAFIEKIKVGILGFNKEEQS

SEQ ID NO: 2953 - protein, 1159 aa, unidentified
  REGION 1..1159: note = Description of Unknown: Cas Enzyme sequence
MTGKNKNIGPLTFGLDIGIASVGWAVLNETRIVDLGVRCFDKAETADKGESLNLARRAARLLRRRLRRRAWRLTKLARLLKREGLIADVGNLKNQPAKGFKTPNVWQFRVEALDRKLEAEEWARVIYHLVKHRGFHWMSKAEEKKADDDKEGGAVKKGLAGTKRLMQEKHYRTAAEMVIREFPDAHRNKRGDYSKALSRALLADELATLFQRQRTLGNPHANPALEARLLNKRTGLLWAQKPALSGEDLLKMLGKCTFEKSEYRAPKASFTAERHVWLTRLNNLRIVVDGKIRPLTDAERRFALPLPYLQASDFSYKQLGNALAKEGFLSRDSFRFAGLSYPSAKQSEEEKAKNPEDEKLVKLTGWHDLRKAFKEAGLETEWQKISVAALDGQPQLLDNIARVLSVYKEDEEVERELNKLDLPNKAAVVQALLTVRFDKFSNLSLKALYNILPHMEAGMRYDEACVQAGYHHSQLHDAGSGEHKYLPPFYCGREKDGRLKFVDDLDIPRNPVVLRALNQARKVVNALIKVYGSPFEVHIEMARDLSKPFDERRDIKKAQEEFRDRNEKDRAAFNAEYNASGELKGRDFEKWQLYREQHGKCVYSLEPLDINRLFEMGYVEIDHALPYSRSFDDSKNNRVLVLAAENRNKGNMTPFEYLDGKNNNERWRQFVAFVESNKTYRQAKRNRLLKRDFGEDEAKDFRDRNLNDTRYICRFFKNYVERYLKLAEDSTAKRCVVVSGQLTSFLRARWGLVKVRSDSDRHHALDAAVVAACSHGMVKRLSDYSRRKELEKVREGFVDMETGEIVNPAMLEQLQQHFPAPWEHFRQELLARLNEDTPTALRGEMENLGYPEKALENLHPLFVSRAPQRRNSGAAHEETIYAQPERLKAQGGVTQKVAVTDLKPSDIDKLIDPHRNEKLYAALREWVGTREEREKRAKEIEKSAKETKRELTPEEKADIEHLRALPTKPLPDFKNPGAREKWEKEYKGPRDSDGKPIPPAIRTVTMVIDKLSGIPIRGGVAKNDTMLRVDVFTKAGKFHLVPVYVHHRVTGLPNRAIVAFKDEDEWTLIDDSFEFRFSIHPNDLIRITLKRESYIGYYASCNRSTGAVNIWAHDRNQNVGKAGMVESIGVKTAFNVEKFNVDVLGNIYPSPPEARRDLA

SEQ ID NO: 2954 - protein, 1142 aa, unidentified
  REGION 1..1142: note = Description of Unknown: Cas Enzyme sequence
MASKKKNFGPLTFGLDIGIASVGWAVLGENRIVNLGVRCFDKAETAKEGESLNLARRTARLMRRRLRRRAWRLTKLARLFKREGLIADVAALKQQPAKGFETPNLWKLRVEALDRRLDTEEWARVIYHLCKHRGFHWISRAEAKAADSDSEGGKVKKGLAGTKRLMREKNYRTAAEMVVNEFPDAQRNKQGDYSKALSRELLADEMKMLFQRQRELGNPYAGEQLEATLLGNGDKKSGLFWAQKPALSGSDLLKMLGRCTFEKAEYRAPKASFTAERHVWLTRLNNLRVVVDGKLGPLAEAERQFALPLPYNQVSDFSYKQLRKALVKAGLPDGFRFAGLSYPSERQLKEEKAKDPEDEKLIKLPAWQELRKTLKDAGLENEWQQLSVAALNGMPQLLDKIAEALTVYKEDTEVEAELRKLDLPNKDKMVDALLDIRFDKFSNLSLRALYAILPHMEAGLRYDEACEKAGYHHSQLHKVGEGEHTYLPPFYSGRDKDGRLKFNEDMDIPRNPVVLRALNQARKAVNALIKTYGSPHEVHIEMARDLSRNFDERRDIKKEQDEYRKRNEDAKTAFASEFKIVGSVKGKDFEKYQLYREQQGKCAYSIEPLDINRIFEQGYVEIDHALPWSRSFDDSKNNRVLVLARENRNKGNMTPYEFLDGKNDSERWRQFEIFVNSNKTYRQAKRNRLLKKDFGEKESKDFMERNLNDTRYICRFFKNYVERYLRLHEESDAKRCVVLSGQMTSFLRTRWGLIKVRGDSDRHHALDAAVVAAASHGMVKRLSDYSRRKELEKVREGFVDVGTGEIVNPAMFEKLEQHFPSPWQHFRDELIARLSIDDPALLHGEMERLGTYPPEELEALHPLFISRAPQRRNSGAAHKETVYAQTERLKASGSVTQKISVTDLKPADIDKLIDPHRNEKLYAALSVWVQHHDEREKRAKEIEKAARSDKRELTPEEKSEIERLRTLPRKPDKNGNPTGPIVRTVTMVIDKLSGIPIRGGIAKNDTMLRVDVFKSKKDGKFHLVPVYVHHSVKGLPNRAIVAFKDEGDWTVMDERHHFLYSLHPNDLVRIKLKKEIHLGYYASCNRSTGAINLWAHDRNQKVGKDGLIESIGVKTALNVEKFNVDVLGNIYPAPPETRRDLA

SEQ ID NO: 2955 - protein, 1141 aa, unidentified
  REGION 1..1141: note = Description of Unknown: Cas Enzyme sequence
MTSKQKNYGPLTFGLDIGIASVGWAVLGESRIVDLGVRCFDKAETAKEGESLNLARRTARLLRRRLRRRAWRLTKVARLLKCEGLIPDVNLLKQQPAKGELAARPWQLRVEGLDRNLTAEEWARVVYHLCKHRGFHWVSRAEEKAADSDSEGGKVKKGLAGTKKLMLEKNYRSAAEMVLAEFPEAQRNKQGDYSKALSRVLLGDELKALFQRQREFGNPYASAELEAAILGNGDRKSGLFWAQKPPLSGADLLKMLGKCTFEKSEYRAPKASFTAERHVWLTRLNNLRIVVDGVIRGLNEGERSVALPLPYRQASDLTYKQLANALIKEGLLPKDGFKFAGLSYPSDRQKEEGKAKNPEDERLVKLPAWHELRKTLESADLKEEWQKLSTDALEGRPQLLDEIARVLSVYKDDVAVETELSKLLLSDAMIKALSFVSFDKFSNLSLKALYRIVPLMEQGQRYDEAVASLPEYGHHSQLHKAGSGEAKYLPPFYSGRDKDGRMVFDEDMDVPRNPVVLRALNQARKVVNALIRTYGSPHEVHIEMARDLSRPFDERRDVEKLQKEFRERNEKDKALFAQTFSIVGAVKGKEFEKYQLYREQQGKCAYSIEAIDLHRLLEPGYVEIDHALPYSRSFDDSKNNRVLVLARENRNKGNLTPYEYLDGSENSERWRQFVGFVEGNKAYRLAKRGRLLRKDFGEKDSAEFRDRNLNDTRYICKFFKNYVERYLKLAEGSEAKRCVVLSGQLTSFLRARWGLVKVRSDSDRHHALDAAVVAACSHGMVKRLSDYSRRKELDQVREGFVDMETGEIVNPAMFDRLEQHFPAPWPYFRDELLARLSCDDAAKLRAEMERLGTYPADALETLRQLFVSRAPQRRNSGAAHKDTIYAQPERLKEQGGVTQKVALSSLTLKDLDKLIDPHRNEKLYAAIRTRLELHGGKGDKAFPASNPLRKPDRDGNPTGPIVRTVTAVIDKLSGIPVRGGIAKNDSMLRVDVFTKAGKFHLVPVYVHHAVAKMLPNRAIVAFKDEEEWTLIDDSFQFCFSLHPNDFLKVTQRSGETISGYYRGCHSGTAAINIALHDRYALGEKTTSLALHTKDPAKPLPNDKLGLIEGIGVKLAAKLEKFNVDVLGNLHPAPPEKRRDLA

SEQ ID NO: 2956 - protein, 1112 aa, unidentified
  REGION 1..1112: note = Description of Unknown: Cas Enzyme sequence
MIGKQKQTSLGPLTIGLDIGIASVGWAVLSQNHIIDLGVRCFDKAETAKEGEPLNLARRTARLMRRRLRRRAWRLTKVARLLKRMGLIADVKTLQRPATQSPWTLRVEGLDRKLTLDEWARVLYHLCKHRGFHWISRAEEKKAESDSGEGGRVKKGLANTKRRMAEKNYRTAAEMVLAEFPEAQRNKQGEYDKALSRLLLGDELAELFNRQRELGNSYASPEFEARIAGNGDHKSGLFWEQKPPLAGSDLLKMLGHCTFEKSEYRAPKASYTAERHVWLTRLNNLRIIIEGNARPLNETERRVALPLPYSQASDLTYKQLKSALVKAGVTPENVKFAGLAYPTQQAEGKAKDPESERLVKLPAWQELRKTLKDKGLETEWQGIASQPELFDQIAWVLSVFKDGNEVEQELRKLPLPGGGKTVQALSEISFDKFHNLSLVALRKIVPYMESGLRYDEACKEAGYHHSQLFKAGEGQQKYLPPFYSGRDKDGRMVFDDKEDIPRNPVVLRSLNQARKVLNALVRRYGSPAAVHIEMARDLSRPMDERNKVKKAQDEYRDRNEKAKVDFADEFHMPAKSREFEKYLLYREQQGKCAYSLEPLDIDRVLHDPGYAEVDHALPYSRSYDDGKNNKVLVLAKENRDKGNRTPYEYLISFAGGENGERWRRFVAWVEGNKSYRLAKRSRLLRKNFGKEESRDFMERNLNDTRYICKFFKQYVERHLQLAEGGGKRCVVLSGQLTAFLRARWGLAKVRSDSDRHHALDAAVIAACSHSLVKRLSDYSRRKELEQARHVVDMETGEVIDPVLLAKLEQHFPKPWEHFREELLLRLNQDDPRLLQEEARRYGYSPEELEAVHPLFVSRAPQRRNGGAAHKDTIYAQPERLKAEGGVTQKVPLSSLTLKDLDKLIDPHRNEKLYAAIRSRLEAHGGKADKAFPANNPLRKPDREGNPTGPIVRTVTMVIDKLSGIPVRGGIAKNDTMLRVDVFRHKKDGKYHLVPVYVHHAIAKALPNRAIVAFKDEDEWTQIDDENFDFCFSLYPNDFLRVSLKNEVLQGYYAGCDRSTGNIGLWVHDRNIAIGKEGFIRTGVKTAMSLEKFHVDTLGSIYPAPPEKRRDLA

SEQ ID NO: 2957 - protein, 1186 aa, unidentified
  REGION 1..1186: note = Description of Unknown: Cas Enzyme sequence
MTGKQNNLGPLTFGLDIGIASVGWAVLGESRIVDLGVRCFDKAETAKEGESLNLARRTARLLRRRLRRRAWRLTKLARLLKREGLIADANFFKKQIPFTQSLWQLRVEALDRRLTGEEWARVIYHLCKHRGFHWISRAEAKAADSDNEGGRVKRGLAGTKRLMQEKSYRTAAEMVIHEFPDAQRNKSGDYSKALSRELLEEEAKKLFQHQRELGNPHASAELETAILGNGDKKSGLFWAQKPALAGKDLLKMLGHCTFEKEEYRAPKASFTAERHVWLTRLNNLRIVVDGKMRPLNEQERHIALPLPYIQASDLTYKQLRSALVKAGLSDSFRFVGLSYPSKRQEDTEKAKDPETEKLIKLPAWQTLRKTLKDAGLEMEWQQISVAALDGKPELLDQIAWVLSVYKDDAEVEAELRKLDLPNKAKMVDALLDVRFDKFSNLSLKALRQIVPFMELGQRYDEAVANIPEYGHHSQLHIVGAGEHKYLPPFYSGRDKDGRMVFNEDMDIPRNPVVLRALNQARKVVNALIKEYGSPHEVHIEMARDLSRPLDERREIKKLQNEYRDNNEKHKAEFASTFNIIGAVKGKEFEKYQLYREQQGKCAYSQQPLAPNGDIQRIFDAGATEIDHALPYSRSFDDSKNNRVLVLTRENRNKGNMTPYEYLDGKNNSERWRLFVAFVESNKSYREAKRNRLLKKDFGEDESKDFMERNLNDTRYICRFFKNYVEQYLQLHEDSEAKRCVVLSGQMTSFLRARWGLVKVRGDSDRHHALDATVVAACSHGMVKRLSDYSRRKELEQVREGFVDMDTGEILNPAMFEQIEKHFPNPWPHFRNEVEARLKLDDPVLLREELQRLGTYTEEALQAARPLFVSRAPQRRNSGAAHMDTIYTKPRAGHVLMVEEKKAKKVVRENAEKVLRPATPEEKTSMVIARIGVTDKDSKGNYKLTLEKLEDIVDPRRNERMIEALRHWITSRNEREKAAKAIEANLGRGKEKREPTEAENSELERLRALPRKPLQSDSDNGPFTGPIIRAVKVNAGKMSGIPIRQGLAAQESLIRVDVFNKEGKFYLVPLYIADAIRKPLPNHTADGETKVEDTYFRFSLHPNDLVKVTLKGKGEILGYFRGYGGPPNPYNITVSIHDRNKNGHERANEKGEIPSIGIKTALSIEKFNVDVLGNRYPAPPEKRRDLA

SEQ ID NO: 2958 - protein, 1135 aa, unidentified
  REGION 1..1135: note = Description of Unknown: Cas Enzyme sequence
MNSKQGVKYTIGLDIGIASVGWALLGENRIIDLGVRCFDKAETADKGESLNLARRSARLLRRRLRRRSWRLTKLTRLLKREGLISNTNLLKHPPTKGFSIPNLWKLRVEALNRKLSAEEWARVIYHLCKHRGFHWLSKAEEKKADDDKEAGAVKKGLAATKRLMQEKGYRTAAEMVINEFPDAQRNKRGDYGKALSRELLSHELQLLFNRQRELGNPYTSTDFENKLLERKNGLLWAQKPSLSGEALLKMLGKCTFEKNEYRAPKASFSVERHVWLTRLNNCRLIIDGEKRELSPAERAIAIRLPYDQSSDLTYKQLRKALTKAGLTNEFRFAGLVYPSALQSEQEKAKDPEEEKLIKLPAWQQLRKAMKDADLETDWQKIAIDALEGKTHLYDEIARVLSIYKEDEEVERELSKLNLPNKSKMVEMLQTIRFEQFSNLSLKALYKLLPYMEQGKRYDEACLASGYHHSQLHKMGTGDHKYLPAFYIGRDKDGRLKFNEDLDIPRNPVVLRALNQARKVINAIIKKYGSPDQVHIEMARDLSKSFDDRRDIKKAQDEYRDRNEKDRSTFNLEFNTSGELKGREFEKWQLYREQHGKCAYSLQPLDIHRLFEMGYAEVDHALPYSRSYDDSKNNRVLVLAAENRNKGNMTPYEYLGGAQNSLRWLEYVAFVNSNKTYRQAKRNRLLRKDFGEEAAKEFSERNLNDTRYICRFFKNYVERYLKLADDSDSKRCVVVNGQLTSFLRAHWGLIKVRSDSDRHHALDAAIVAACSHSMVKRLADYSRRKELEAAREGFVDMATGEVASQSMYSQLEQHFPSPWPHFRQELQTRLLADDLPAMRNELANMGYDEESLESVKTLFVSRAPQRRNSGAAHKETIYGQSDALAKTGSVTQKIAVTDLKLSDLDKLIDPHRNQKLYAEIETWLKGKDAREKRAKEIEANLGRGKDKREMTSDEKAEIERLRALPRKPTNDGSLGPIVRTVTAVIDKLSGIPIRGGVAKNDSMLRVDVFSKAGKFYLVPVYVHHRVTGGPNKAIVAFKDESEWTLIDESYIFEFSIHPNDFVKVTLKKDVFSGYFSSCDRSTGAISLWAHDRNSVIGKDGLIRGIGVKTALSIEKYNVDVLGNTYPAPKETRLDLA

SEQ ID NO: 2959 - protein, 1512 aa, unidentified
  REGION 1..1512: note = Description of Unknown: Cas Enzyme sequence
MTGKQKNLGALTFGFDIGIASVGWAVLGEHRIVDLGVRCFDAAEDPEDGTPYNQKRRGGRVARNRLHTRAWRLKRLRRLLRDAGLISSADFQNLNQKPRQKGADDTSPWTLRSKALTEKLNPDDWARVIYHLVKHRGFGILSQSELEIDPDAPVNNDETAGLMDGLRRNSALLRKHKTSLKTLGNIAVRLPKLEPDSEDGQSFRLSIRNKGKSYRHAFLRADLRDELETLFIEQERLGNLFIIVAIPEDKAPFKLVHVGGEKKEVPLTFKDQVFALFDMQKPPISTEQMKGLIGDCEFEKGEKRAPRNSFSNERSTWLQKLNSIKVRRDGKETFLTLEERLAVINLPYKNEKITYSDIRDALCQARGFSRVWREASFNMLSYRPKIKADAGWINIMQEGNKQIALNKYNNFSDKNQAKEAKKKLKDTLLNSTITYAELRTLFNVPAHCVFQHAHKEHELIQKELEATHAIPFSAGNSEYILRDGITYKINLQRSNESNKLSKKSFALLAELKTTKPDATLADLRVIVGHAESINEPWLFEFNQTARVGISPSIEAETRVPIEYENMQSIEDSTCIELKGWHKLRKALAQQCPVFWQSLTVAYQKPTSKEGQDTASKLDEVARTLAIYQTDFERRRELDLMGIKEEIVTELLKINLTGFRNLSIKALRKILPFLEEGDVFSKACEQAGYNHSQRPAQQRKTTLDPFETYQFERWRSRNDGGKALMSKQETRYKDLNNPTVARALNQARRVLNDLVEKYGSPAYINVELARDLSRSKRLRDKIKNEQDSRRDDRIKADAIIRETFRDKYGINDPTSTQILKVRLYEEQNQKCAYSYPERGLDIRLILSDEDCVQIDHIWPKSSTFDNSLNNRVLVLAGANQNKGDNIPYDYFGKQNSAHWQHFQAWVNSCKSMPKEKQDRLLAKELDADEFAARNLVDTRYVTKLLARILRERLIFAGGATEDFNEIGNDEAGKEKLEKFYRSRVRTPQGGAIAFLRRCWGLQKNREESDLHHALDACVIAATSPSLIKQVNDFNRREEQFPYRYKKNDDGKFTDTKTGEVLTKDEALEAGVFFPKPTGHPHFREEVLARLSSDGRTYQTKKGERKIYDFANYSQDEISQVKPLLVSRLVKKKRNVELHDANPMGLRYYPVRLIDLTPEMLDEALLLPFLPEKKKNLIAEIRTQLGANNGNATIAFAGGFLTKNAKDKAVVIHTVALPVASLPKTYLGKQNENFKDTTTKNVFLSNLSLKMLSEKELGATFYNRNKRLIEALKAKLTKFDDDAEKAFSKPFYPFGTDNNRPFIRSIRIPAPRSSGIYVRGGVANLGDALYTEVYKHEGIYWFRARYRISEEKTFGLPVMPNGAEFICNFTKNEYVRIKHSNLLHCYRELSRYTDSFGNILISAKAIFDDGVFEGYWNYFEPSNDRPVVQLHDGRKFFLLEDGKTIDKKTLTLIAKPKEKKKAKGQEELEYFEYSESPQEKSLKFSLVSDIKRKVNDATFIEKVKVDTLGYIQEK

SEQ ID NO: 2960 - protein, 1135 aa, unidentified
  REGION 1..1135: note = Description of Unknown: Cas Enzyme sequence
MNSKQGLKYSIGLDIGIASVGWALLGEERIIDLGVRCFDKAETADKGESLNLARRSARLLRRRLRRRAWRLTKLARLLKREGLIADVQVLKQPPAKGFVTPNSWQLRVEALDRTLSAEEWARVIYHLCKHRGFHWLSKAEEKKADDDKEGGAVKKGLAGTKKLMQEKGYRSAAEMVINEFPDAQRNKRGDYSKALSRELLSNELQLLFQRQRTLGNPHTSTELENKLLARKYGLLWAQKPSLSGEALLKMLGKCTFEKSEYRAPKASFTVERHVWLTRLNNCRLIIDGEKRALSSAERELAINLPYEQSSDFSYKQLRKALLKAGLTNEFRFAGLVYPSALQSEQEKSKDPEEEKLVKLPAWQQLRKAMKEAELETDWQKIAVDALEGKAEIYDEIARVLSIYKEDDEVERELNKLDLPNKSRMVAALQTIRFDQFSNLSLKALYNILPHMEQGQRYDEACLAAGYHHSQQHVVGAGEYRYLPPFYSGRDEDGRLKFNEELDIPRNPVVLRALNQARKVVNALIKKYGSPDQLHIEMARDLSKSFDDRRDIKKAQDEYRERNDKDRTTFNAEFNPSGELKGREFEKWQLYREQHGKCAYSLEALDIHRLFEMGYAEVDHALPYSRSYDDSKSNRVLVLAAENRNKGNMTPYEYLGGAQNSLRWIEYVAFVNSNKTYRQAKRNRLLRKDFGEEASKEFSERNLNDTRYICSFFKNYVERYLKLADESDSKRCVVVNGQLTSFLRARWGLIKVRSDSDRHHALDAAIVAACSHSMVKRLADYSRRKELEAAREGFVDITTGEVANHAMYSQLEQHFPTPWPHFRQELQARLFADNLPALRNELANMGYDTEARQSVKTLFVSRAPQRLNSGAAHKETIYGQSEKLAKTGSVTQKLAVTDLKLTDLDKLVEPHRNQKLYAEITEWLTGKDEREKRAKEIETSLGRGKDKRETTAEEKAEIERLRALPRKPTNDGTPGPIVRTVTAVIDKLSGIPIRGGVAKNDSMLRVDVFSKAGKFHLVPVYVHHRVTGLPSLAIVANKEESDWTQIDETFVFCFSLYPNDFVKIKLKTELREGYYAGCDRATASVSLWIHDRNALIGKDGLVRSIGVKTALSVEKYNVDVLGNIYPAPKETRSDLA

SEQ ID NO: 2961 - protein, 1566 aa, unidentified
  REGION 1..1566: note = Description of Unknown: Cas Enzyme sequence
MIYYNGFIIAENTMTSKQENLGALTFGLDIGIASVGWAVLGENRIIDLGVRCFDAAEDKDGKPNNQTRRGARVSRNRFHMRTWRLKRLTRLFRDVGLLSKEEIKQLFSATRQKNQPQLVSPWSLRAEGLTRKLTQQEWAQVIYYFVKHRGFKFFSKTEDPRSSSADNEATSVEQKERDGLRDGLEYTGKILKKYPQFETIGNAAHHLANAQQGSDGIYRDKDGKLLEATDCEEFQESFRNKSKSYRHAFHRDDLMDELNKLFEAQQQPQFSNPFANLVLREDIDRLREVQISSETRTVGPTFHDQVFALLELQHPPIYTSQMDALIGKCELEKNELRAAKNTFSNERATWLQTINNLRIKRNGKEDTLSPDERALLINLPYTQAKLTFKQARDALRASLGFPAHWREASFTKVTYRNKRKDDGSWINVVAADGSNISLGKYGQDDVRKKANKELKKRLETGTMTFAELRQLFELKEGEAFEHICNEAEIVPASLETTYTIPDGKKTFIKLLPAKSKKPITLKGRAMKALADLSSENLNATLADLRLAIEQADRLEAGWQFEYSRKDSTPIKLENEATTQVPIEYEDAQKAEEETLIELKGWHTFKRALETECSDWWANLQVAYLDPQSDAGQAAAIQLDAIAELLTKAQTDADVEKGFAALALTASQIQALERVRFKQYRNLSLIALRKILPSLEAGKSRTEACKDAGYKTETHQRSKHLPPLETYLYERVRHGKKTKYTELRYKDLTNPVVARAFNQARLILNALIDRYDQSPAYVHVELARDLAKSKEKRIEDKKRQDENRSKRESIRGNFIATYKIDEPTSTQILKERLYHEQGCKCIYTLEELDLNRVVDDPNYAQIDHIWPRSLTFDSSMENLVLVHAHANQDKGNRIPYDFINQKYGKEHWRRVMAYILGCKGIGGNKQNRLITKELDADEFSARNLVDTRYATRLFARMVRDHLLFDGQVEDKIEDIDPSESGKSRLEKFHKTRVRTPQGGLTAFLRRGWLNDIKDRESSDKHHALDACIVATCTPKVINEVNSYFANEEQVPSRFKRLADGKYADKGNGGEIISKQEARERGLYLPPPWDHFRADFFEKYEAIMVSRVVRKKRSGELHDANPLAFRKLSIPLVDLSEDMLTSLSIPKEFRIKHQEILDDLAKKLIHHGGDAKIAFDQPHEIIDRKGNIQHIRSISLPIVGLPAPYLEARLKPLTKKQKQSALLEDNRRNHQRVLLCNLTLEMLDDARLGSGYLNRNKKVIDALKACLKHFDGDSRKAFSDGFVIDGGDGKAIRSIRLPLWSDEVSVQAHKSAPLTSLSLDKLDPKKLGATYYHRNKKVIDALRERLNEFGGNAKKAFSTERRKDGEANVENKPKTRKDRPFDPSDYGKPGPIIRSIRLPESCGLGTDIRNGIAKLGASQKTEVYWTGTNYFFRNRYGLDDEQVRGISEPPSDSKILFILTKNDYVRIVLKDGGIKEGYFVFYPEDGRMQVRRHDLPKIIDYVAHETEEPSEGEEESGETIEPTNGNKKKKVVLAWRIPESQIVKISKFKVGVLGDLTLIADSMPHGLA

SEQ ID NO: 2962 - protein, 1121 aa, unidentified
  REGION 1..1121: note = Description of Unknown: Cas Enzyme sequence
MSGKHNVQKNLGSLTFGFDIGIASVGWAVLSENRIVALGVRAFDKAENEKGEPLNLARREKRTTRTRLERRALRLKKLRRLLRNAGLVSSADPTAFITPPRDKYDPPNDPWHLRAEGLNRKLTPDEWARVIYHLVKHRGFYAARKTEMIVDTEAANEKAKEKQGTLNGIARTEKLLGSPEAPRYQTLGEMAAKDEAFSQAKRNKAGSYGNSFARKLLRDELRLLFEKQQGLGNSHTSEALYAEVDDLFWYQKPALSGEAMLKLLARCTFEKIGGPDGKGEYRAAKHTWSAERFVWLTKLNNLRIVQNGQLRPLSEAEWQEAINLPYALSKLTYKQLRDRLHKQLDFPKDWREASFAGLSYRVIQKKNKKGEITEKKPEEAESATTLMELNGWHELRKAFERTKLENSWQRISQDHALLDEICSALSLLKTDDELRGRLAELSLNQQETEALLTVNFSNFIRLSLKALHNILPHMEQRLRYDEACTQAGYNHSQTAVGEKSRTLPPLDKAGIRNPVVFRSLNQARKVLNALVHEYNRSPVAVHIELSRDLSKSLDERKEIKKGQETFREEKEQAVKLFKDTFNGREPNARNQDLQKFRLYREQDSQCPYCQQPLEIERLLETPPYAEIDHVLPYSRSFDDSQNNKVLVHIRCNRDKGNRTPFEYLDDASSSENWRQFEAWVRGHKSIRKAKRDRLLRQYFDEREAREFAERNLNDTRYATKFFAKFVKENLKFSKDAGEQTVLTPSGAFISFLRVRWGLVKNREQSDLHHALDACVIAAASHALIKHVSDFHRRNELFQLPDGSFADRATGEILSREATLALGDHFPKPWDNFRDEMLARLSADPKAEIEPKFFTQYSTEDIVTLKPVWVSRATKRRSGGALHQETIRSAKFLDKGLSSTNVKLQDLKLADLDKIVGAFRLGEDGKPLLDIEGSPIQDPRNTELISVLRKRLEAHGNDGKKAFAEPIYKPSAPGKQAPLVRTVKLLSTQKNGVLIRSGIADQGEMIYVDVYRSKKKYLIEPAYAIDGDKRINRPTLPQDAEYLFSLSKNDYVKVNLGNEKHEGYFVMYESDGRLTLRGHDQPIVDKTYFRRGIASASIIEKYQVDVLGNLYPARPEKRRDLA

SEQ ID NO: 2963 - protein, 1152 aa, unidentified
  REGION 1..1152: note = Description of Unknown: Cas Enzyme sequence
MIYNGFIITENAMTGKHNVQNNFGPLTFGLDIGIASVGWAVLGENRIVDLGVRCFDKAETAKEGESLNLARRTARLLRRRLRRRAWRLTKLARLLKREDVIADANFFKQSLEKGTSAARPWQLRADALDRKLEAEEWARVIYHLCKHRGFHWISKAEEKAAENDNEGGRVKKGLAGTKKLMEAKKYRTAAEMVLKEFPDAQRNKHGDYSKALSRVLLADELKILFEHQRKFGNPHAGTELEAALLGDGDKKTGLFWKQEPALSGEALLKMLGKCTFEKSEYRAPKASFTAERHVWLTRLNNLRIVVDGKTRPLTDEERRIALPLPYQLASDFSYKQLRKALVKAGLSDEFRFTGLSYPSERQKTEEKAKDPEDEKLVKLPGWQELRKTLKEAGLEDEWLKISTGALEGKPQLLDEIARVLTVYKEDEEVERELGKLDLPNKQKMVDALLTVRFDKFSNLSLKALYNILPHMEAGLRYDEACEKAGYHHSQLHKVGAGDHKYLPPFYSGRDKDGRMKFDEDMDIPRNPVVLRALNQARKVVNALIREYGSPHEVHIEMARDLSRPFDERREVKKAQDEYRDRNDKDKAAFASEFNIVGAVKGKEFEKFQLYREQQGKCAYSIEPIDIHRLFEAGYVEVDHALPYSRSYDDSKNNRVLVLARENRNKGNMTPYEYLDGKNNGERWRQFVGFVEGNKAYRLAKRSRLLRKDFGEKESREFRERNLNDTRYICRFFKNYVEQYLQLHEDSEAKRCVVLSGQMTSFLRARWGLVKVRADSDRHHALDAAVVAACSHSMVKRLSDYSRRKELDQVREGFVDVETGEIVNPAMFQKMQEHFPDPWPYFRDELKARLSFDDPALLRAEMERLGTYPPEALEALRPLFVSRAPQRRNSGAAHQESIRSIGKENRLIDAGTSAIKTPLTKLKFKDIENIVGWHDQRNTIWIDELRRRLEPHKSEDAKKNKCAGAKAFADSQPKLFKPSAENKVAPEIRSVKLLSTQKGGVLLRGGVADQASMLRVDVFEKKGKHYLVPIYQSNRHKNLALLNRAATAAKPRDEWTLIDESYSFKFTLNKNDAVLLKNRNREYFGYFAGLNVATAAIDIASHDNNININPGKAWQGMWPGNGLKTGILRFEKFNVDVLGNLYPAPPEKRRDLA

SEQ ID NO: 2964 - protein, 1154 aa, unidentified
  REGION 1..1154: note = Description of Unknown: Cas Enzyme sequence
MTSKQNFQENSGALTFGLDIGIASVGWAVLGEDRIVDLGVRAFDKAETAKEGDSLNLVRRTTRLMRRRLRRRAWRLTKLARLLKREGLIADANLFKRKIEKNTPALKSSWQLRVDALDRQLSAKEWARVIYHLCKHRGFHWISRAEEKAAEGDKAGESGKVKQGLAGTKKLMQDKNYRSAAEMVLAEFPDAQRNKQGDYTKALSRLLLSEELALLFKRQRELGNPYASAELETAILGGGDKKSGLFWAQKPALAGKDLLKMLGHCTFEKSEYRAPKASFTAERHVWLTRLNNLRIVVDGTTRPLNEAERRIALPLPYQQASDFTYKQLGSALVKTGHFKKDRFKFAGLSYPSDRQKTEDKAKDPEASTLTKLPGWQEIRKALADDGLEAEWQKMSVAALEGKPELLDQIAWVLSVYKDDDEVSAELHKLDLPNAGKVVDALLGIRFSKFHALSLKALRKIVPYMEQGQRYDEAVANIAEYGHHSQLHKVGEGEHLLPPFYSGRDKGGRMVFDEDMDIPRNPVVLRALNQARKVVNALIKTYGSPHSVHIEMARDLSRPFDERRDIKKEQDAYRERNDKDKAAFASDFNIVGAVKGKDFEKFQLYREQQGKCAYSIEPIDINRLFEAGYVEIDHALPYSRSFDDSKNNRVLVLARENRNKGNQTPYEYLNGADESDRWRQFVGFVEGNKAYRQAKRSRLLRKDFGGKEAEGFRERNLNDTRFICRFFKNYVEQYLQLHKDSEAKRCVVLSGQMTAFLRLKWGLVKVRGDSDRHHALDAAVVAACSHGMVKRLSDYSRRKELDQVREGFVDVETGEIINPAMFQKLQQHFPDPWMHFRDELLLRLKCDDISALRSEIEKLESYPPEALATLRPLFVSRAPQRRNSGAAHKETIYAQPESLKAQGGVTQKVVVTSLTLKDLDNLIDPHRNEKLYAALRNWLNGREAKEHHEKEIKKLAGKEKRKLTDAEKAEIKTLRDQLNVLPRKPDKNGKPTGPIVRTVTMVIDKLSGIPIRGGIAKNDTMLRVDVFTKAGKFHLVPVYVHHRVKGLPNRAIVAFKDEEQWTLIDESFPFCFSLYPNDLVRVTQKGKPQILGYYASCHRGTGGINIWAHDRSQRVGKEGMIESVGVKTALSVEKFNVDVLGNIYPAPPEKRCDLA

SEQ ID NO: 2965 - protein, 1111 aa, unidentified
  REGION 1..1111: note = Description of Unknown: Cas Enzyme sequence
MAVKATGVLTIGLDIGIASVGWAVLAPDRIVALGVRAFDKAETAKEGDSLNLVRRSARLTRRRLHRRAWRLTKLARLLKRQGVIDDTRLFQPQHPFPHSLWRLRVEGLDRQLNAEEWARVIYHLCKHRGFHWISRAEEKKAEADTKGEGGKVKQGLAATNKLMQEKGYRSAAEMVLMEFPEAQRNKQGDYGKALSRVLLGKEIADLFRRQRELGNVHADTALETAILGNGDRKSGLFWAQKPALAGEALLKMLGHCTFENAEYRAPKASYTAERHVWLTLLNNLRVVADGTTRPLTEQERRIALPLPYGQAGNLTYKQLRAALVKAGTAPDGFRFTRFSYAQQPDGKAKDPETAVLVKLPAWHELRLTLKKHGLETEWQGMAGAAIDGRPELLDQIAWVLSVFKEDEEAASELRKLPLPSAQKMVDALLDLRFDKFHALSLKALRKIVPHMEGGLRYDEACERAGYRHSQLYKTGEGEHKYLPPLYSGRDKAGRMVFSDEMDIPRNPVVLRALNQARKVVNALVHQYGAPHAVHIEMARDLSRPLDERRKIEKDQAEYRDQNEKDKARFAEHFGQMPKGVEFEKWRLYREQQCKCAYSIEPIDLGRLLEPGYVEIDHALPYSRSFDNSKNNKVLVHAAENRNKGNQTPYEYLRGAEDSPRWRMFVAFVESNKAYRLAKRSRLLRKNFGEDEAKEFRERNLNDTRYICKFFKNYVERYLQLAQDSEAKRCVVLSGQMTSFLRARWTLIKVRDDSDRHHALDAAVVAACTHGMVKRLSDYARRKELDQVREGFVDVETGEIVNPAMFQQMRQHFPDPWPNFRHELEARLKIDDPAIMRTTMEQLGSYPPEALNALQPLFVSRAPQRRNGGAAHKDTVYAQPERLRPQGGVTQKVPLASLTLKDLDNLIDPHRNEKLYATIRNRLEAHAGNGGKAFPAGNPLRKPDRDGNPTGPVVRSVTLVIDKLSGISVRGGIAKNDSMLRVDVFTKAGRFHLVPVYVHHRVKGLPNRAIVAHKDENEWTLIDDSYEWCFSLHPNDLTRVALAKETHLGYFAGCDRSTGAINLWAHDRNQKVGKDGLIRGIGIKTARTVGKFHVDVLGNIYPAHPEKRRGLA

SEQ ID NO: 2966 - protein, 1111 aa, unidentified
  REGION 1..1111: note = Description of Unknown: Cas Enzyme sequence
MAVNTPSSLTIGLDIGIASVGWAVLAPDRIVALGVRAFDKAETAKEGDSLNLIRRTARLTRRRLHRRAWRLTKLARLLKRQGVIDDARLFQPQHPFIRSLWRLRVEGLDRQLNAEEWARVIYHLCKHRGFHWISRAEEKKAEADTKGEGGKVKQGLATTNKLMQEKGYRSAAEMVLLEFPEAQRNKQGDYGKALSRVLLGRELADLFRRQRELGNVHADAALEAAILGIGDRKSGLFWAQEPALSGKALLEMLKHCTFEKTEYRAPKACYTAERHVWLTQLNNLRIVADGTTRPLTAPERQIALPLPYGQAGDFTYKQMRAALVKAGTTPDGFHFARFSYAQKPDGKARDPETAVLVKLPAWQELRLTLKKAGLETEWQGMAGAAIDGRPELLDQIAWVLSVFKEDEEAAAELRKLPLPSAGKMVDALLDIRFDKFHALSLKALRKIVPHMEGGLRYDEACERAGYHHSQLYKVGEGEHKYLPPFYSGRDKTGRMVFSEDADIPRNPVVLRALNQARKVMNALVHQYGAPHAVHIEMARDLSNPFDERKKIEKDQAEYRDQNEKDKARFAEHFGQMPKGVEFEKWRLYREQQCKCAYSIEPIDLGRLLEPGYVEIDHALPHSRSFDNSKNNKVLVHAAENRNKGNQTPYEYLRGTEDSQRWRTFVAFVESNKAYRLAKRSRLLRKNFGENEAKEFRERNLNDTRYICKFFKNYVERRLQLAEDSEAKRCVVLSGQMTSFLRARWGLVKVRDDSDRHHALDAAVVAACSHSMVKRLSDYSRRKELSQVREGFVDVETGEIVNPAMFQQLRQHFPDPWPNYRHELEARLKINDQGILRSTMEQLGSYPPDALNALQPLFVSRAPQRRNSGAAHKDTIYGQPERLKAQGGVTQKVPLASLTLKDLGNLIDRHRNQKLYAAIRARLEACGGKGDKAFPAGNPLRKPDRDGNPTGPVVRTVTLVIDKLSGIPVRGGIAKNDSMLRVDVFTKGGRFHLVPVYVHHRVKGLPNRAIVAFKDEEEWTLIDDSYVWCFSLHPNDLTRVTLAKETHLGYFAGCDRSTGAISLWAHDRSRSVGKDGLIRGIGIKTALAVDKFHVDVLGNFYPALSEKRLGLA

SEQ ID NO: 2967 - protein, 1128 aa, unidentified
  REGION 1..1128: note = Description of Unknown: Cas Enzyme sequence
MSVKPAGPLTIGLDIGIASVGWAVLAPDRIVALGVRAFDKAENEKGEPLNLARRMARTARTRLERRALRLKRLRRLLRDAGVVPSANSKIFATPPRSRDDPINDPWHLRAQALDRRLAPEEWARVLYHLVKHRGFFAARKSEMVVEANAKEEKNKEKQGLLAGVKRTAQLLGTSEQPRYRTLGELAAKDETFALAKRNKAGAYTNSFSRLLLREELGTLFNRQRELGNPKADESLHAQVDQLFWYQKPALSGDAMLKLLGRCTFEKDEYRAAKHTWSTERFVWLTRINNLRITHNGERRALTETERRVAIDLPYVQKTQPVTYKHLRKALNKTVDFPAEAGFAGLSYRRDSKKDPEDEKLGECKGWHELRKALERAQLDKSWLRFSQDHALLDAIGTALSIFKTDDELRLELAKLALADAETEALLSVSFSDFIQLSIKALRKILPHMETGKRYDEACEAAGYNHSQPTSGEIRGKLLPPLFREELRQAGNRKKVVRIPILVKNPVVSRSLNQARKVLNALIREYGSPIAVHIELGRDLSRSYEERREIKKGQDRFKDEKDSAVKLFKETFDGREPSARNQDLPKFRFYREQEGQCAYSQEPLDIARLLEIGYVEIDHALPYSRSFDDTQNNKVLVLSKENRDKGGRTPYEYLDGASDSERWRRFEAWVRGHKGLRRAKRERLLRREFDEREAREFAARNLTDTRYATRYFSNFVKQNLRFAEGAGEVPVLTPSGAFTSFLRARWGIIKSREQSDLHHALDACVVAAASHKLIKRVSDFHRRDELVQLADGKFADRVTGEILSAEVSAELGLHFPKPWEDFRDELLARLSSDPKTEITPERHPQYSADDIAGLRPIWVSRAPKRRNGGALHQETIRSAKLMNKGLSYVSVKLQDLKLSNLDDIVGAYRLDADGNRILNVEGNPVPDPRNAPLFELLRQRLQGHAGDGKKAFAEPVYKPSAQGKQAPLVRTVKLISTQKGGVRVRGGVADQASMWRTDVFEKGGKFYLVPIYQSDRRKGAELPNRAVFQGKPRELWPIVDDTYRFLFSLCLNDPVRLRQKNAEFVGYFSGLDVATGNISVWSHDRNLSLGKDGLFRGLGPKTALAFEKFHVDVLGNLYPAAPEKRHGMA

SEQ ID NO: 2968 - protein, 1498 aa, unidentified
  REGION 1..1498: note = Description of Unknown: Cas Enzyme sequence
MSGKPTDLLTFGFDIGIASVGWCVLGKKHIVDLGVRCFDPGEDNDGKPHNQTRRAARVARNRLHMRRWRLNQLLRLFCDVGIISRPEARLLMTPPRAKDEPEVGPWQLRAQGLERQLDPVEWARVLYHLVKHRGFEFFRRSELKSAQKQDSSKGEDTSRVESSEATLAEAAAAKEKEKLNKALEASSKLLEKYRKLKQNNHLTVGGLAIWLAQDNYAPDEPQPDEQDRIQSFRNKAGSYRHAFLRAALRHELKTLFTAQDKHQNPYTTLELPVDSEYLHQMLTCFKDGVIPVGGESRSVGRTFQEAIFDLFDMQHPPLYAEQIREMVGECELIEGQPRASKNSFSAERATWLETLNKLRIRRNGKEEDLSQLERNCLLNLPYEHSKVTLKLVRETLMAHTGFPASWQEASFNAATYRAKPASDGAWILIVPRGEVPISLVKWANSKERKEKLREAKKLLTGGFVTYKQLREKLGLQDSDSFICRIKDTSIIPRSLEARTQIRFSSDNNTILASGHSFRCITTEGKPKALPKVTWRLLASLRSHSAATMADWRTLLMPLKDMPGDWQFEHSILSEYTINPDSEERTPVPLQFEDAQAVEADQKLVELKGWHALRLALAERFPDKWEGMQTAYQKPTSDEGERAASEINDIATTLTECQTDREIEQKLSNLGYNSEEITALQTISFNKFRNLGFMALRKILPYLEEGHVYSKACELAGLKHSEKEAQRRTPELRPLETYVYPRYRHGKLTGHIEKRYKELLNPVVARSFNQARLVFNCLVAKYGSPTYVHVETARDLARSKKLRDKIDREQKSNNKRAEGIKEDLRNRLGCEPTPTQILKMRLYGEQNGQCMYSGTSLEPFIDSMLKDNSGDVEIDHIWPRSKTFDNSLDNRVLVKTGANRNKDSKIPYEFFGGTNCDKRWHEFEQRVLSCKGISAEKQRRLLAKNLEDADEFLARNLVDTRYATRLFANMLRERILFANAPSPEELEAISPNDDAKTRWNRYQRARVRTPQGRLVDFLRGKWGLAHVKDRKKSDLHHALDACIIAACTPQVIQRVNNYFAEEEAEPHRHIFRRNDDGSYTHRGTGDIVSRAEARERGLFLPAPWDDVHDGKFRRDLLSALGQVFVSRHPKRKSAGELHDANPKGIRYLPVPLVDLTKDMLTDKCLQGITGRRRRNYEILREALQLANGDAHVAFANGYEIQEVSDKPKFVRCIALPAWSLPDEYLKQRRSALAKINKEKRKEGSGKIIENTASVRKTVPLTSLKKEMLTEAKLGSAFYHRNRELLEALQNQLDKFNGEAKKAFAEPFRPPKGKSGKERPLIRSIRLPVKQDGGMLVRGGVAGLGDSIATEVYWTSASYFFRPRYQADKEAMFGLEELPTGARQLFNLRIDEPIEVVLTSGEVIPGGGFPGYFVMYEGDGRMTIRTHDRPGKGRKKTKQTGENADENDSDEQSEKAKTDTVKDSSLFRFYVKNIKELRKFKIDILGKWKEVNVGFKHGLA

SEQ ID NO: 2969 - protein, 1080 aa, unidentified
  REGION 1..1080: note = Description of Unknown: Cas Enzyme sequence
MGYGIGLDIGIASVGWAVVELNREERPVRIIKMGSRIFDAAEQPKTGEPLAAPRRIARSMRRRLRRHRHRLDRIKHLLIEDQIISQDELDNLYIGQLDDIYALRTKALDKDITKKELARILLHIAQRRGFKSNRKTDKDDKEAGALLSAVKANKTIMTEKGYRTVGEMFYKDPQFAYEKRNKLGTYKATVQRDMVADEVRTIFARQEKHINLAKDFEDKYLEILLSQRSFDEGPGVGSPYGGDQIEKMIGNCTLEPEEKRAPKNSASFERFNLLQKINHLCLVTKGTSVSLTDEQREKIITLAYGTADLKYSKIRKELNIPEGTTFNLVYYKDNDIETSEKKEKLNCLKGYHEMRKALDKVAKGHISQLTKKQLNDAAYALTVYKTDAKISAYMLEHNIVQEDIDVLLNVPGFSKFGHLSVKACDELIPYLEKGMTYDKACEAAGIDFQGQTGDKSKLLPAQTDDMEEITSPVVRRSVSQTIKVINAIIRDNNSSPAYINIELAREMSKNFTDRKKDEKGMKESQAVNDRLMERIKSEFHKAHPTGMDLVKLKLYEEQGGVCAYSQKVLDVKRLFEPGYVEVDHIIPYSISFDDSYKNKVLVLSRENQNKGNKLPLEYMPPKQKEAFIVWTKNNVRNYRKKQILLKEKITKDDEDKFKQRNLQDTQHMSRFLYNYIRNYLQFAPSPNGRKKFVTAVNGAITSHMRKRWGINKNRANGDIHHAVDALVVACTTDGMIKEISNYSKIKENEYAKTKEGVALVNRHTGEILKKFPLPWAEFREELDARLSNKPSDKLTVMHLPNYTGINLEKMEPIFVSRMPKHKVTGAAHLDTVKGIIDDQWVVLKKSLTELKLNKDGIIENYYRPESDLLVYSALIARLKAFGNDGKKAFAEPFYKPKSDGTKGPLVRKVKIMEKSTLNVPVHQGTAVAANDSMVRIDVFKVEGDGYYFVPIYVADTLKKELPNRAVVQSKPYSEWKVMSDKNFVFSLYPNDLFKVTHNDKLKFSLINEDSSLPDKYEPIEEFVYFIKAGIASGTITVENHDGTYIISSLGLKTLKNIDKYQIDVLGNYVKVNKEKRQKFC

SEQ ID NO: 2970 - protein, 1068 aa, unidentified
  REGION 1..1068: note = Description of Unknown: Cas Enzyme sequence
MIGGLAMKHVIGLDIGIASVGWSVINLERNRIEDLGVRVFSAPEHPKDGSSLAKKRREAGGARKRIQRKRTRLLGIRQLFQEYGVLSLQEMDALFQSSLNKNPYEIRVDGLSRRLSSTEWFQALYHIAKHRGFQSTKKTPPNSKEKEKEEGALLEGIKNNASLLQEAKYRTVGEMILMDPKFQDHKRNKHGDYSHTIPQSLLREEIETLFFEQQRLGNPYTTDEFKRKTLDTFASRLHFAAPGQVESRVGPCTFEAGEKRAPCMSWSAERFILFGKINNLRIRDYFRGERSLSIGEARDLANLAYQKTEVKYKDIRKLFDLDDTAFFSGIRYSGKDTEREKSEGAVFVRLKGTQELRRAITSKLGKDAWETYASTPEILDEIARTLTWLKNEEDIRKSLSDKNIPPYLIEAVRDLDFKGAINLSFKALHKILPHMENGLRYDEAWPKAEYQGPVSEIESVRSVLLPPEDFDDITNPVVKRSLHQTRKVINALVRKYGSPWSIHIELAREMGKSFDDRKKIKTMQEENNAEKERTKKDFIENYTREPSGTDLLKFRLWKEQGGFDPYHQVHIDSGRLFHQGDGTYAEIDHIIPYSRSFDNSYTNKVLVLAEANRNKGNRTPREYIFSESRPEKWEAFVAWVEAQIRNGKKKSNLLRESFTLEDSNRMTERNLTDTRFITSHLANYLERCLVFSDPSPTSRKVLRVNGAVTATLRGKWGLHKDREAGHLHHALDAAVVAVTSHGLIQRITEYDQIRNSPGAKRNNGGVRERTPQPWEGFSREMLARISPNPTEEIGKVSLPSYEVEEIASLRPVFVSHMPIRKARGAAHKESVRSVKLGENGGTSIRTPLAKLDFKSLENMVGKERDRRLYESLKERLAAYGGDGGKAFGGSAPSFYKPTKDGSRGPLVRSIKVFSPGTAGVLVRGGIAENDNLVRVDVYKYKNKFSLVPHYVPDIAKGIVKKRGVLAHKEEKDWEVIGNEHKFCFSLFPNDLIEIIQKGTEKTLGYYRGMDRSDGKIALNLHDGSNKKEIRVSTRTCDSIRKFQVGLLGDYHEVKKEKPPQGKIDDGLA

SEQ ID NO: 2971 - protein, 1068 aa, unidentified
  REGION 1..1068: note = Description of Unknown: Cas Enzyme sequence
MIGGLAMKHVIGLDIGIASVGWSVINLERNRIEDLGVRVFPAPEHPRDGSSLAKKRREAGGARKRIQRKRTRLLGIRQLFQEYGILSLLEMDALFQRPLDKNPYEIRVDGLSRHLSSTEWFQALYHIAKHRGFQSTKKTPPNSKEKEKEEGALLEGIKSNASLLQEAQYRTVGEMIFMDSKFQDHKRNKHGDYSHTIPQSLLREEIETLFFEQQRLGNPYTTDEFKRKILDTFASRLHFAAPGQIESRVGPCTFEAGEKRAPCMSWSAERFILFGKINNLRIRDYFRGERSLSIGEARDLANLAYQKAEVKYKDIRKLFDLDDTAFFSGIRYSGKDTEREKSEGAVFVRLKGTHELRRAIASKLGKEEWETYASTPEILDEIARTLTWLKNEEDIRKSLSDKNIPSYLIEAVLDLDFKGTINLSFKALKKILPHMENGLRFDEAKKEAGYRGTVSEIGSVRSVLLPPEDFDDITNPVVKRSLHQTRKVVNALVRKFGSPWSIHIELAREMGKSFDDRDKIQKKQNENNAEKERMRKEFIENYTRDPSGTDLLKFRLWKEQGGFDPYHQVHIDSVRLFHQGDATYAEIDHIIPYSRSFDNSYTNKVLVLAEANRNKGNRTPREYIFSESRPEKWEAFVAWVEAQVRNGKKKSNLLRESFTLDDSNRMTERNLTDTRFITSYLANYLERCLVFSDPSPTSRKVLRVNGAVTATLRGKWGLNKDREAGHLHHALDAAVVAVTSHGLIQSITKFDQERNTLGAKFNTGGVRERTPQPWEGFRHELNARLRPNPSEEIGKVSLPSYGAEESASLRPVFVSHMPVRKAKGAAHKESVRSAKLEENGGTCIRTPLEGLNFESLEKMVGKERDKRLYESLKERLAAYGGDGGKAFGGSAPPFYKPTKDGSQGPLVRTIKVFRPGTSGVRVRGGIAENDNMVRVDVYRYKNKYSLAPHYVPDIAKGIVKKRGVLAHKEEKDWEVIGDEHKFCFSLFPNDLLEITSKNGEKTLGYYRGMNRNDGRIDLTLHDGSNQEDICLSTRTCQSIRKFQVGILGDYHEVKKEKPPQGKIDDGLA

SEQ ID NO: 2972 - protein, 1092 aa, unidentified
  REGION 1..1092: note = Description of Unknown: Cas Enzyme sequence
MAAFKPNPINYILGLDIGIASVGWAMVEIDEEENPIRLIDLGVRVFERAEVPKTGDSLVAARRLARSVRRLTRRRAHRLLRARRLLKREGVLQAADFDENGLIKSLPNTPWQLRAAALDRKLTPLEWSAVLLHLIKHRGYLSQRKNEGETADKELGALLKGVADNAHALQTGDFRTPAELALNKFEKESGHIRNQRGDYSHTFSRKDLQAELNLLFKKQKEFGNPHVSDGLKEGIETLLMTQRDSIPDESAILRMQGKCTFEKNKSRAAKHSWSAERFIWLSKLANLRITDEFGTRKLTEIERQILIDLPYKLKTVNYQQVRNALTTLSPNALFNIRYHQKDKKGEIKSSDKIEKDTKFMEMKFWHKIKETLEGNGRKTEWQSLSSNHNLLDEIGTVFTICKNDERRKALLSGKIKEDQDILDILCNHVDFTCTVNLSLEALKNILPFMEQGDDYDTAWRKVYPPQSTKKESVLPPIPADEIRNPVVLRALSQARKVINAVVRRYGSPARIHIETAREVGKSFKDRKEIEKRQEENRKDREESATEFREYFPNFIGEPKSKDILKLRLYKQQHGKCLYSGKEINLGRLNEIGYVEIDHALPFSRTWDDSFNNKVLVLGSENQNKGDRTPYEYLNGKDNSREWQEFKARVETSRFPHSKKQRILLQKFDEKEFKNRNLSDTRYINRFLCQFVADHMQLTGKDKNRVFASNGQITNLLRGFWGLRKARAENDRHHALDAVVVACSTVAMQQKITRFVRYKEMNAFDGKTIDKETGEVLHQKTHFPQPWDFFAQEVMIRVFGKPDGKPEFEEADTPEKLRTLLAEKLSSRPEAVHEYVTPLFVSRAPNRKMSGAHKDTLRSAKRFVKHNEKISVKRVWLTEIKLADLENMVNYKNGREIELYEALKARLEAYGGNAKQAFDPKDNPFYKKGGQLVKAVRVEKTQESGVLLNKKNAYTIADNGDMVRVDVFCKVDKKGKNQYFIVPIYAWQVAENILPDIDCKGYRIDDSYTFCFSLHKYDLIAFQKDEKSKVEFAYYINCDSSNGRFYLAWHDKGSKEQQFRISTQNLVLMQKYQIDELGKEIRPCRLKKRPPVR

SEQ ID NO: 2973 - protein, 1168 aa, unidentified
  REGION 1..1168: note = Description of Unknown: Cas Enzyme sequence
MPLETEEFQGADDVLQNSGSKGQSITTRCIFIHPSRSYCSNVSHFAVQQYVGNSSDCSNGSQLFHLHVNAFFRYIAVVVYEIAEKQMTAFKPNPLNYILGLDIGIASVGWAMVEIDDKENPVRLIDLGVRVFERAEVPKTGDSLAAARRLARSVRRLTRRRAHRLLRARRLLKREGVLQAADFDENGLIKSLPNTPWQLRTAALDRKLTPLEWSAVLLHLIKHRGYLSQRKNEGETADKELGALLKGVADNAHALQTSNFRTPAELALNKFEKESGHIRNQRDDYSHTFSRKDLQAELNLLFEKQKEFGNPHVSDGLKEGIETLLMTQRPALSGDAVQKMLGHCTFEPTEPKAAKNTYTAERFIWLTKLNNLRILEQGSERPLTATERATLMDEPYRKSKLTYAQARKLLGLEDTAFFKGLHYGKDNAETSTLMEMKAYHAISRALEKEGLKDKKSPLNLSPELQDEIGTAFSLFKTDEDITGRLKDRVQPEILEALLKHISFDKFVQISLKALRRIVPLMEQSKRYDEACAEIYGDHYGKKNAEEAIYLPPIPADEIRNSVVLRALSQARKVINAVVRRYGSPARIHIETAREVGKSFKDRKEIEKRQEENRKDREKAAAKFREYFPNFVGEPKSKDILKLRLYEQQHGKCLYSGKEINLGRLNEKGYVEIDHALPFSRTWDDSFNNKVLVLGSENQNKSNQTPYEYFNGKDNSREWQEFKARVETSRFPRSKKQRILLQKFDEDGFKERNLNDTRYVNRFLCQFIADRMRLTGKGKRRVFASNGQITNLLRGFWGLRKVRAENDRHHALDAVVVACSTVAMQQKITHFVRYKEMNAFDGKTIDKETGEVLHQKAHFPQPWEFFAQEVMIRVFGKPDGKPEFEEADTPEKLRTLLAEKLSSRPEAVHEYVTPLFVSRAPNRKMSGQGHMETVKSAKRLDEGISVLRVPLTQLKLKDLEKMVNREREPKLYEALKARLETHKDDPAKAFAEPFYKYDKAGNRTQQVKAVRVEQVQKTGVWVRNHNGIADNATMVRVDVFEKGGKYYLVPIYSWQVAKGILPNRAVVQGKDEEDWTVMDDSFEFKFVLYANDLIKLTAKKNEFLGYFVSLNRATGAIDIRTHDTDSTKGKNGIFQSVGVKTALSFQKYQIDELGKEIRSCRLKKRPPVR

SEQ ID NO: 2974 - protein, 1082 aa, unidentified
  REGION 1..1082: note = Description of Unknown: Cas Enzyme sequence
MTAFKPNPLNYILGLDIGIASVGWAMVEIDDKENPVRLIDLGVRVFERAEVPKTGDSLAAARRLARSVRRLTRRRAHRLLRARRLLKHEGVLKPEDFDENGFIKLLPNTPWQLRAAALDRRLAPLEWAAVLLHLVKHRGYLSQRKNEGETADKELGALLKGVADNTHTLQAGDFRTPAELALNKFEKESGHIRNQRGDYSHTFSRKDFQAELVLLFKKQKEFGNPHISDGLKEGIETLLMAQRPALSGDAVQKMLGYCTFEPTEPKAAKNTYTAERFIWLTKLNNLRILEQGSERPLTDTQRATLMDEPYRKSKLTYAQARKLLDLDDTAFFKGLRYGKDNAEASTLMEMKAYHAISRALEKEGLKDKKSPLNLSPELLDEIGTVFSLFKTDEDITGRLKDRVQPEILEALLKHISFDKFVQISLKALRRMVPLMEQGKRYDEACAEIYGDHYGKKNTEEEIYLPPIPADEIRNPVVLRALSQARKVINAVVRRYGSPARIHIETAREVGKSFKDRKEIEKRQEENRKDREKAAAKFREYFPNFVGEPKSKDILKLRLYEQQHGKCLYSGKEIDLGRLNEKGYVEIDHALPFSRTWDDSFNNKVLVLGSENQNKDNQTPYEYFNGKDNSREWQEFKARVETSRFPRSKKQRILLQKFDEDGFKERNLNDTRYVNRFLCQFIADHMLLTGKGKRRVFASNGQITNLLRGFWGLRKVRAENDRHHALDAVVVACSTVAMQQKITRFVRYKEMNAFDGKTIDKETGEVLHQKTHFPQPWEFFAQEVMIRVFGKPDGKPEFEEADTPEKLRTLLAEKLSSRPEAVHEYVTPLFVSRAPNRKMSGQGHMETVKSAKRLDEGISVLRVPLTQLKLKDLEKMVNREREPKLYEALKARLEAHKDDPAKAFAEPFYKYDKAGNRTQQVKAVRVEQVQKTGVWVRNHNGIADNATMVRVDVFEKGGKYYLVPIYSWQVAKGILPDRAIIAFKDEEDWQLIDDSFNFKFSLHPNDLIEVITKKARIFGYFASCHRGTGNINIRIHDLDHKIGKNGILEGIGVKTALSFQKYQIDELGKEIRPCRLKKRPPVR

SEQ ID NO: 2975 - protein, 1081 aa, unidentified
  REGION 1..1081: note = Description of Unknown: Cas Enzyme sequence
MTAFKPNPLNYILGLDIGITSVGWAMVEIDNEENPIRLIDLGVRVFERAEVPKTGDSLAAARRLARSIRRLIRRRAHRLLRARRLLKHEGVLRSEDFDENGFIKLLPNTPWQLRAAALDRKLMPLEWAAVLLHLVKHRGYLSQRKNEEQTADKELEALREGMKSNTQALQTGNFRTPAELALNKFEKESGHIRNQRGDYSHTFSRKDLQAELVLLFEKQKEFGNPYVSDDLKNGIENLLMTQRPALSGDAIQKMLGHCTFEPTEPKAAKNTYTAERFIWLTKLNNLRILNQGSERPLTDTERATLMEAPYTKKLTYAQARKLLGLDDTAFFKGLRYGKDNAESATLMEMKAYHAISRALEKEGLKDKKSPLSISPELQDEIGTAFSLFKTDEDITGRLKDCLQPEILDALLKHISFDKFVQISLKALRRIVPLMEQGKRYDEACAEIYGDHHGRRNSEETLYLPPIPADEIRNPVVLRALSQARKVINGVVRRYGSPVRIHIETAREVGKSFKDRKEIEKRQEENRKDREKAAAEFQEYFPNFVGEPKSKDILKLRLYRQQNCKCLYSGKEINLGRLNEKGYVEIDHALPFSRTWDDSFNNKVLVLGSENQNKGNRTPYEYLNGKDNSREWQEFKARVETSRFPRGKKQRILLQKFDEGEFKKRNLNDTRYINRFLCQFVAGHIRLLSDGENRVFAFNGQITNLLRGFWGLRKVRAENDRHHALDAVVVACSTVAMQQRITRFVRYKEMNAFDGKTVDKETGEVLHQKTHFPQPWEFFTQEVMIRVFGKLGGKPEFEEADTPEKLRALLAEKLPSRPEAVHEYVAPLFVSRAPNRKMSGAHKDTLRSAKRFVKHNEKISVKRVWLTDIKLADLENMVNYKNGREIELYETLKARLEKYGGNAKQAFDPKDNPFYKKGGQLVKAVRVEKTQESGVLLNKNNAYTIADNGDMVRADVFCKTDKKGKNQYFIVPIYAWQVAENILPDIDCKGYRIDDSYTFCFSLHKYDLMAFQKDEKSKVEFAYYINCDSSDGRFYLAWHDKGAKEQQFRISTQNLVLMEKYQIDELGKEIRPCRLKKRPPVR

SEQ ID NO: 2976 - protein, 1081 aa, unidentified
  REGION 1..1081: note = Description of Unknown: Cas Enzyme sequence
MAAFKPNPINYILGLDIGIASVGWAMVEIDEEENPIRLIDLGVRVFERAEVPKTGDSLAAARRLARSVRRLTRRRAHRLLRARRLLKREGVLQAADFDENGLIKSLPNTPWQLRIAALDRKLTPLEWSAVLLHLIKHRGYLSQRKNEDKTADKELGALLKGVADNAHALQTGKFRTPAELALNKFEEESGHIRNQRGDYSHTFSRKDLQAELNLLFEKQKEFGNPHISDGLKEGIETLLMAQRPALSGDAVQKMLGYCTFEPTEPKAAKNTYTAERFIWLTKLNNLRILEQGSERPLTDTERATLIDMPYKNKLTYAKARELLGLDDTAFFKGLRYGKDNAESATLMEMKAYHAIRRALEKEGLKDKKSPLSLSPELQDEIGTAFSLFKTDEDITGRLKGCLQPEILDALLKHISFDKFVQISLKALRRIVPLMEQGKRYDEACAETYGDHYGEKNSEEMLYLPPIPADEIRNPVVLRALSQARKVINSVVRRYGSPARIHIETAREVGKSFKDRKEIEKRQEENRKDREKAAAEFREYFPNFVGEPKSKDILKLRLYEQQHGKCLYSGKEINLGRLNEKGYVEIDHALPFSRTWDDSFNNKVLVLGSENQNKGNQTPYEYFNGKDNSREWQEFKARVETSRFPRSKKQRILLQKFDEDGFKERNLNDTRYVNRFLCQFVADHMLLAGKGKRRVFASNGQITNLLRGFWGLRKVRAENDRHHALDAVVVACSTVAMQQKITRFVRYKEMNAFDGKTIDKETGEVLHQKAHFPQPWEFFAQEVMIRVFGKPDGKSEFEEADTPEKLRTLLAEKLSSRPEAVHEYVTPLFVSRAPNRKMSGQGHMETVKSAKRLDEGISVLRVPLTQLKLKDLEKMVNREREPKLCEGLKARLEAHKDDPTKAFAEPFYKYDKAGNRTQQVKAVRVEQVQKTGVWVRNHNGIADNATMVRVDVFEKGGKYYLVPIYSWQVAKGILPDRAIIAFKDEEDWQLIDDSFNFKFSLHPNDLIEVITKKARIFGYFASCHRGTGNINIRIHDLDHKIGKNGILEGIGVKTALSFQKYQIDELGKEIRPCRLKKRPPVR

SEQ ID NO: 2977 - protein, 1092 aa, unidentified
  REGION 1..1092: note = Description of Unknown: Cas Enzyme sequence
MTAFKPNPINYILGLDIGIASVGWAMVEIDEEENPIRLIDLGVRVFERAEVPKTGDSLAAARRLARSVRRLTRRRAHRLLRARRLLKREGVLQAADFDENGLIKSLPNTPWQLRAAALDRKLTPLEWSAVLLHLIKHRGYLSQRKNEGETADKELGALLKGVADNAHALQTGDFRTPAELALNKFEKESGHIRNQRGDYSHTFSRKDLQAELNLLFEKQKEFGNPHVSDGLKNGIDNLLMAQRDSIPDESAILRMQGKCTFEKNKSRAAKHSWSAERFIWLSKLANLRIMDEFGTRKLTEIERQILIDLPYKLKTVNYQQVRNALTTLSPNALFNIGYHQKDKKGEIKSPDKIEKDTKFMEMKFWHKIKETLEGNGRKTEWQSLSNNHNLLDEIGTVFTICKNDERRKALLSGKIKENQDILDVLCDHVDFTCTVNLSLEALKNILPFMEQGDDYDTAWRKVYPPQSTKKESILPPIPADEIRNPVVLRALSQARKVINGVVRRYGSPARIHIETAREVGKSFKDRKEIEKRQEENRKDREKAAAKFREYFPNFVGEPKSKDILKLRLYEQQHGKCLYSGKEINLGRLNEKGYVEIDHALPFSRTWDDSFNNKVLVLGSENQNKGNQTPYEYFNGKDNSREWQEFKARVETSRFPRSKKQRILLQKFDEDGFKERNLNDTRYVNRFLCQFVADHMLLTGKGKRRIFASNGQITNLLRGFWGLRKVRAENDRHHALDAVVVACSTVAMQQKITRFVRYKEMNAFDGKTIDKETGEVLHQKAHFPQPWEFFAQEVMIRVFGKPDGKPEFEEADTPEKLRTLLAEKLSSRPEAVHEYVTPLFVSRAPNRKMSGQGHMETVKSAKRLDEGISVLRVPLTQLKLKDLEKMVNREREPKLYEGLKARLEAHKDDPAKAFAEPFYKYDKAGNRTQQVKAVRVEQVQKTGVWVRNYNGIADNATMVRVDVFEKGGKYYLVPIYSWQVAKGILPDRAVVQGKDEEDWTVMDDSFEFKFVLYANDLIKLTAKKNEFLGYFVSLNRATGAIDIRTHDTDSTKGKNGIFQSVGVKTALSFQKYQIDELGKEIRPCRLKKRPPVR

SEQ ID NO: 2978 - protein, 1082 aa, unidentified
  REGION 1..1082: note = Description of Unknown: Cas Enzyme sequence
MTAFKPNPLNYILGLDIGIASVGWAMVEIDDKENPVRLIDLGVRVFERAEVPKTGDSLAAARRAARSIRRLVRRRAHRLLRARRLLKHEGVLKPEDFDENGFIKLLPNTPWQLRAAALDRRLAPLEWAAVLLHLVKHRGYLSQRKNEEQTADKELGALLKGVADNTHALQAGDFRTPAELALNKFEKESGHIRNQRGDYSHTFSRKDLQAELVLLFEKQKEFGNPYVSDDLKNGIENLLMTQRPALSGDAIQKMLGHCTFEPAEPKAAKNTYTAERFIWLTKLNNLRILNQGNERPLTDAERTTLMDEPYKKSKLTYAQARKLLDLDDTAFFKGLRYGKDNAESATLMEMKAYHTISRALEKEGLKDKKSPLSLSPELQDEIGTAFSLFKTDEEITGRLKGCLQPEILDALLKHISFDKFVQISLKALRRIVPLMEQGKRYDEACAEIYGDHYGEKNSEETLYLPPIPADEIRNPVVLRALSQARKVINGVVRRYGSPVRIHIETAREVGKSFKDRKEIEKRQEENRKDREKAAAKFREYFPNFVGEPKSKDILKLRLYRQQNCKCLYSGKEINLGRLNEKGYVEIDHALPFSRTWDDSFNNKVLVLGSENQNKGNRTPYEYLNGKDNSREWQEFKARVETSRFPHSKKQRILLQKFDEEGFKERNLNDTRYVNRFLCKFVADHMQLTGKGKRRVFASNGQITNLLRGFWGLRKVRAENDRHHALDAVVVACSTVAMQQRITRFVRYKEMNAFDGKTVDKETGEVLHQKTHFPQPWEFFAQEVMIRVFGKPDGKPELEEADTPEKLRALLAEKLSSRPEAVHEYVTPLFVSRAPNRKMSGQGHMETVKSAKRLDEGISVLRVPLTQLKLKDLEKMVNREREPKLYEGLKARLEAHKDDPAKAFAEPFYKQNKAGNPTQQVKAVRIEQVQKTGVWVRNRNGVADNATMVRIDVFEKGGKYYLVPIYSWQVAKGILPDRAVVQGRDEEDWTVMDDSFEFKFVLYANDLIKLTAKKNVFLGYFVSLNRATGAIDIRTHDTDSTKGKNGIFQSVGVKTALSFQKYQIDELGKEIKPCRLKKRPPVR

SEQ ID NO: 2979 - protein, 1053 aa, unidentified
  REGION 1..1053: note = Description of Unknown: Cas Enzyme sequence
MENKNLHYILGLDLGIASVGWAVVEIDEKENPLRLIDVGVRTFERAEVPKTGESLALSRRLARSARRLTQRRVARLKKAKRLLKSENILLSTDERLPHQVWQLRVEGLDRKLERQEWAAVLLHLIKHRGYLSQRKNESKSENKELGALLSGVDNNHKLLQQATYRSPAELAVKKFEVEEGHIRNQQGAYTHTFSRLDLLAEMELLFSRQQHFGNPFASEKLLENLTALFMWQKPALSGEAILKMLGKCTFEDEYKAAKNTYTAERFVWITKLNNLRIQENGLERALSDNERLMLIEQPYEKAKLTYAQVRSILNLSDEAIFKGLRYSGEDKKAIETKTTLMEMKAYHQIRKVLEGNNLKAEWAELKTNPTLLDEIGTAFSLYKTDEDISDYLAGKLSQPVLNALLENLSFDKFIQLSLKALYKLLPLMQQGLHYDEACREIYGDHYGKKTKENHHFLPQIPADEIRNPVVLRTLTQARKVINGIVRLYGSPARIHIETGREVGKSYKDRRELEKRQEENRKQRENAIQEFKEYFPHFAGEPKAKDILKMRLYKQQNAKCLYSGKPIELHRLLEKGYVEVDHALPFSRTWDDSFSNKVLVLANENQNKGNLTPFEWLDGKHNSERWRAFKALVETSAFPYAKKQRILSQKLDEKGFIERNLNDTRYVARFLCNFIADNMHLTGEGKRKVFASNGQITALLRGRWGLAKSREDNDRHHALDAVVVACSTVAMQQKITRFVRFEAGDVFTGERIDRETGEIIPLHFPTPWQFFKQEVEIRIFSDNPKLELENRLPDRPQANHEFVQPLFVSRMPTRKMTGQGHMETVKSAKRLNEGISMIKMPLTKLKLKDLELMVNREREKDLYDALKARLEAFNDDPAKAFAEPFMKKGGAIVKSVRVEQVQKSGVLVREGNGVADNASMARVDVFTKDGKYFLVPIYTWQVAKGILPNKAVIQGKDEEDWADMSDATFKFSLHQNDLVKLVTKKKTIFGYFNGLDRATGSIAIKEPDLEKTKAKGGIYQSAGIKLALSFEKFQVDELGKNIRLCKPSKRQAVR

SEQ ID NO: 2980 - protein, 1054 aa, unidentified
  REGION 1..1054: note = Description of Unknown: Cas Enzyme sequence
MENKNLHYILGLDLGIASVGWAVVEIDEKENPLRLIDVGVRTFERAEVPKTGESLALSRRLARSARRLTQRRVARLKKAKRLLKSENILLSTDERLPHQVWQLRVEGLDRKLERQEWAAVLLHLIKHRGYLSQRKNESKSENKELGALLSGVDNNHKLLQQATYRTPAELAVKKFEIEEGHIRNQQGAYTHTFSRLDLLAEMELLFSRQQHFGNPFASEKLLENLTALLMRQKRALSGEAILKKLGKCTFEDEYKAAKNTYTAERFVWITKLNNLRIQENGLERALSDNERLMLIEQPYEKAKLTYAQVRSILNLSDDAIFKGVRYSGGDKKAIETKTTLMEMKAYHKIHNVLKNNNLKAEWAELKANPTLLDEIGTAFSLYKTDEDISAYLAGKLSQPVLNALLENLSFDKFIQLSLKALYKLLPLMQQGLRYDEACREIYGDHYGKKTEETHHFLPQIPADEIRNPVVLRTLTQARKVINGVVRLYGSPARIHIETGREVGKSYKDRHELKKRQEENRKQREKTISEIKTLFPNFSGEPKGKDILKMRLYYQQNAKCLYSGKPLELHRLFEQKYVEVDHALPLSRTWDDSFNNKVLVLANENQNKGNLTPFEWLDGKNNSERWRTFKALVETSAFPYAKKQRILSQKLDEKGFIERNLNDTRYVARFLCNFIADNMHLTGEGKRKVFASNGQITALLRRRWGLAKSREDNDRHHALDAVVVACSTVAMQQKITRFVRFEAGDIFTGERIDRETGEIIPLHFPTPWQFFKQEVEIRIFSDNPKLELENRLPDRPQANHEFVQPLFVSRMPTRKMTGQGHMETVKSAKRLNEGISVIKMPLTKLKLKDLESMVNREREKELYDALKARLEAFNDDPAKAFAEPFMKKGGVIVKSVRVEQVQKSGVLVRDGNGVADNASMARVDVFTKDGKYFLVPIYTWQVAKGILPNKAVIQGKNEENWEVMDDNAIFKFSLHQNDLVKLVTKKKTILGYFNGLDRATGNIGIKEHDLEKSKIKDGIHQSVGIKLATSFEKYHIDELGKNIRLCKPSKRQAVR

SEQ ID NO: 2981 - protein, 1058 aa, unidentified
  REGION 1..1058: note = Description of Unknown: Cas Enzyme sequence
MKSVSLNYILGLDLGIASVGWAVVEIDKNENPLRLVDVGVRTFERAEEPKTGDSLAAERRLARSTRRLIRRRAHRLLRAKRLLKREGILLAEDFRLPTELRDLPNNVWELRVRGLAHKLERKEWAAVLLHLIKHRGYLSQRKNESKTDNKELGALLKGVRENHQLLQLNDYSSPAELAIKKFQTECGHIRNQRGEYIHTFDRLDLQRELKQLFNAQRTVQNPYTTVELEQQVTELLMCQKESLSGEAILKMLGKCTFEPTEYKAAKNTYSAERFIWLTKLSNLRILENGIERELTKSERELVINQPYAKAKFTYAQLRRLLELSDNALFKGLHYAKDNAESVTLMEMKAFHAIRKALENNGLKIEWQGLATNPKLLDEIGTAFSLYKTDEDITKYLNGKLSQSILNVLLENIVFDRFIQLSLPCLEKILPLMEQGSRYDEACKAIYGDHYDKRKQEENLYLPTIPADEIRNPVVLRALSQARKVINGVVRLYGSPARVHIETGREVGRSFRERNEIKKQQEENRTQRESAVKKFKEFFPAFSGEPKVKDILKMRLYELQHGKCLYSRKEIDLTRLLEKGYTEIDHALPFSRTWDDSFNNKVLVLASENQNKGNKTPYEWLGGEENSPYWKMFVALVNGSRFSYAKKQRILTQELDEEGFKERNLNDTRYIARFLCKFIAGNMLLLGKGKKKVFASNGQITALLRRRWGIAKIRDENDRHHAVDAIVVACSTVGMQQKITQFVRFKEGNAFTGERIDRGSGEIIPIHFPEPWKYFRQEVEIRVFSDAPKEDLIIKLPDRPQANHEFVQPLFVARAPNRKMTGPGHLETIKSVKRLDEGISILKVPLSQLKLNLLENMVNREREPELYKALKTRLEQFENNPAKAFTEPFYKKGGQQVKSVRVEMVQKTGVLVRNGKGIADNASMVRVDVFTKSGKYFLVPIYTWQVAKGILPNKAIVAHKDESQWDEIDDSFKFKFSIYSNDLIKVVTKKETFFGYYSGCDRATAAISIKEHDSEKTKGKDGLHRSIGVKTAVSFEKYQVDELGKNIRLCRLSKRQKVR

SEQ ID NO: 2982 - protein, 1053 aa, unidentified
  REGION 1..1053: note = Description of Unknown: Cas Enzyme sequence
MENKNLHYILGLDLGIASVGWAVVEIDEKENPLRLIDVGVRTFERAEVPKTGESLALSRRLARSARRLTQRRVARLKKAKRLLKSENILLSTDERLPHQVWQLRVEGLDRKLERQEWAAVLLHLIKHRGYLSQRKNESKSENKELGALLSGVASNHKLLQQATYRTPAELAVKKFEIEEGHIRNQQGAYTHTFSRLDLLAEMELLFFRQQLFGNPFASEKLLENLTALLMWQKPALSGEAILKMLRKCTFEDEYKAAKNTYTAERFIWITKLNNLRIQENGLERALSDNERLMLIEQPYEKAKLTYAQVRSILNLSDDAIFKGVRYSGEDKKAIETKTTLMEMKAYHQIRKVLEGNNLKAEWAELKANPTLLDEIGTAFSLYKTDEDISAYLAGKLSQPVLNALLENLSFDKFIQLSLKALYKLLPLMQQGLRYDEACREIYGDHYGKKTEENHHFLPKIPADEIRNPVVLRTLTQARKVINGVVRLYGSPARIHIETGREVGKSYKDRRELEKRQEENRKQRENAINEFKEYFPHFAGEPKAKDILKMRLYKQQNAKCLYSGKPIELHRLLEKGYVEVDHALPFSRTWDDSFNNKVLVLANENQNKGNLTPFEWLDGKHNSERWRAFKALVETSAFPYAKKQRILSQKLDEKGFIERNLNDTRYVARFLCNFIADNMHLTGEGKRKVFASNGQITALLRSRWGLAKSREDNDRHHALDAVVVACSTVAMQQKITRFVRFEAGDVFTGERIDRETGEIIPLHFPTPWQFFKQEVEIRIFSDNPKLELENRLPDRPQANHEFVQPLFVSRMPTRKMTGQGHMETVKSAKRLNEGISVIKMPLTKLKLKDLELMVNREREKDLYDALKARLEAFNDDPAKAFAEPFMKKGGAIVKSVRVEQVQKSGVLVREGNGVADNASMVRVDVFTKDGKYFLVPIYTWQVAKGILPNKAIVALKDENEWIDINENYQFIFSLHANDLVKVKLKKETFFGYYNGLDRATGAIVIREHDTEKSKGKGGLYRIGVKLALSFEKFQVDELGKNIRLCKPSKHQAVR

SEQ ID NO: 2983 - protein, 1136 aa, unidentified
  REGION 1..1136: note = Description of Unknown: Cas Enzyme sequence
MGYVFGLDMGIASVGWSVIEPGKSIVDLGVRIFKKAETDKEGDPLNLIRRVSRLGRRRIYRRAQRLNRLLNFLIASGFISNKEEILKNEFNDNPWELRNVGLNSVLTNNQIARVIYHICKHRGFYWSSSADADSGDDGGKIKKSLSSNQKLMEEKGYKTVGQMIFTEYPDCQRNKNKDYTKSLSRVALYEELKEILNAQIGFHNPLVTDEFCKAIIGNGDKKSGFLWEQKPALQGEKLLEMVGHCRFERDELRCPTANYFSERHVWLTKIINLRVYGADNQERPLTSEERAVIIDKALEIKSDIKYSTLTASFIKAGLWTLGEYKYKGIDYEQSVIKKSTKKTDVTGADNKSVSKKDPEDKIFFKRSHLHEIRMALESNKLSDVWDDIKSEILSGNFERYNRIAYVLTVYKEDSDVIEKLSDTENSAVINALLTVRFKEFNSLSEKALKKIVPFMEQGKRYDEACKEAGYQHYKQSQKEDIKSKYLPPLFSGREPNGTLIFNEDIGDVPRNPVVLRVINQTRKVVNALVKKYGSPESIHIELARDLSKPFSERMEDKRRQDDTEYKRLKEREEFIKFFGEGACNGRNLEKFKLFKEQNEKSMYSLKPIDIHRLFENGYVEVDHILPYSRCYNDSQSNKVLVLTKENQDKGNQIPYEYFTRQKRDIDWHEFEEWVKSSKTFSKNKKSNLLRTSLSKDSKNEFLSRNLNDTRYACKFMKNYIDRFLSLSESADKSGCVVVSGQLTAYLRRNWGLSKVREKNDRHHALDACVIACCSRSIIQKIGYWSRAKECRYLSTSYDDPDVPVSDEEMLLQGTFTKEDKPKFPKPWGHFREEVMGRVFADNLEKLKEDLQVFCGYSDNQLNCVRTLFVSRACEKLGKGALHADTVRRQSLAMRKDNLAVSKVSLQKLSYSDIDKIVDAETRNKNLCNALRARFEKYCRDNGKDLTKKLDDKDKVKIFSDEKPMHMPNSDGVEDPRNPIVKSVRIIEKFSGVPIRNGVAGNGDIVRIDIFKKSNKYYCVPIYSINKELPNLACVANKNESNWDVIDSSFEWCFSIRQNELIRIEQKNNFYFGYFNSFDRGNGTFSILLHDREDSKDHKKGEIRGIGVKTALSLTKYYVDVLGNYYKAQPEKRLELA

SEQ ID NO: 2984 - protein, 952 aa, unidentified
  REGION 1..952: note = Description of Unknown: Cas Enzyme sequence
MNDKGYRTAAEMVLSEFDTCRNKQGSYDKALSRALLDEELGRLFEAQRQLGNPHASAELERAIRGTGDRRSGLFWEQRPPQSVLSMLGRCRYERTGGPDGKGEYRAPKASFTAERHVWLTRLNNLRIVVDGEIRPLTDRERQRVLDDPYRAAERYTYKSLRKALLRDGELTHDFRFAGLSYPSEQQKVDQKVKDPEDQILVRLTGWHTLRLHLKNSCLATEWQILADDALSGKPDQLDQIAWALSVFKSDDEVRAELSRLALPGGERMVEALLSLNFDKFHALSLKALRKIVPLMEQGLRYDEAVERIPEYGHHSNRPRENTGKQKYLPPFYEGTRTESGSMRIREGLDIPRNPVVLRALNQARKVCNALIREYGQPSEVHIEMARDLARPADERRAIQKLQEEYRERNEAERLQFAETFGRKPSGAELEKWLLYREQHGKCAYSLEPLDLARVIKDPGYVQVDHALPYSRSFDDSRNNKVLVLTRENQNKGNRTPYEYLTSFPGGEEGDRWRHYKAWVEANKSYRQAKRNRLLRKHFGAEEEQAFKDRNLNDTRYICRFFKNYVEEHLQLASDSTARRCVVLNGQLTAFLRAKWGLLKIREQSDRHHALDAAVIAACSHAMVKRLADYARKKELAYLSKGLPDPETGVVASASAHDALSHAFPEPWPHFRHELEKRLTIESVDELRSEMKRLGTYPPEALESLRPLFVSRAPQRRGVGALHKDTLYSPRPLLEKNNEPGKQKNCTIVRKNVLELKLSDLQNIVGKEDPRNASLIKAIEDRLVAHGNDGKKAFATPLFRPSADGKKAPIVRTVRLYKTKETGAFVGTGVADLGEMLRVDVFRHGRRYVLIPAYAMPLDKRINKNQPPDGAEFLFSLTKNDLVEVTIGSTTTRGYFVMFESDGRLTLRRHDQPIPDRSYFRKNIANATRLQKFHVDILGRVFLAPPEKRYGVA

SEQ ID NO: 2985 - protein, 1100 aa, unidentified
  REGION 1..1100: note = Description of Unknown: Cas Enzyme sequence
VNKKLILGLDLGITSVGWGIIDDDFTIIDQGVRLFEESTADKNKDRRGYRGSRRLLRRRRARILRMYKYLEEIGVINDTFSYLDNPYEIRVKGLSQKLSNDELATALLHITKRRGSSLEVIESDADNKDEQSAKKAIQYNLTKLREEKLFIAQIQLQRHQDETQKVRGHHNIFKTEDYLKEVEQILNNQNLTQEQNEKILDIIGTRRKFTEGPGSIQAPTPYGRFRPVESELKEKLFEHLRLKKDQRLLKETFTYTYEDKTYKIFKSGVVIPTKPLNLIDLMRGKCSIYPDQFRASKRSFSAELYNLLNELNNIRFILTNKVLTQQEKEEIIEHVLEKGDFTYAQFKKKFNVQSDDDITGSLKDNKNIFAGFKKLHKIYNTLNLKLPERDILDQISDVLTNYPTIEDRTEQFNHMKLDKKLIENLVTLTGFNGTHALSYKALNNFIPMLIEENLNQQQLRMKYDMAQQDAVDSIIYEDDSITNPVVRRVQREAQKVIQELIKTYGNFDSIVIETTRDKNTKEQVTRIKQIQEKNKKLNLESQEIIEASGYSNDHRLSAILSQKIRLYNEQNQRCAYTGEVIDIGRLLRDPKAYEIDHIIPYSISFDDSFNNKVLVTHEVNQLKGNRTPFGYFAQGLNLQHEINNYADFKRYVESNPNYNRFKKANLLYEKDITKYSTLLEFKNRNLNDTSYAIRSFMTHLKRYFKQNNIPTNVFTMKGKQTNLFRNVAMNQWYRNNPNQDYKSNPFYKSRNYFKHHAIDALIVAGLFNQNTFKKFYQMDVNEDKTVLFTQKTGEIIKTNPFEDDKLYKFFNQIAELDDEQFKFSWKIDSKPNRTISDQTIYSTRRFGKDDYIIKKENLYDMKKDRAKKFFEEVKDQEKLLMYRHDPETFNIILKAYEQYKHETYPFKIYKENHGPIRKYAKNNQGPIVNSFKYMANKLGNAMDISYKYPVKNKKVVKLTLSPYRVDIYFNNEQYKFVTVRYYHLMYDFNLRKHTIRTEMYEELLKEKNITPDYKFQFSLVKYNIFEIHRKIGDDIISERVRFIGTNDDVNNRLESKEISFQSDKRRYPIISKNVVKINKYNVSVTGKISKVKQERLKLTI

SEQ ID NO: 2986 - protein, 1086 aa, unidentified
  REGION 1..1086: note = Description of Unknown: Cas Enzyme sequence
MSYGIGLDIGITSVGFAVLELDGKDEPKRIIKIGSRIFDAAENPKDGSSLAKPRREARGARRRLRRHRHRLERIKNLIINENILTQSQLDNLYNGILSDVYELRAKALDEQLTNEEFARVLIHLAQRRGFKSNRKTDAVDQEAGKLLNAVKSNAELLESKGYRTIGEMLFKDSKYKNCKRNKIEDYSNTFGRDLVLEEVQKIFEKQCEFGMSFASCEIEDKYINILMSQRSFALGPGGDSPYGGNQKENMIGFCTLEKEKKEKRAPKACYSFEYFSLLQNVNNMRIFSNKDSRSLTEDERKAVIKLAHDVASLSYDRLRKELKLSDEESFGALSYGYKNKEEVEKKTKFEYLKSYHKIRKTLDKVSKGHMLSYDKDKLNKVGYALFIYPTDEEIIECLNNCGIPQEDIEALLTLSGFSGVGHLSIVACDKLIPFLEEGKRYDEACTLAGYEFKAHVSGEKQKYLPAVIEEFDNITNPVVRRAVSQTIKVVNAIIREQGTSPSFVNIELAREMSKSPDDRKKLEKGMKDNQAVNDRIKDRIEKEFNKSNPSGMDIVKLKLWEEQNGICPYSLQQIELNRLFETGYVDVDHIIPYSISFDDGYKNKVLVKSKENRQKGNRLPLQYLTGKKRDDFIVWVTNNTRDYRKRQLLLKEKLSDDDKGLKERNLIDTRYISKLMYNLINDYLVFAPSATNKKKRVTAVNGSVTSYVRKRWGIKKNREDGDLHHAVDAAVIACVTDGMIQKITRYSNYKEIEYMQHDEGSEVINPRTGEVLDKFPHPWKDFKEELDIRLCKNPSQLLKEVPLSNYNGINLEEIKPCFVSRMPKRKVTGAAHLATVKSARIVDEGYVVSKTPLNKLKLKDGEIKGYLQEAKTSDTRLYSALRQRLLDFDGDAEKAFLVSFYKPTKTGEQGPEVKKVLIAEKSNLNVRVYQDNGVAGNDSMIRVDVFFVENEGYYFVPIYVANTLEDQLPNRACVKSKANNNWKDMHDEDFIFSLYPNDLIKVVAQKDIKLSLINENSTLPKELTKNESMLYYKTLDINRCSIEAINHDKTYKTRSIGKTTKLIEKYQVDVLGNYYKVGKETRQYFK

SEQ ID NO: 2987 - protein, 1080 aa, unidentified
  REGION 1..1080: note = Description of Unknown: Cas Enzyme sequence
MKTANKNLPLYTLGLDIGIASVGAALLGEQRILGLHVRTFDKAEANDGQSLNAIRRNARLTRRRIRRRRHRMLRLCRLFRRQGLIAEARPQAFKLPATTPWELRAQGLDRCLTAQEWASVLYHIVKHRGFQSNRKSEASADEKAGQMLSGVSFNQQRLQTSGMRTIGELAARHPDFTLSKRNKRDEYSHTFGRTDLEHEIGVLFERQRAVGSPHADQVFERAVRDLLHTRKPTLSGENLLKMIGKCTFEPQERRAPKATYSAERFIWQGKLNNLKIEESGATRALSEQERQIAQDLPFTKAKLTFMQLRKALELPESARFNLVRYAPNAKGKDPEEATLFEAKAFHALRKAYENAGLKAEWQRDSLDAQHLDTLGYALTCFKDDDEIRAHLMQQGIETAIVDAVLSVHFAQFINLSLKALRNILPFMEQGERYDQAAESAGYSHYQPRQAVKTRGYLPAPDREEIRNPVVYRALNQARKLVNAIVREYGPPMAVHIEMARDLNKPFKERQQIMRDQEEYQAAKQQAHDDFVELFGFEPRSLDLQKRRLYEEQGGKCAYSLQPLDSDRLCEDDYVEADHILPYSRSFDNSLSNKVLVLTGPNRDKGNRTPYEYFGADEERWHRFEVWVGSSPGLRQGKRMRLLRKHFGDEEAKEFRKRNLTDTRSICRTFKAMLETHLRWHPDAEGDERCVVVAGQLTSLLRARWGLVKVRTDGDLHHALDAAVVAATSSSLVKRMADYSRRRELERVRASYVDFETGEVLDRAALRQLEEHFPQPWEHFWREVNGWLSANPAQALEGLPQYPDEQLQAIKPIRVSRAPTRHGLGAAHQETIRSIGRQGALMEQGQSSVKTPVKDLTLEDLPNIVGADDPRNADLVRVLRERLEAFGGNGETAFAANQPRIYKPSAPEKKAPEIRSVKLLSTQKSGLLVRGGIAKNGDMLRADIFTKGGKFYAVPLYVADTTQAELPNRAIVASKDEDEWLEMDQSYLFLFSLYPNDWVRITLKSEIREGYYAGVHRGTGAISYWAHDRNQSVGKKGLFEGNGIQRAVSVDKFHVDLLGHLHKAAQEARQPLLMKKSERRS

SEQ ID NO: 2988 - protein, 1138 aa, unidentified
  REGION 1..1138: note = Description of Unknown: Cas Enzyme sequence
MADKYKLSEPFTIGLDIGIASVGWAVLGENRIIDLGVRCFDKAETAKEGESLNFARRSARLMRRRLRRRAWRLTKLARLLKREGLIADVGVLKQQPSKGFSTPNLWRLRVEGLDRKLNNEEWARIIYHICKHRGFHWTIKAEAKAADSDKEGGKVKQGLSGTKRLMLEKSYRSAAEMVLAEFPDAQRNKQGEYSKALSRELLADELKLLFSKQRELGNAHVSEALEAQILGNEDKKSGLFWAQKPALSGEALLKMLGKCTFERDEFRAPKASFTAERHVLLTRINNLRIVEDGKSRGLTPDERRIALHQPYQQAGDFKYRQLGSALVNAGYLVKGEYKFAGLSYPRENDEKAKNPEDAVLAKLPAWQELKKTLTSARLESEWKQVSEAALNGKPELLDQIAWVISVYKEDDEVARKLAELDLPNKEKMIEALQLVRFDKFSNLSLKALRKIVPHMENGMRYDEACEEAGYRHSMPDVQDWDAKAKYLPPLYSGRDKQGRMVFNEEMDIPCNPVVLRALNQSRKVVNALIRKYGAPHAVHIEMARDLSRPMDERRKIERAQADYRTKNEDGRKAFAKEFGFEPKGRQFEKYMLYREQQGKCAYSLEALELDRVLNDQGYAEVDHALPYSRSFDDSKNNRVLVLTSENRNKGNQTPFEYMDGKSDSEQWRRFEVFVNGNKAYRQAKRNRLLKKDFGESEARDFRERNLNDTRYICRFFKNYVEQYLQLHEDSDAKRCVVVSGQLTSLLRFRWGINKVRSESDRHHALDAAVVAACSHGFVKRMSDYARRKELKNVRDRIEKVDAKTGEILDHFPMPWDHFRQELLARLNIDDPDELRAVASNLGTYPQVELDLIRPLFVSRAPQRRNSGPAHKETIYGQPESLKEKGSVTQKVAVSSLKPTDVDKLIDPDRNRKLYAYLRKWLEGKDVREKKAKEIEKSAKSEKRGLSAGEKAEIEKLRALPRKPDKEGNPTGPIVRSVTMRIDKLSGIPVRGGIAKNDTMLRVDVFEKENKFYLIPVYVYHLAKKALPDRAAKANTPREEWTLIDDSYAFCFSLYPNDLIRLKNKKEDYFGYFVGMGITTASLSIKSHDNNQAVATGKAWQGTWVNLGVKTGIECFQKFNVDALGNAYPALPEVRRELA

SEQ ID NO: 2989 - protein, 1087 aa, unidentified
  REGION 1..1087: note = Description of Unknown: Cas Enzyme sequence
MKYIIGLDMGIASVGYATLLLDDKEQPCRILKMNSRIFEAAEHPKDGSSLAAPRRINRGMRRRLRRRRFRKEQIRDLIAEKGIMTTEEIDEIYNSGKELSDIYEIRAEALDRILSKEEFVRLMIHLSQRRGFKSNRKVDASDSKSESGKLLIAVKNNRELLSEKGYRTIGEMLYKDERFAANKRNKADDYSNTFSRAEYEDEINQIFEAQLALGNPYATDDFRKKYLDIYLSQRAFDDGPGGKSPYAGNQIEKMLGHCTFEENELRAVKASYSFEYFNLLSKVNAIKIVGEGGKRSLTDAERKSVIALAFAKNSVTYASLRRELKLPDGKFFNISYGKGDKSAEEVEKKTKFAYLTAFHTFKKAYGQAYVGWSTEKKNALAYALTVYKNDNKIIAYLTDHNFEKAEIEIALTLPSFTKTGNLSVKALDKLIPYLEQGMLYNEACSAAGYNFKADDASKRMFLPANAKDAPELEELRNPVVRRAVSQTIKVINAVIRECGESPTFVNIEIARELAKDFKDRKQIEREQKENQEKNEKLMERLRNEFHILKPTGQDLIKLKLWEEQDGRCPYSQKPISIEKLFDVGYTDIDHIIPYSICFDDTYNNKVLVLSAENRMKGNRLPMQYLGGKRQDDFRLWVNSAHLRKRKKDNLLRESYTEEDKNGWKKRNLQDTQYMASFMLNYLKKYLALQPSDQGRKNQIISVNGRATDYLRKRWGVQKIRENGDTHHAVDAVIIACVTQGMIKRISEYAKYKETAFQHPETKEYFDVDKKTGEVINRFPLPYPDFRKELDIRCSDDPIRLLRLYPLVQYSSGEEVKPMFVSRMPNHKVKGAAHMETIRGHFKEDGKDYSVAKVPLTSLKLKNGEIEGYFNPGSDMLLYNALKARLAQFGGDGKKAFSEPFYKPKADGSQGPLVKKVKIVNKSTLSVPVHGGTAVADNGSMVRVDVFYVENEGYYLVPVYVSDTVKRELPNRAIVAHKAYEDWKEMDENNFVFSLYPNDLIKLTFAKEMSFSLTNKGSSLPPEMKCKEIFAYYKGTNIASGTIGVINHDNTYGIGSLGIKRLPHIEKYQVDVLGNITKVGKEKRMRFR

SEQ ID NO: 2990 - protein, 1080 aa, unidentified
  REGION 1..1080: note = Description of Unknown: Cas Enzyme sequence
MLSYGIGLDIGIASVGWAVVALDNNELPYGIINMGSRIFDAAENPKDGASLALPRREARSMRRRLRRHRHRNERIRAMLVRRGILTQGSLDTLFDGQLEDIYALRVRALDQSVTAEEFARILIHLSQRRGFRSNRKAEASKEDGELLSAVSKNAERMRENGYRTAAEMFMKSEEYSEHKRNKGNSYISTVSRSMVEAEAKMIFAAQRSFGMSFASEETEGEYLSILLSQRSFDEGPGGDSPYGGNQIEKMIGKCTLEPDELRAAKASYSFEYFNLLTRINNIRIVEGGASVPLDNAQRALIVELAHKTEALDFAKLRKALELSPSQTFNLVYYRADETQEASERKQKFSFLKAYHELRRAFDKLSKGYINGMSREKRNAIAYALTAYKTEKSIRTGLENAGLTEDELNTALTIGSFSKFGHLSVKACDKLIPYLEQGMKYNDACAAAGYNFKAHDGEKRSRLLHITSDDMEPITSPVVRRAVSQTVKVINAIIRERGCSPTFVNIELAREMAKDFQERGRLKKEMDANASQNERVMEQIRELGKSQPTGQDLLKYLLWQEQDGRCAYSLKSIPIENLFDEGYAEIDHIIPYSISFDDSRRNKVLVLSKENREKSNRLPLQYLSGKRRDDFIVWVNTAVRDQKKRRNLLKEEISDADRSRFIERNLQDTKTMSSFLMNYLNDNLEFAPSDRRKKRVTAVNGAVTSYLRKRWGIRKLRANGDTHHAVDALVIACTTDSLIQRVSRYSRWHESSTVEVDPETGEVIERFPYPWPQFRKELEGRLTSDPMKNLRELNLPLYGDPEVPLRPLFVSRMPRRKVTGAAHKETIKSPAALDDGFLVVKKPLTELKLDKDGEISNYYMPQSDRLLYEALKRQLSAHGGDGKKAFTEPFHKPKNDGTPGPVVNKVKICEPSTMSVPILGGSGAADNDSMVRVDVFRVEGEGYYFVPIYVADTLKPELPNRACVGSKPYSKWKIMDDRDFIFSLYPNDLFKATSRKTLTLKLSQPDSTLPPEYCVKSELLYFKGADISTASFAATNHDNSYKARGIGIKTLENLEKYTVDVLGTYHAVGKETRQPFYKKRG

SEQ ID NO: 2991 - protein, 1104 aa, unidentified
  REGION 1..1104: note = Description of Unknown: Cas Enzyme sequence
MDTKELKYVVGLDIGITSVGWATLLLDSQDEPVRILDLNSRIFDKAEVPKTGASLAAPRRMARGVRRRLRRRKFRLYRVRQYILRHHILDKAGLECLYKPKTDIDIFALRTAGLDRLLEPEEWARILLYMAKHRGFKSNRKSTAVAGGDDGVMLKAIQQNKEVLSKYRSVGEMFDKDEKFSDHKRNKGGSYEFTVARSMLVDEIKLLFEKQRDFGLAFTEKDAEEEYIELFSAQRNFDEGPGGDSPYGGNQIEKMIGLCTFEGKNGEKRAPKASYAFMATNLWQKINQIRIIEKGTERPLTAEEAGKIDEKAWKKEAMTYKDIRSEISLGDEASFKGLPYKWTETDKEETESKAKFSWVKEYHTLRKVLDKVEKNRILQLSHDDIDNIAYIFSVYKNDDKIREALEGTDLDSKDIDVLIENLGTFSKFGHLSLKACYKILPYLEQGMVYSDACTAAGYDFRKSAQGSIADIPNPVVKRAISQTMKVLKAIKQKYGCPPVEIHIEMARELAKSFDERQKMTKSIEENQSHNERIKERLQKEFNVPYPSGQDIVKLKLYEEQNETCAYSQKHIDAAKLFHDPNYAEVDHIIPYSRSFDDTYNNKVLVLTAENRQKGNRTPMEYLSGDEARKKQFVAWVKSDIKKPRKRENLLREKFTADAENDWKARHLQDTQYISRFMLNYLQNNYELTPGNTDRRRRIIPVNGAVTAYVRKRLGISKIRENGDLHHAVDAAVIAAVTQGVVNSVSRYSKRHELQYHVDEHGNCVDLVTGELMGDAFKENHKIKGFPEPWPQFRAELEARVSENAAEAIRILNLPTYSPDEEIKTPFVSRMVRHKTTGQAHEDTVRGKSNVADNVYVKKVALTELKLKDGEIEGYYNPSSDRLLYEALKKRLEQFDGKGKDAFKEPFHKPKSDGSPGPIVKKCKVLDKINLAVPVHDGKGITKNAGGSMIRVDIFKVKKSNGGHQYYSVPIYVADTVKEALPNRAVVAYKEYDEWKIVDDKDFVFSLYPNDLLFIGGKEIKLNGTGGDTLHQGIMVQDVFLYYRGLNIAVGSIGVENSDGRYAQDSLGIKQLPIIEKYEVSVLGDLVKAMYRTRETFKHKAQRAK

SEQ ID NO: 2992 - protein, 1095 aa, unidentified
  REGION 1..1095: note = Description of Unknown: Cas Enzyme sequence
LKYAIGLDVGIASIGYAIVELNEKDLPCRILRLGTRIFESAENPKDGSSLALPRREARSMRRRLRRRRHRKERVRNLIVASGLLTSEQLSRLYDGKLPDIYQLRTEALDRELSCEELARILIHLSQRRGFKSNARAEKKGDDGKLKAAINENAAKMLEHGYRTVGEMFYKDARFAEHKRNKSNYLNTVTRDMVEAEVRMIFTRQQEFGNKSASPEIMEAFLRILLSQRSFIEGPGKPSPYSFDESLIAEKIGYCQFENEERRAPKAAYSFEYFRLLQTLNNLRLIARNGEAIPLTQEQRNIVIELAHKYEKVTFGQIRKKLNISDESIFNLARYRNGESRETSEKGIFAQMPAYHKMRSAVGNDRITLITPSQRDEIARLFTVLRNEGKIRDELEKEGIEAIDLSALLNKLDSFSQFGHLSIKALNKIIPHLEKGLKYDEACTEAGYVHTGHSSSSPSTTLSLRDLSDAMENRITSPVVRRAVSQTAKVINAIIREMGLSPVFINIELAREMSKDKAERTKLEKSMNENHKQNERYKEQIAEYKSGEPTGQDIVKFKLWNEQGGVCPYTQRQLSIERLFEPGYVDVDHIIPYSICFDDSYNNKVLVLTEENRQKGNRLPLEYLVGENRDRFIVWVQNSHLPYRKKQKLLKEKLTKEEIEDWKQRNIQDTQTIASFLHSYIKDNLAFCDFVAKRERHVTPVNGMITSVLRKRWGLNKVRADGDLHHALDAAVVACTTQGMINEISRYYEYSETIYQRGDGEGYAISARTGEVKARFPMPWNHFADELEARLSRDPQRIIQDLTHERKLTTYDANAILQVAPVFVSRMPRRKVTGAAHKETIKSLRKDGTVVRKVPLTELKIKDGEIENYYNPNSDRLLYEALKNRLLAFGGNAAKAFSEPFYKPKSDGTKGPLVKKVKLEEHPTLYVPLQNGRSAADNDSMVRVDIFYVAGEGYYFVPIYVADTLLKNLPNKAVVAAKPYDQWKEMHDSNFIFSVYPDDLLYFESNTPKTFTKTQKDSSLPDTYDSQSEYVYFKKASISTASITVATHDDTYTIASLGVKTLQKLEKWQVDMLGNRSRVGGEKRMGFGGSSCDGVS

SEQ ID NO: 2993 - protein, 1078 aa, unidentified
  REGION 1..1078: note = Description of Unknown: Cas Enzyme sequence
MNKKQVFPPYTLGLDIGMASVGAALLTDSRILALHVRAFDKAETAKEGDPLNQIRREARLTRRRIRRRAHRLLRLCRLMKRHGMIAEAVPQVFAQPGTSPWALRSDGLDKLLAPAQWAAVLYHLVKHRGFQSTRKSEAKTDEKAGQMLTGVKGNQALRDEKGYRTVGEMAAKDERFADAKRNKGGAYTHTFGRKELEEELHLLFAQQRRLNNPYAGAELESAVRDLLLARRPALAGDALLRMVGKCTFEPTEYRAPKASYSAERFVWLTKLNNLRISGLGEVRALNEGERQILRDFPFAQAKLTYKQVRQRLGLAEHDRFNNLAYRTDKDPETATLFEAKAFHALRKAYKEAGLETLWLRDACNPERLDTLAWALTCFKTDDDIRKELGDREVEATVIEAVLGESFEQFVALSLKALRSILPFMEQGQRYDEAVISAGYAHHSQIDQDAAKTRYLPPPDKNQIRNPVVYRALNQARKLLNAIVREYGPPAAIHIELARDLSKPFEERKKIEREQKAFQEDKTKARIAFLDQFGFEPKGLDLHKYRLYREQGSQCAYSQKALDINRLFDTGYAEIDHALPYSRSYDDSQNNKVLVLTNQNRDKGNRTPYEYLDGVGDSERWRQFEAWVASNKLIRKAKRDRLLRKHFGEEESKEFRDRNLNDTRYICRTFKAMVESHFQWHADASGKERCVVVAGQLTSLLRTRWGLIKVRENGDLHHALDAAVIAAANRSLVKRMGDYSRRGELEQVRERYIDPQTGEVLDLSGLRQMEERFPVPWPHFRTELLAWLSSDPVQGLNGLPDYTPEICQALRPVRVSRAPTRRGLGAAHQETIRSIGKNQRLLREGLSAVKTPLTSLKLKDLENIVGANDPRNAALMIALHERLQAHGGDGAKAFAASQPPLYKPSGAGKVAPRIRSVKLTTTQKSGLSIRNGIANNGSMLRVDIFTKAGKFYAVPIYVADTARDNLPNRAVVQGKPEAEWPEMDENHVFMFSLHPNDWVCLRYKNSPNREGYFSGLDRATGNIDIWLHDRNQSLAEKGLLRGNGIKTVLAVEKCHADVLGNLYRVHHESRQPLYRPKGK

SEQ ID NO: 2994 - protein, 1145 aa, unidentified
  REGION 1..1145: note = Description of Unknown: Cas Enzyme sequence
MTDKKNLNEPFTIGLDIGIASVGWAILGENRIIDLGVRCFDKAETAKEGESLNLTRRMARLMRRRLRRRAWRLTKLAKLLKKEGLISAVETLKKQPSKGFETPNLWKLRVDGLDQSLTDEEWARVIYHLCKHRGFHWISRAEAKAADSDKEGGKVKQGLAGTKRLMQEKSYRTAAEMVLAEFPDAQRNKQGEYSKALSRELLCEELKELFKQQRVFGNPHADEELETKIIGNGDQKSGLFWAQKPSLSGEELLKMLGKCTLEKDEFRAPKASYTAERHVLLTRINNLRIVEDGKIRGLNSEERRIALWQPYQQAGDFKYKQLGTALVKAGLLPKDGYKFAGLSYPSEVQKADKAKDPEDRVLVKLPAWQELRKTLKDAGLEGEWQAMADAALQGKPELLDDVARVLSIYKEDDEVERELNMLDLPNKRKMIEALQFIRFDKFSNLSVTALRNIVPYMEKGMRYDEACVEAGYHHSLPDLADADAKEKYLPSFYAGRDRDGRLIFNEDMDIPRNPVVLRALNQARKVVNALIKKYGSPHAVHIEMARNLSKPFDERKQIERDQLEYRSRNEKDRATFASHFDIMSSPKGRDFEKWQLYREQQGKCAYSLDPIDLNRLLEKGYVEVDHALPYSRSFDDSKNNRVLVLTRENRNKGNHTPYEYLDGENNSDRWIQFESFVKTNKAYRQAKRNRLLKKDFGESETRDFRERNLNDTRYICRFFKNYVEQYLQLHEDSDAKRCVVVSGQLTSFLRWRWGITKVRSDSDRHHALDAAVVAACGHGLVKRLSDYSRRRELEYARNVIDMATGEIVNPAMLDRLEKDFPAPWEHFRDELLSRLNIDDMAELHAAVGNLGTYSAEALDSLKPLFVSRAPQRRNSGAAHKETIYAQPDALKEKGSVTQKVGVSGLKPADVDKLIDPERNVKLYAYLRKWLEGKDDREKQAKAIEASAGRGKDRRELTTQEKSQIEMLRTLPHKPDKQGNPTGPVVRTVTMVIDKLSGVPVRGGIAKNDTMLRVDVFQHKANDKYHLVPVYVHHMVDGLPNRAIVAFKDEDEWTEMDENFNFSFSMYPNDFIKVSLKKKGFEGYYASCNRSTGAINLWSHDRNNAVGKSGMFESVGVKTSMNLKKFSVDVLGNIYPAPPEIRRELA

SEQ ID NO: 2995 - protein, 1108 aa, unidentified
  REGION 1..1108: note = Description of Unknown: Cas Enzyme sequence
PRRQARLLRRRLYRRAWRLTQLARLLKREGLIGNARFFAQSPSFTDSTWELRRQGLDRLLAPQEWARVIYHLCKHRGFHWVSKAEEAKADSDAEGGRVKKGLKDTAARLREKGYRSAAEMVLAEFPDAQRNKGGQYEKALSRVLLGEELTLLFATQRRLGNSHASERFEALILGNGDRRGGLFWQQKPALAGADLLKMLGKCTFEKDEYRAPKASFSAERHVWLTRLNNLRIVVDGRSRPLNEAERQAAILLPYQTENVKYKTLKSTLVKAGLCSDDLRFGGLAYPSRAQAEGEKTEDPEEQILARLNAWHELRKAFKQQESLWQRISTPALEGNPDLLDRVATILSVYKDGVELEQQLRLLPLPEPDACIAVLEKISFDKFSSLSLKALRRIVPLMEAGMRYDEAVAQIPEYGHHSHRISPDTVKRLYLPPFYEAQRKYVKNDRAGSMQFREDANIPRNPVVLRALNQARKVVNALIRKYGSPMAVHIEMARDLSRPLDERNKVKKAQTEFRDRNEQARAAFEKDFGYKPKAAAFEKWMLYREQLGQCAYSQHALDIQRVLDDPNYAQVDHALPYSRSYDDSKNNKVLVLTRENQNKGNRTPFEYLTSFPGGEDGPRWRAFVAWVQSNKVYRIAKRNRLLRKNYGAEESNGFIERNLNDTRYICKFFKNYVEDHLQLMERADGERNRRCVVVNGQLTAFLRARWGLTKVRGDSDRHHALDAAVVAACTHSMVKALADYSRRKELAFLKEGFADPETGEILNPMAFDRAQRHFPEPWAHFRHELHARLFTDDLAALREDMERLGSYAEEDLKRLRTLFVSRAPQRRNSGAVHKGTIYTKPNEYQCLMVEVKTKKGKQSRPATLNELKGMAIENISVFAEIGQGSSRKYRLTRDRLDDMVDAHRNERMIHALRLWLEERGDKPNKGTSNTYPRKPLKCDPKDGPFTGPEIKSVKLNAGRMTGIDLRGGLAQNAAMLRVDVFSKVGKFHLVPVYMHHRVTGLPNRAIVQGKNESEWTLIDDSFEFLFSLYPNDFVRVQQKGKPVIEGYFASAHRVTGTINLWLHDRNTVSHKQGAIEGVGVKTALSLEKFNVDVLGNIYPAPPEVRRGLA

SEQ ID NO: 2996 - protein, 1068 aa, unidentified
  REGION 1..1068: note = Description of Unknown: Cas Enzyme sequence
MPKSAKPQQTYTLGLDIGIASVGAALLGQQHIIGLHVRTFDRAETAKEGEPLNKIRRDARLTRRRLQRRAHRLLRLRRLFKRHNLIPDTDTSTFISGQSPWELRAQGLDRQLTSAEWATVLYHIVKHRGFHSNRKSEVKSDEKAGQMLSGVNQNQALLEQSGLRTMGELAARHEAFREAKRNKRGAYNHTFSRHDLEDELHLLFSRQRALGNPYTTPELEEAVHTLLMQRRPALSGTNLLKMVGHCTLEPDEFRAPKASYTAERFVWLTKLNNLRLSGSGETRSLSEPERQALLSKPFTQSKLTYKQVRKILELSDDIRFVGLHYHPAQGNGKSPENRVFFEAKAFHALRNVYKKAGLNLEWQRDSQNPEKLDNITYALTVFKEDKEAKQWLIEKGVEASIIEAVLNESFSEFVRLSIKALRKIIPHMEIGHRYDEAVKLAGYSHHSHLPQPSKTPYIPRFSKQSIANPVVSRALNQARKLVNAIVREYGPPDAVHIELARDLNKPFDERRKIEKDQEKYQKDKARDIETFQENFGFTPKGLQLTKWRLYREQSGKCAYSLKPLDINRLFEDGYVEIDHALPYSRSFNDGMNNKVLTLTAENRNKGNQTPYEYLDGASNSAQWRNFVAWVNSNKSYRASKQRNLLRKDFAAQAATEFRERHLTDTRYIAREFKRMVETHLKLNKPNQRCVVVSGQLTAYLRARWGLIKVRENGDLHHALDAAVVAACSHAMVKRLADYSRRGELQYARGHHFDPETGEIIDINALRKLDDHFPQPWTDFRRELLAWLSPDPAQQLKNLAYYTDERLKQVKPIRVSRAPTRRGLGAAHQETIRSAKYLGDNRSTVKTPLEKLKLKDIPNIVGYEDPRNHQLIQAISQRLTEHGDDGKKAFKEPLYKPGNNKSTAPVVRSVKLFTVQKSGIPVRGGIANNGNMVRVDIFTKKERYFAVPVYVSDAARNELPNKAVARGKDGWIDIDDSFSFLFSLYPNDWVSVVVKPHEAPCEGYYAGLDISTGAIHIWAHDRNRSVGKNGLMRSIGIKTAHSVEKYHVDLLGNLYRVVHETRKPLRAGK

SEQ ID NO: 2997 - protein, 1079 aa, unidentified
  REGION 1..1079: note = Description of Unknown: Cas Enzyme sequence
MDQITQKQEVLEMPSYTLGLDIGNASVGAALLGEDKILGLHVRTFDRAETAKDGVSLNLIRRESRLTRRRIHRRSHRLAMFRRFFHRLGAIDSPTSEAFMSSESPWQLRATGLDQLLESKQWVSALYHILKHRGFQSNRKSEVKSDEKAGQMLSGVTRNREMLTQSGLRTIGELIATHADFTQAKRNKGGDYSHTVSRDDLVIELGLLFECQRQFGNIYATDAVEAKVNELILNRQPTLSGERLLNMLGNCTFEPKEHRAPKASFSAEQFVWFTKLNNLRIIGDGESIGLTNEQRNLLIEMPFTQAKLTYKQVRKALSLSEDHKFNGLNYQTGDGAKDPEVASLFEAKAYHSIRKAYSGAGLDLEWDKDKSNEQTLNNIAYALSVFKDDAESRPWLLDRGISEPIIEAILDLSFSEFIRLSTKALNNILPHMRAGQRYDEAVISAGYKHHSHFTGGEKSKYLPQFEDDFTTNPVVARALNQARKLVNAIVKKYGSPTAVHIELARDLSRSFKDRQTITKDQGAYQQTKAGDITAFEELFGFTPKGVDLAKWRLYREQNGQCAYTQKPLAPYGDITKLFSPGQVEIDHALPYSRSFNNSMNNKVLVLTVENRNKANRTPYEYLSGEKESTSWRNFEAWVKSNQSYRIGKKNNLLRKNFGSESAQEFRDRHLNDTRYICKAFKGFIEQHLQLSGEREVQRCVVVSGQLTAYLRARWGLLKVREDGDLHHALDAAVVAACSRSMVKRLSDYSRKGELEHTRTQLPDPETGEIVDIAALRKLEQQFPMPWPVFRDELKAKLSDNPNKPISEKLWLGHLLEDNVQPVRVSRAPTRRGLGAAHQETIRSSRFTDELKSHVKTPLSNISLKDLPNVVGYEDPRNHAMIDAIKKRLVEHDDKSDKAFATPLYKPGKDGGQGPLIRSVKLLGTQKSGIAIRQGIANNGDMVRTDVFSDGKKYFLVPIYVSDAAKKELPNKAIIQGKVESDWTVMDETYQFLFSLHKNDWIYIQGKPKTKPFAGYYAGMDRSTGAISLWSHDRNQAEGKQGLYRSIGVKGAESFTKYHIDLLGGLHKVQEETRQPLGQH

SEQ ID NO: 2998 - protein, 1059 aa, unidentified
  REGION 1..1059: note = Description of Unknown: Cas Enzyme sequence
MELSPKHYVLGLDIGIASVGAALLADDHIEALFVRTFDKAETAKEGESLNKIRRDARLVRRRLRRRVQRLLKLRRLFKRVGLLKQQNEIFDHAVLVSPWQLRSDGLGRKLASLEWANVLYHLVKHRGFQSNRKSELKNDEDKNMGEMLCSIAENQTLLAHYRTVGEMVWKDERFTLAKRNKGGSYNHTLSRADLAAELRLLFTQQRQLGNPHAANDFEQEVMSLLMERRPMQNILHLVGKCTFEPGEYRAPKACYSSERFVWLTKLNNLKIAGIGTARPLSPEERQLLMPLPFSQSKLTYKQVRKILGLGEAERFVGLDCRGDKDPEGKIALFEAKAFHKLRDKYEKSGLVTQWQRDSRDFGRLNDLGYALTVFKEDSETKAWLTDRGFEPEVIEAVLEISFTHVIRLSLKALDKILPYMERGLRYDEAVQEAGYAHHSQIQGESRTKTIPAISRDDIANPVVYRSLNQARKLVNAIVEKYGAPHSVNIELARDLNKPLSERQRIKKDQDKYRDTKEKDYAQFIETFGLQPRGDELLKWRLYREQNGQCAYSQKPLEITRLFESGYAEIDHALPYSRSFDDGLNNKVLVHAKENRDKGNRTPCEYLRGADDTQEWQQFVAWVVANKNYRMAKRQRLLRKDFGEKEANEFRERNLTDTRYACKKFKELVETHLQLADGSESKCCVVVSGQLTAYLRARWGLNKVRSNGDLHHALDAAVVAGCTRAMVKRLADYSRCKELAMVRGEFVDPETGEVLDSTGLAKAEKHFPQPFEGFRAELEARLSPNPGALLPSLVDVPPIRVSRAPTRRGLGAAHQETIRSARHLDEEISSVKVPLTALRLKDVPRIAGGGDPRNQALIAAIEDRLRQHGDNGEKAFKEPLRRPAAPGKEDVAPLVRTVRLTDVQKSGVILPHRGGGIAKNASMLRVDIFSKSGKFFAVPLYVADAVKKELPNKAVVAFKSEAEWTVIDGSYSFLFSLHPNDWLKVTFKKDAPKEGYYSGLNISTGAISLWAHDRNSSVGKGGFMEGIGIKTALALEKCHVDMLGGLHRVQSEVRQPLRRK

SEQ ID NO: 2999 - protein, 1058 aa, unidentified
  REGION 1..1058: note = Description of Unknown: Cas Enzyme sequence
MPKPDRYTLGLDIGMASVGAALLACDHIIALFVRTFDKAETAKEGESLNKIRRDARLTRRRIRRRAHRLLRLRRLFKRISLLPTNPNNNTLSADNLSPWQLRAEGLDRRLDPQEWAAVLYHLVKHRGFLSNRKSEAKTDAKTGEMLGGVSTNQQRLSEGGYRTIGEMAWKDDRFSAAKRNKGGDYSHTFARADLVNELRSLFSCQRKFENPHTNPEFETATHELLMARRPTLSGDNLLKMVGKCTFEPTEYRAPKASHTAERFVWLTKLNNLRISGIGVTRPLTDGERQTLIHLPFSQAKLTYKQVRTKLALGEADRFVGLDYRNSKDPELAALFEAKAFHLLRKVYESAGLHQAWQRDGHDRQRLDLLAHALTVFKDDNEARQWLTVQGVEAEIIEAVLEESFDKFIRLSLKALHKILPHMEAGLRYDEAVQAAGYSHHSQIHTDSKTRYIPKISKEDIANPVVSRALNQARRLVNAIVREYGSPMAVHIELARDLNKPYDERRRIEKDQKTYKETKDKDIVDFEKRFEFTPKGLELVKWRLYREQDAQCAYSQTGFDLNRLFEPGYAEIDHALPQSRSFDNGMNNKVLVHSKHNRDKGNRTPYEYLGGDHNSPEWQHFVAWVEGNKKYRLTKRQRLLRKDFGKEEANKFRERNLTDTRYASKKFKQLVETHLQLAEESDSKRCVVLSGQLTAYLRARWVLNKVREDGDLHHALDAAVVAACSHSMVKRLSDYSRRKELEQSRGHFVDYETGEVLDLAALRRVEAHFPQPWPGFRKELEARLSPDPAATLHTLAGVAPVRVSRAPTRRGLGAAHQETIRSAKCLEDGTSSVKTSLTSLKLKDLPRIVGYNDPRNRTLITAIEQRLREHDDNGAKAFKEPLRRPAAPGKKDQAPIVRSVNLRDTQKSGLLVRDGIANNGSMLRVDIFTKGGKFFAVLLYVADTVKTELPNRAVVASKPESEWPVMDDSYAFLFSLHPNDWIKVTLKDQPLKEGYFSGLDRSTGAVSIWAHDRNSSVGKDGLMRSIGIKTALSLEKCHVDILGRLHRVHQETRQPLRHK

SEQ ID NO: 3000 - protein, 1089 aa, unidentified
  REGION 1..1089: note = Description of Unknown: Cas Enzyme sequence
MKRYAIGLDMGVASVGWAVLALDEEEKPIGIIDLGSRIFDAAEQPKTGASLAAPRREARGARRRLRRHRHRNERIRGTILRYGLLTKQELDQLFDGQLEDIYALRVRALDEPVSRQEFARILINLSQHRGFRSNRRNAVDGEDGKLLTAVNENKRIMETEAYRTVGEMLLKDKRFEEHKRNKGGDYISTVSRDMVEDEVHCIFEAQRKFGADFADKALESDYIEILLSQRSFDEGPGGNSPYGGNQIEKMIGECTFIEGEPRAAKASYSFEYFSFLEKINHIRLVNGKESVPLSEAQRKKLIELAHKSDSLNYAKIRKELSIDDDYKFNMVRYDKSSEIVEAAEKKEKLVCLKAYHQMRKAINSLSKDLFAQVTKEQRNTIATVLSLYKSSEKIEAALRAKGIEPWLIDAADKIGNFSGFGHLSIKACDMLIPYLEQGMNYNEACEAAGYNFKVHKSEEKSKYLKCCQEDFEDITSPVVRRSIAQTIKVLNAIIRKQDCSPVYINVELGRELAKNFQERNKISKENEENNKRNEAAMERLKSEYGLLNASGNDLVKFKLFQEQDGICPYSLKHIQIEHLFEPGYAEVDHIVPYSISFDNSYKNKVLVLAKENREKGNRLPMQYLTGQRKDDFVVWVNNNVKDYRKRQNLLKESISEEEKKQWKERSLQDTKYASRFMMNLINDRLLFAESTTGRKKRVTAVSGQITSTLRSRWGINKIRENGDTHHAVDAVVIACATDGMIQQISRNVRLRECQYMQHESGSLAIDSRTGEVFREFPFPWPDFRRELDARLANDPARVINDLKLPFYMNSGEPLPKPIFVSRMPKHKVTGAAHKETVKSGKHIEEGIVLVKRSLKDLKLKNGEIENYYNPDSDRLLYEALKARLQEFNGNAEKAFAEPFYKPKRDGSQGPQVKTVKLVEKTTLNVPVQNNQAVADHDSMVRVDVFYIDGDGYYLVPIYVADTLKAELPNKACVAFKNYSEWKPMSDDNFVFSLYADDLIRVEHKKEMKFALTHKESSLPPEYNTKDKLVYYTGMNIATGNISIETHDGAYKIGSLGVKTLRKFEKYTVDVLGEYHKVEKEKRMKFNIKN

SEQ ID NO: 3001 - protein, 1091 aa, unidentified
  REGION 1..1091: note = Description of Unknown: Cas Enzyme sequence
MYPYAIGFDIGIASVGWAVVALDREDKPFGIINMGSRIFDAAEQPKTGNSLAAPRREARSVRRRLRRRQHRLARIHHLLVANGVLAQAELDSLFAGKLEDIYTLRVKALDSAVSPTEFARILLHIAQRRGFRSNRKSGTSKEDGELLSAVSANRALMVEKGYRTVGEMLLKDPKYGYSKRNKGGKYIATVGRDMVEEEVHALFTAQRRLGQSFASEDLENRYLEILLSQRSFDEGPGKGSPYAGNQIENKIGKCTFEPGEPRAARASYSFEYFNLLQKVNHLRLICGSESLPLSAVQRDELIALAHKTEYLTFSRIRKELSIPANTIFNAVSYKNADDCEAAEKKIKFCYLNAYHQMRSAFNKISKNHFDTLTRVQRNEIARVLSVYKTSANIRPRLAALGLSEAEIDIAETLSFSKTSHLSVKACDKLIPFLEKGMRYNEACAAAGYDFKSHSSIERTHLLHPTPEDLSDITSPVVRRAVSQTVKVLNAIIRQQGCSPTFINIELAREMAHDRRERDQIKNEMDANHARNEKLMERIRTEYGKENPTGQDLVKFKLWEEQRGECAYSQKHIRIEHLFDPDYAEVDHIIPYSLSFDDSYKNKVLVLAEENRNKGNRLPLQYLQGKRRDDFIVWVENSIRDYKKKQRLLKEAITPEDEKNFKERNLQDTKTMSRFLLNYIGDHLEFSAFSSGRKKHITAVNGAITSYMRKRWGIQKIRENGDLHHAVDALVIACTTDGMIQQVSRYAALRECEYVQTEEGSVAVARHTGEVLKRFPYPWPEFRRELEARLGDDPVRAVISQRFPVYANGDIPVRKLFVSRMPRRKVTGPAHKEIIKSPKALNKGIVVVKRPLTDLNLDPKTGKLANYYPPRDDDRLLYNALKEALQKHGGDAAKAFAQPFHKPKSDGTPGPIVNKVKLSEPASLNVPVLKGNGVAKNGTMVRIDVFHVENDGYYFVPIYIADTLKTELPNKACTRRKPYAEWKEMDPRDFLFSLYPNDLIRVTSQKGLTLSKAQKESTLPATYETKQEMLYYISAGISVASIACRTHDSSYEIRSMGIKTLEKLEKFTVDVLGEYHKVEKEPRMPFHKKRRK

SEQ ID NO: 3002 - protein, 396 aa, unidentified
  REGION 1..396: note = Description of Unknown: Cas Enzyme sequence
MELTYKYRIYPTKQQVSDIRNICGAARFLYNKLLEDRTQHYREKRQWKKLDSKPFIEFFPFLAQTDPGALAWVVNRLDRAYRHFFFVEKTEVDRYRPEAIAKNKMDKKYALLDTDLVCYPQYKRKKDTKESYTTVLKNVNVEKKRILLPVLGRVKIAYHRQVPKDAQLLDCTILKNKAGKYFILLRLALPEAPKKELQTALGMVFVPGGPIAIRSDGYGVCIRHQTPQQTKRMEQAYKTLCRRIYGSRRYEAQRKYLASLYEKRANQRRDDLHKAARQITNAADVLYLQKPDVRKQAAQQKTARARAEIWDEAWYALYSNVRYKAEQEGKRFWGVPENFPTYHFCSGCGTFKKDPKENQWVCPECGLQMDKAVNAATNLKHMAEKYIREQRELAQR

SEQ ID NO: 3003 - protein, 956 aa, unidentified
  REGION 1..956: note = Description of Unknown: Cas Enzyme sequence
RSNRKSAAEKEDGKILAAVAENARRMEEKGYRTVGEMLLRDEAFADQKRNKGGEYRTTISRALVEDEVHKLFAAQRALGSPFAEEALEKDYLDILLSQRSFDEGPGGNSPYGGSQIERMIGHCTFFPEEPRAARAAYSFEYFSLLQKVNHLRLEKGGESLPLSEEQRRTLIELAHKTDNLDFARIRKALAIPETWRFNAVPYRLEQEAAAAEKKEKFNYLRAYHAMRSAVDRNGKGRFALIPPEQRDAIGTVLTLYKADDRVRQELATLGLEDCDIEALLTIGGFSKTGHISLKACRLLIPFLEQGMNYSDACTAAGLAFRGHEGQDRSLYLHPTEDDLADITSPVVRRAVSQTVKVINAVIRRYGSPVFVNIELARELAKDFSERKQLEKENRENRAKNERLMERIRSEYGKYNATGLDLVKLKLYEEQGGVCAYSQKQMSLQRLFEPNYAEVDHIIPYSLSFDDSYRNKVLVLTEENRNKGNRLPLQYLSGQRREDFIVWVNSAVRDYRKRQKLLKERITEEDEARFKERNLQDTKTMARFLMNYIGDHLAFAPSVKDRKKRVTAVSGSVTAYMRRRWGITKVRGDGDLHHAVDAVVIACTTDGMIREVSRYAAWRECRYMQTESGSLAVDERTGEVLREFPYPWPQFRRELEIRLSPDPARLLREIHIPYYDEHGIRPEAVFVSRMPRRKVTGAAHKDTVKSARALDEGVVLVKRPLSELKLKNGEIENYWQPESDRLLYEALKARLLAFDGNGEKAFAESFYKPRHDGSPGPLVKKVKLREPSTLNVAVHGGQGVADNDSMVRIDVFLVPGDGYYFVPIYVADTLKPELPNRACVAQKPYEAWKEMREENFLFSLYPNDLIRVRQKKSFTLSKVNVESRLPDTWETNDVLLYYVKANIASGAITCRNHDNSYEKGSLGLKKLEKLEKYTVDVLGEVHRVEQEPRMRFAQKRS

SEQ ID NO: 3004 - protein, 1115 aa, unidentified
  REGION 1..1115: note = Description of Unknown: Cas Enzyme sequence
MNDYAIGLDIGIASVGWAVLSLDSNERPNGIIDLGSRVFDAAEVPKTGASLAADRRLARSARRILRRRRHRNERIRRLIVRRGLLSKPELDDLFASYTGDIYLLRTEALDRLLNAHEFARVLVNLAQRRGFRSNRKNVDKKSDDGKMLTSVQYNYALMQERGYRTVGEMYYKDDLYAEQKHNKGGSYIGTVSRDMMLSEIKAVFEAQRSLGNPHATQEIEQEYIDIWAGQRNFDEGPGEPSPYAGNQIEKMVGRCSFYPEEYRAAKAAYSFQYFSLLQYANSLRIKTRGSERPLSEVQRSSFISLAFKKKEFSFGDVRKAFNRSLETAIEEDDLFNTVNYTRKIEIKPKKEKSAAKAVDSAEDTKTEESPSSPMDYTQRRDYMESSTKIKLLSVYHELLSTLGEAYSDLGAVEKDAVGTAFTLYKSEDKIRAYLLENRIPEALCDKALENITGFSGFGRISLRACRELIPYLEKGMVYSDACDAAGLKKSVKDMQTKYLRLQPEDVEDLTSPVVKRSVAQTVKVLNAIIRKRGKSPMFVNVELAREMSKSHKERQEFSNMIESNRKRNDGHRAELEARFKGSRISGQDMLKSWLYEEQGGKSAYSPNGTPIDYNRLLEPGYLEIDHIIPYSKSFDDTMNNKVLVFAYENRDKGNKLPLEYLTGKERETFIEYTSVSVRNMKKRANLLKPSFTQEDSQGFRERNLTDTRTVSRFILDYLQDNLAFAHSETGRRKRVTAVNGAITAFIRKQLGINKIREDGDIHHAVDAVLVGCITDSVIRAISEFSKAREEGLRNVPTFKDFPQPWDDFRAELDARTSQDPVSALERRGLLARNRYADEIKPIYVSRMSDHKVTGPAHKDTLFSKKLEYGQETYVRKKKLTDLTIQDMKNIYNRESDILLYDAIEKRLNAFGGKGKEAFKEPLYKPKADGTKGPIVKGIKIKESHTACVELPKSHGFADNDTMVCIDVYRIEGKGYYFVPVYITDVSKGIIPDKACIAHKPNDEWKIMDGKDYVFSLFRNDLIRIKLKKNDLIKLAADDKRTEMTRNRELIITDAQIEYFYYKGADITNALIKGISLDGVYVWRKGILNILSLEKCSIDVLGNITVNDKKERTLFG

SEQ ID NO: 3005 - protein, 1079 aa, unidentified
  REGION 1..1079: note = Description of Unknown: Cas Enzyme sequence
MKYGIGLDCGINSVGYCIMELNSDDEPKRIVRLNSRIFTEAENPKDGSSLAAPRREARGLRRRIRRHKHRLERIRALLVRENIVTQAELDNMFSGTLSDIYELRTAALDAPLNNIEFARVLINLAQRRGFKSNRKSEKSSSDKETGKLLSAIKKNKESIEAGGYRTVGEMLFKDERYAKHKRNKGEAYLNTVSRDMIEAEIHAVFASQRNFGMPFANEKIENEYTDIALSQRPFDLGPGEGPENCKSPYAGKQIKNMIGQCTFFPEEKRAVKASYSFQLFSLLQGINNITLVSSDGNTFPLSQEQRKTLKDYCFKTANVTYASIRKVLQIPQEYTFKNITYTDDGIEKSEKKTKFQHLKPYHEMKKVLGSAIQTLTPEELDEIGEIFTFYKDETIIIKQLEETEIDKSLYDLLLQLPTFEKAGHISTKACKMIIPFLEEGKTYDKACECAGLNFKAHTNMQKQMLLPAKSDELNDVVNPVVRRAISQTIKVVNAIIREMGTSPTYINIELARELSKSKKERDEINKKYKLNQAENERLKNEIIDNFKIKPNGQDIIKLKLWHEQDDGICPYTGVRIKYENLFDDGYAEIDHIIPYSLSFDDSFNNKILTTATQNRQKGNRIPLEYLPESEKDGFRVWVNSNIRNHRKRQNLLKEHFTEADKKEFKSRNLNDTRYLNKLLLNYINDNLLFTDFYNGKKKHVTSVNGAVTAYIRKRWGINKNREDGDLHHAVDAAVIACVTQGIINRITAYSARNEAPYDLNTETGEIKERFPLPYPNFKKELDARTTIEDEKRLKRVLMSFSNYSYDDVEKAKPCFVSRTPHRKVTGAAHEETIRSGKVEGFTVSKTELTKLKLTNGEIEGYYEPESDTLLYNALLQRLNEFGGDAKAAFADEFHKPKADGTPGPVVKKVKTIKRSSSNVKARNKNGLGVADNGSMIRIDVFYVENEGYYFVPIYVADTVKEMPNEACPFGKDKKKIMTDDDFLFSLYPNDLIKITAKKDMKFSLANKESGLPKNKYANEVLVYYSAADISNASISVIMHDNAYKFRGCGIKSLVKLEKYTVDPLGNVSKVNREKRMYFK

SEQ ID NO: 3006 - protein, 1086 aa, unidentified
  REGION 1..1086: note = Description of Unknown: Cas Enzyme sequence
MIPYAIGFDIGITSVGWAVVALDSEDKPYGIINMGSRVFDAAEQPKTGASLAAPRREARSARRRLRRHQHRLERIRRLLLTENMISQAELDTLFAGKLEDIYTLRVKALDAPVSRTEFARILLHIAQRRGFRSNRKAETAKEDGELLAAVSKNRALMVEKGYRTVGEMLLQDPLYAASKRNKGGQYIATVGRDMVAEEVHAIFRAQRQLGQPFASEKLEARYLDILLSQRSFDEGPGEGSPYAGSQIERMIGKCTLEDGEQRAAKATYSFEYFTLLQNINHLRLLRGGEGSPLTPAQRETLIALAHKTKELNFSHIRRELAIPADTTFNAVYYKNADDAEEAEKKTKFSYLKAYHQMRTAFNKLSKNHFDTLTRAQKNELGRVLSTYKTSAKIRAALLPAGLSDAELDIAETLSFSKFGHISVKACDKLIPFLEKGMKYDEACAAAGYDFKAHSGRERTQLLHPTPDDLADITSPVVRRAVAQTVKVLNAIIRERGCSPTFINLELAREMAQDFTERNQAKKSMDDNRARNERLMERIRTEYGKEHPTGQDLVKLKLWEEQHGECAYSQKHISIEHLFEPDYAEVDHIIPYSISFDDGYKNKILVLAEENRNKGNRLPLQYLQGKRREDFIVWVENTICSTPKKQRLLKEKLTSEDEKQFKERNLQDTKTMARFLLNYIGDHLAFADFAAGRKKHITAVNGAVTSYMRKRWGISKIRENGDLHHAVDALVIACTTDGMIQQVSRYAALRECEYVQTEGGSLAVSVHTGEVLKSFPYPWPEFRRELEARLGDDPRRAVISQRFPVYLNNDIPVRKLFVSRMPRRKVTGAAHKETIKSPKALQDGVVVTKRPLTSLKLDKNGEIANYYMPQSDRLLYEALKAQLIKYGGDGAKAFTQPFHKPKSDGTPGPIVNKVKLCEPTTLHVPVLKGTGVADNDSMVRIDVFYVEGEGYYFVPIYIADTLKKELPSKACVAFKPYEDWKAMSDENFIFSLYPNDLMRVTHKNKLKLTKAQKESTLPDTYETKQELLYYISANINTAAIACRTHDAAYEIKSMGIKTLEKLEKFTVDVLGEYHKVEGEPRMAFNRK

SEQ ID NO: 3007 - protein, 1097 aa, unidentified
  REGION 1..1097: note = Description of Unknown: Cas Enzyme sequence
LSLRYTLGLDIGITSVGWAVLENNIDGEPIKIERLGVRIFDKAEHPKTGASLAEPRREARGQRRTIRRKRHRKDRIKQLIQQNGIMTRVEMSEMFEHSQFETSVYELRVQALERALTKQEFVRVLIHLAQRRGYKSNSKSEEAKDKENGKVKSAISKNKRCMEKNGYRTIGEMLLNDDRFWKHNPDGTKIFVPHNHLDDYRTTVERSMVEDEIQLIFSRQRALGVSYVTAEFEEAYLEIWGSQRNFDEGPGGKSPYGGNMIEKMLGHCTFEKDEPRAAKGSYSAEYFRLLQDVNHLRLVKNNGESCALTREQKQIYIDLVMKSATASYAQLRKKLELSNDISFNMLRYGSDEIGKVERKKLGHMKFYHEMRKALNTVQKDAISTVSWEQRDEIARILLCYKSDDKRKAQLEKLDIPHDFIPALLTLSTSKTAHLSAKALRKLIPYLEKDMTYAEACKEVYGEHKSSITKKNKLSLFDIEPINNPVVRRAVSQTIRVINAVVREYGAPEVVRVELAREMGKPYDVRTQITKKQEANAKKNEELRQQIKKIKGAEPTGQDIVKFKLFQDQNGVCLYSGQNLDITRLFEAGYVDVDHIIPYSISFDDSYTNKVLVRSPENRQKGNRIPADYFKSDPARWQRFETLVNTRVHNWKKKRNLLTQALSEEQKNGFKQRNLVDTQYIARVMYNLINDHLQFAETGKYDKKRRTQAVNGAITAHVRKRLGIQKIREDGDLHHAVDAAVVACVSPGMIQKVTQYTKHRECIRKTKEGYLDTETGELMTREAYDAKYSPKFPAPWERFRQELEARLSDNPAEEIARLHLATYDSEEEIKPVFVSRKPERKTTGAAHEATLHRKADGGYIKKVPLTELTLNKQTGEIKKYYAPESDRLLYEALKKRLEEFDGNAEKAFAEPFYKPKHDGTRGPLVKKVKLYEKKTITVPVNGGNADNGRMIRVDVFYMEDDGYYYVPIYITDVVKDELPNKAVVQKKLPEDWKEMDDRDFLFSMYPNDLIYVERKEVFELTAPKGSLLDPTISKTKGFFYYRSFNSNTGSFKIYTHDSSYYKESLGGKTLSCLKKYTIDVLGNYSEVSLPEKRKPLRG

SEQ ID NO: 3008 - protein, 1092 aa, unidentified
  REGION 1..1092: note = Description of Unknown: Cas Enzyme sequence
MAYGIGLDIGIASVGYAVVALDTDENPWGIIRMGSRIFDAAENPKDGASLALPRREARSTRRRLRRHRHRIERIKNLFLRSGLLTGTDLDCLYQGQLEDIYALRVKALDEPVGKKELARILLHLAQRRGFKSNRKAESQEKEAGLLKAAVSENEKRMAENHYRTVGEMFLKDPAFAQYKRNKGGVYLTTVQRSMIAEEADIILQRQSELGNKIITRDFKEEYFSILLSQRQFDEGPGGNSPYGGNQIEKMIGICTFEDGTNGFPAEPRAAKACYSFEYFNLLQKVNHIRLLYKNESRFLDDGQRKKVIELAKTKADLNYSHIRKELGLGEEIKFNMLVYNADDIEKKTKFNFMPAYHQVKKALNAVAKGHIESYSTELLDEIGRILSTYKGDEKRTEELIKAGIAIPDVDELLKIGGLSKFGHLSLKALRKIIPFLEQGMSYDKACEAAGYNFRAHNKEKSMYLPAKAEELQDITNPVVRRAVAQTIKVVNAIIREQGESPIYVNIELAREMAKDFKERAKLTKENHENQAENERLLDRIRKEFGKSNPTGMDLVKLKLWKEQDGISPYSRKTIEVTRLFEPGYVDVDHIVPYSISFDDTYKNKVLVMSSENREKGNKLPIQYLAAKFGKDAVEAFKVWVVNSVKNYPKRQKLLKEKITEEDITGFKERNLQDTKYMARVLYNFINDRLLFAESEIGKKKRVRAVNGAITSYLRKRWGINKVRENGDKHHAVDALVIACTTDKMIQEISGYARGQELEYDPMDKESLLVDKSTGLILKRFPYPWEDFRKELMARMSDQPAEALKKLRLLYYQDKDITAIKPIFVSRMPRHKVTGAAHKATVKGARHLDEGIALYKTDLVNLKLDKNTGEIVDYYNPESDRLLYNALKTQLQKYNGDGKKAFAEPFYKPKADGTPGPLVKKVKCFEKTTLNVLVEDGTGAADNDSMVRVDVFKVEGDGYYLVPIYVADTLKETLPNKAIVAHKQYSQWKEMKEEDFLFSLYPNDLIRVQNKKDMVFTKSQKESNLPENYIAKDIIAYYKQTDISAGAIKIISNDDSYSLRGLGVKTLQRIEKYQVDVLGSYYKVKTEKRQLFH

SEQ ID NO: 3009 - protein, 1079 aa, unidentified
  REGION 1..1079: note = Description of Unknown: Cas Enzyme sequence
VAYGIGLDIGITSVGWAVVALDYEENPWGIIKMGSRIFDAAEQPKTGESLAAPRRSARGMRRRLRRHRHRLERIKNLLTKTGVLTQEELNALYIGQLEDIYKLRTRALDEEVNKKELARILLNLAQRRGFKSNRKTDKSDKENGALLSAVSENQARMAAKHYRTVGEMFYKDDAFEVHKRNKFENYLSTVQRDMIAEEAKQILAKQNGHLNLTKNFQEKYLDILLSQRNFDEGPGGNSPYGGDQIENMIGKCTFEKEEKRAPKNSYSFERFNLLQKINHIRLVTKGTSIPLNDEQRKKLLILTYGTANLEYNRIRKELGVSKETLFNMVYYKDNDIETSEKKEKFNYLKGYHEMRKALDKVAKNHIATLSIQQLNDAAYALTAYKSDKKIFAYMEKIGIAQEDIEMLLNISGFSKFGHLSVKACNKIIPYLEQGMNYDKACSAAGYEFRGQSGAKSKYLPAQTDDMEEITSPVVRRSVAQTIKVINAIIRDQSCSPTYINIELAREMAKNFQERGTANKTNEENQAKNQRLMERIKNEFHHKHPTGVDLVKLKLYEEQGGICVYSQKVIDVSRLFEPGYVEVDHIIPYSISFDDSYKNKVLVMGVENQHKSNRLPLQYMSKAQKDKFIVWVNNDVKQYRKKQILLKEQITEDDKNKFIQRNLQDTQHMSRFLYNYICNYLEFAPSETGRKKQVTAVNGAITSHMRKRWGINKNRANGDTHHAVDALVIACATDRMIQEISCYSKNRENEYARTDEGVALINRSTGEIIKRFPMPWEGFRHELDARMANRPGDALRTLRLPYYADKDLSAIKPIFVSRMPKHKVTGAAHLDTIKGIVNDQYVVLKKDLTNLKIKNGEIDNYYNPESDKLLYEALKAQLLKFDNDAKNAFAEPFYKPKADGTLGAIVGKVKIMEKSTLNVSVHNGTAVASNESMVRIDVFKVERDGYYFVPIYVADTIKKELPNMAVVANKPHDKWAKMEDKDFIFSLYPSDLIKVIHNQNMKFALINKDSDLQKEYNTKEEFVYLVKASISTGSLTVENQDATYTIPSLGIKTLKSLEKYQVDVLGNYVKVGKEKRQTFH

SEQ ID NO: 3010 - protein, 1095 aa, unidentified
  REGION 1..1095: note = Description of Unknown: Cas Enzyme sequence
MHVKQSFTPSGKRIFGLDIGIASIGWAVFEDRGLDETEKPLGRINDLGVRKFDAAERGDTGEPLNLARRTARTMRRRLARRVQRLKKLRRLLRDTGVVPNADEAHFVTPLSGTSPWLLRAEGLERQLAAAEWARVLYHLVKHRGFYTARKTEESDDNKSEGGKLTAGVKRTQALFTEKNYRTIGEMVVRDDAFASSKRNKEGEYKNSFYRKLLREELTLLFERQHALGNPHADANLYYRIDELFWTQKPALSGEAMLRLMRPCAFEKDEYRAAKSTWSAERLAWLTQLNNLRINESGVRRGLNTAERAIVINLPYQKNEVKYRHVRKALDLSPHVTFATGVDYFRKGDKAEEKKLFEAKAFHALRKTYDRHGLENVWNKRRFDPHMLDTVATCLSVYKTDGELQRELARTQCEETEITALLEVSFSGFKHLSLKALRNILPHMESGQCYNEACASAGYVHSPLFSGGTLHKLPKIAYDEIRNPVVYRALNQARKVINALIDRYGSPYAIHIELARDLSKPFDERKKIEREQKKFAERKQQLREEFKENFPCHTGEPKAKDLLKYQLYREQHGKCAFSLEPIMVDRLLEQGYVEVEHVLPYSRSFDDTQNNKVLAFTGENRNKGNRTPYEYLDGKNDSERWRAFAAWVQGNKSLRQAKRDRLLRKELGEDFENDEFAERNLNDTRFAARFLANFLKRHLCFSDPNNKTPVLTPSGGFTGFLRARWGLVKVRAQSDLHHALDACVIAAASHSLIKRVSDYHRKRERYEIIQGGHMVNVTTGEIMREVREYFPEPWGHFRDEVEARLGRDPAAAVRGLPHYDEEYIHTIRPIWVSRAPRRRSRGALHQETIRSAKYLAVSKSVLRTSLENLKLSHLSPMKKSGKANEETLVGLEDPRNAGLVEALRKRLEACDGDGKKAFAAPFHKPRRDGSNGPLVRKVKIFSVQKGGVPVRGGIADHTRMWRVDVFEKEGKYYLVPIYQSDRKKGATLPDRAATQGKKREEWTLIDASFNFRFSLCLNDMVRLATRNRTFFGYFAGMNISTAAIDIWSHDRNLQEGKEGLYQSLGVKTGILAFEKFHVDVLGQVFPAKWEVRRGLT

SEQ ID NO: 3011 - protein, 1203 aa, unidentified
  REGION 1..1203: note = Description of Unknown: Cas Enzyme sequence
MRVNQSFTPLDQFIFGFDIGIASVGWCVLGENRIVDLGVRCFDKAETAKEGESLNLARRTARLMRRRLRRRAWRLTKLARLLKREGLIDSIQSIHQPSAKSLWQLRVEGLDRKLSPEEWAHILYHLCKHRGFHWISRAEEKKAEEDSKGEGGKVKKGLQDTKRRMNEKNYRSAAEMVVQEFPDAQRNKRGEYSKALSRVLLAEELALLFRQQREYGNPHATPELEMHIVGCGDRESGLFWEQKPALPRENLLKMLGRCTFEKNEYRAPKASFTAERHVWLTKLVNLKIVVDGVTRRLQPEEVKAVVSLPYEYNSALKYRQLHSALVKKGLLSESFVFSGLTGKKDKDPLDQTLVAIPAWQAIRGTLEKAELKIEWQGIAGAATGGNPELFDRIAWVLSVFKDGDEVEQELRKLPLPGGEKMIEALSEISFDKFHNLSLKALRKIVPHMEAGLRYDEACEQAGYHHSQLFKAGEGQHKYLPPFYAGRDKDGRMVFDDKEDIPRNPVVLRSLNQARKVLNALVRRYGSPAAVHIEMARDLSRPMDERNKIKKAQDEFRDKNEKAKVDFAAEYDMPAKSREFEKFMLYREQQGKCAYSLKPLDLDRVLREQGYTEVDHVLPYSRSYDNSKNNKVLVFSRENRDKGNRTPYEYLTSFAGGENGEHWRNFVAYVESNKSYRLAKRSRLLRKNFGKDESKEFMERNLNDTRYICKFFKGYVERHLQLAEGSDSKRCTVLSGQLTAFLRARWGLTKVRGDSDRHHALDAAVVAACSHALVKRLSDYSRRKELEQAGKVIDAETGEILDPELLSKLERHFPQPWGYFREELLLRLNTDDPVLLKSEAERYGYPPEALESLRPLFVSRAPQRRNSGAAHKETIYGKNALPEQALSTAIQRVDVAQLQEKHLNMLVGGSDKRNNGLRLSLEQYLKNIKLAEEIEQNLGKGKERRKPTLEEEEHIKCLRELPRKPKKEDSSDGPYSGNIIKKVKVIITRTSGCYIRHGIAELGKVQFTKLYRLNDEFFFQPCYALNNEVIFGMEPIPVSAQDTGIRLYDNDVVRISHPNLSQCYKEIRRYKNEAGDLLIDIEAVFHDGVFFGYWAYFEPSNDRPVVQLHDSASFYLLASGKQCEETKLTIVAKEKRSKHTSSVQKVKEYEYIELNPPYDRKPLSFSLEKDIKRQIVTATRIEKFHVDTLGNTYPAPPEECRGLA

SEQ ID NO: 3012 - protein, 1067 aa, unidentified
  REGION 1..1067: note = Description of Unknown: Cas Enzyme sequence
MRYRLALDIGTNSIGWAILRLDKQGNPAELTRIGSRIYPDGRHPKTGESLGTNRREPRSQRRRRDRYLQRRDALLKYLQQYGLFPALHSSEANLLRQKNPYQLRAKGLDEALTPHELGRAIFHLNQRRGFKSNRKTDRAAANESGKIRQAVQSFEKAMEEGKVRTVGEALYQRLQQGKSTRARLQGAGAKATYDFYISRQMIEDEFDALWQAQRAWRPDLLTEEACESLRNIIFHQRKLKEPPVGRCTLLPDEPRAAKALPSSQRFRLYQEINHLKFIDLQTGEECHLNQEQRDQLAAYLERRGTAKYVDLRKQLFGREQYEKYQFTIEATALARKNLYGNTTTHKLKNAKAFGSGWHQLELAVQDKIVHKLLETEDENDLIDWLIAEHGLPPEAATHVANVSLEEGHLRLSEKAVNNHVLPPLMDGWDTDENKPLTYDQAVRAGGFEDHRIQSPDNLLDQLPYYGEILWRHCQDMPTATDPREREYGRITNPTVHIGLNQLRRLINALIRKYGRPNQVHIELARALKLSREGKAEMMRQNRLNRERNERLNEELIKVYDEKPNAANRLRLKLFKELDTLNPRCIYSGERINPHQLFTNAYQIDHILPFSKTLDDGYNNKVLVTDKANKEKGNRSVYELGQLPGYDWEQIKARAARLYYAKRKRFAPDALEQWAGNIGNFAKDGAGFLQRQLTDTAYLARVTREYLQTICPAKKIVTSPGRLTAQLRAKWGWNKLLNDDNSKNRDDHRHHAIDAVAVGLIDRSLLQKVSTRAARAKEQDAENLLKGVHEDLPWDNLREQIENALSRCVVSHKPDHNPQAQLHEATAYGIVSGPDDKGVYQVRNKIALADLMRKDFPALQNPRLAERLQRLTEGLTDAEIKETLAELSGRKDWPRKTYILRKISGVPVELKGAALSPDPERRPIHPAKLYRGGANYCYEIHQTENGKWDGELISTFVANQTPYQNFMRDKSRFEQYTFDGKPLVMRLINNDMMAVGEPGQRRILRVQKMSSGMIALCDHFEANVDSRNRDKDDPFTYIYKSPNALRAMKARKVQIDMLGRVKDPGFRD

SEQ ID NO: 3013 - protein, 1447 aa, unidentified
  REGION 1..1447: note = Description of Unknown: Cas Enzyme sequence
MTKILGLDLGTNSIGWAVVDKDGNDFTLLDKGVRIFSEGVKSEKGVESSRAAERTGYRSARKIKYRRKLRKYETLKVLSVNGMCPLTVEEVDEWKKSGFKTYPLNPEFLKWLRTNEDENINPYVFRDKASRQKVPLYEFGRALYHIAQRRGFLSNRLDQSAEGIMEEHCPVIQTAIEDLNTIDEMKTELKDYFFNTGILDESIKGGFKKDLDEGETKLKSLYNALIGIVKKNENDIAKAKDEVIARLNRKEDLGAVKRVIGEISQAMKDGNFATLGQYFFSLYSKDKIRNKYTAREEHYLKEFEILCKIQGIDGINEKEQLPEKRYVGLAKELYKAIFFQRPLKSQKGLIGKCSFEKSKSRCAISHPDFEEYRMWTYLNTIKYGTQSEKTLRFLSQDEKMSLVSKFFRKKDNFNFEDLAKELIPKGTTFGFYKSSNKNEFHYWFNYKPTDTVTGCPVSASLKNVIGENWKTKTFTYETLNSKAERVSRTVDYKDLWHLLSVSTSEVYLYEYAKDKLGLDDKASKAFSRIRLKKDFASLSLNAINKILPYVKEGLLYSHAVFMANIENIVDKEIWEDITQRKYIQDKIALIIENHIYENSLLEVVNSLIKDCKTDNCYYSKEAETTYKNDLNKKLITFFKYNKMEDAGEQQSLLDKLFPIFIEQLKAYEFIKIKRLDEKVFEFLNGESEDGQVFCMNEKRLKKLYHPSDIEVFKKKTIKDAFGNEKIVLGSPLTTSIKNPMAMRALHQLRKVLNTLIFEGQIDEKTKVHIEMARELNDANKRKGIQDYQNENKKKRDDAIKDIKKLYWEECKKEIEPTDDDLLRYQLWLEQNRSEIYEEGRNISICDIIGNNPKYDIEHTIPRSISQDNSQMNKTLCSPKFNRDIKGNKMPVELSNYLEILPRIAHWKKEAENLSREIELITRSIKGVATKEAKDKKIRRRHFLTLKRDYLKGKYERFIWEEPKVGFKNSQIPDTGIITKYAQAYLKSYFKRVESVKGGMVAEFRKIWGVQESYHENDKKYFLEKDRSKHTHHTIDAITIACMTKEKYDVLATAWTLEDKEQINEARKLLADSKPWKTFKEDLKKLEEKVLVSHHTPDNVKKQSKKIVRIRGKKQYVAETEKDANGKTVVKKDVNQKIVYKLDGKGNKIPRLQQGDTIRGSLHQDSIYGAIRNPLNNEEIRYVIRKDLESIKATDLENIVDEAVKEKVKKAIENKVLLISSNAQQKNKLNGTVWMNEEKGIVIKKVRIYANSVKNPLEIKEHSPLSKSKYKHKQKVYGQNDENYCMAIYEGFDENGKVKRNNLLINMFEAGKYLKSSNDAKKYYPIAPEKDENNFALKYLLIKGKMVLMYDKQPDELYEMTTRMLSERLFEITQLDVESSCIKLLFHQEAREKKIITESMGLKKGMKGGKNIGEQKKFPWIKISPNTFDCLVQDYDFIVTSSGGIIFK

SEQ ID NO: 3014 - protein, 1337 aa, unidentified
  REGION 1..1337: note = Description of Unknown: Cas Enzyme sequence
MAKILGLDLGTNSIGWAIRNTMTELQITHKGCRIFPKGVGEEKNNEFSLAAMRTDKRQSRRKYMRRKMRKARILKLLVLYGMCPLPEKALDAWTKYQKGKDFVYPTDEAFIEWLKINPYQARQAAIQNPSINLYHLGRAFYHMVQRRGYLSNRKDDKEKNGKVNQSIEKINDKKGEKTLGDFFATALKNGEKIRGVYTARKQYEIEFDRIVSTQQIEPSIVQSIKRELFFQRPLKSQKHTVGKCTLEKNKPRCAISHYAFEEFRMLQFLNSIKYKKAGTPDKDFIFLSHEHYELAKSKFFRKSDVSFPFEDITKEINKRSLKHNLQYDFNYPPQQKVMGCPTSAAFLNLFGSDWLQLAINYKKTDGKDGNMTINDIWHSLFNFEHNDKLLAFAKDRLSLNDEDAKKLTLIRLKQGYAALSLKAIYKILPFLRQKMLYSHAVFLANVPFLLGNDFWQTHQHRITEDIVNIIDSDKQQKRVVEITNNLIANFRREYCNAHPDYTLDDTDKQEVTQAIITELGITKWQSKSEAEQATLINKVTCLYEVQLRKGFSKGQFVKSEPLASKIQQFLKDNFSIKKPKAALYHPSAIETYPKAKPSKKDGISYLGSPRTSSVRNPMAMRTLHELRYLINELLQDEQIDSDTEIVVELARELNDKNMRKAIQNYQKEREDENETYRKEIKQIFKEQCNADIEPTENEIKKFRLWKEQEGHCMYTGLQIGICDFIGGNPLFDISHTWPRSQSFDNSLQNITLGHMVYNRVVQGTLLPSKLPNYDTEKKLNGLNCHSITPLLSIWEDNVEEFSGKYERAKYIAKIASDKESRDKAIQSKHYYKMHLDYWREKLYRFTAKEIRTSFKNSQLRDTSLITRLANQYLKTIFDKRRVVKGSITAEFRKIWGLQENYTTKQRDSHLHHTIDAIVLTFIDRDAYDKLAHYYYEEEQFGMGAQKNKPSFAMPMAGFVAQVNQLTEEVLVSHGNKNNMPKATYKKMRKNGLIQYQTATEKDAHGDTVLDKKGKPKTIFVLDEQGKKIPLYLQGDSARKSLHMDTYYGAIQRPKTDKNGSILKDENGKVLSTIQYVVRRSIADLKETDIKNIVDDTIRSMVQQQGLKGVQDKGLFLPNKNGGSIPIKKIRMFANDVKNPILLKKHTYLSKKDWKTHYHVKNESNYLLALYEGHNPKGKIERGFEIINTLEAAQLFASNQNERELVPMQNIKNFGDKDEYSLSLKQIFKIGGKVILLEKEGENIEWNDIENIKQRLYIIKGLSSTTIQNKYKYEYGSISLIYHSEARRVSDLKQLGGEFKLGDFKAKPFRSLYHTQIHCLLENQDFIMKSNGDIIPTK

SEQ ID NO: 3015 - protein, 1453 aa, unidentified
  REGION 1..1453: note = Description of Unknown: Cas Enzyme sequence
MNKILGLDLGTNSIGWALRDTGQIGNQIEKFGVLTFNKGVGLGKTGEYSYAAERTKKRSTRRLYQARKYRLWATLEHLITEGYCPLSMDDLNKWRHYNKEEARKNNNAGRVYPVDNLAFDAWIKLDFNNDGKPDYTSPYQLRHELATIKFDFTKEENRFKLGRALYHIAQRRGFKSSRKGADDTKEKEISDNETMDLQYSEKKKNKNIVELFEKYPQAKTIGSLFALLENDKVRIRENVAQYAIRENYKVEINHIFKEVQKLGLEHSLYKKLVESGNNKYDGSIFYKRPLRSQKGLIGKCTLEPNKYRAPISHPAFEIFRAWSFINNIKFKDNNNKISVWQQLPLEFRQEIYQNLFFRKSKSYFPFSEISDFLKKKGKNWSFNYSPKTTVTACPVSARLKDIFGDDYLNIRIKKTKAPKSDKYYYDIEDIWHVLFSYEDQEYVSEFAEQKLKLNEEKIKQFVIAWNATPVGYAMLSLNAINKINVFLQKGLIYTEAVLLANIPEIIGEELWKENEDLLLKEINNVINENRQQKTILNIANNLIAKHKNLESEKFGYKNNNYKLVESDFTDIQTAIEEAFGVNRWNEKTDNEKKNIFDTVKDCYQAYFTKQGIVRDAGSEERIVTILSNEKKYYKTETGYYCLPKLIDTLGEFLIDNFNIDERLLSKIYHPSEINIYPPGKPDPKDGVLKLGSPKTGSFKNPMAMRTLHELRKLMNYLIETNQIDNETRIVVEVARELNDANKRWAIEQWQKQREAENLEFAKVINSVLKDDTQSSNADNIDKVRLWFEQNEKVEQILPLFLEEIEEETQDEKGKGKKSKKKKTTEDEIIRYSEYSKKMIDKYRLWKEQNFQCLYTGKFIKLTDLFTENVIDFEHTIPRSKSFDNSLANLTVCYADYNRTVKKNQIPTQLANYEKDTKDYTAILPRLEKWKDKVERIKQQIDFWKTKTKKAADKQWKDDAIRQRHLWQMELDYWQNKLDRFTITEITSGFKNSQKVDTQLISKYAFHYLKTYFDKVDVQKGSITAEFRKIYGLQIADEKKDRSKHSHHAKDAAVLTLIPAAAKRDAILEEYYEAKESKKDFKEEPYKGFKREFIFGIDDNVLINSISNNQALTPAKRKIRKRGKEVIINGKNRWAKGDCIRGQLHQETFYGAIKPAQKGGKGNLLKDEEGNFIQEEKVRYVIRVPFKYKANANDTGFKTLDEIKKQIVDEGLKIDIEKQVNAAGGLKEAFEKGIHLLDQNGKPHGNPIRHIRVWASVSEPLKIKKQTNLSEKEYKQHYYAGNATNSYFAIYKGNKLQYSVRRNLFEVSELISGETKNPIQLFEPKVYVIKDGRSLRELTKEEIKEGKKGAELPLTYILEKDTKIIFVQKNEDLKSLSQRDILKRLYVYSNFEKDGRLNFQYHLEARNKIEETYSESEIDFSNPKPTLRFSYAKYDFLVENYDFIVDMDGTIKWK

SEQ ID NO: 3016 - protein, 1434 aa, unidentified
  REGION 1..1434: note = Description of Unknown: Cas Enzyme sequence
MNKKILGLDLGTTSIGWAYVLEGETPEQSSIEQIGVRVNPLTVDEQTNFEKGKPLSTNADRTLKRGARRNLDRYQLRRKNLMEVLIESNIIRADTPLTEIGKSTTFETWQLRAKAATEKIELEQFARVLFAINKKRGYKSSRKAKNEDEGQAIDGMAIAKKLYEENFTPGQLVFQFLQVNKKAIPDFYRSDLQAEFDKVWSTQKQFYPEIFTDTFYKTLQGKGQRATSTLFWTTYNFNIADIKDIEDSLKNENTIRLNNREKKKLQAYKWRSDAVTKQLSKEEAAFVVTEINNNLNNSSGYLGAISDRSKELFFNKETVGQNQYRQLLKDRHTSLKNQVFYRQDYLDEFETIWTEQAKHYPILTNNLKSEIRNIVIFYQRKLKSQKSLISFCEFESKEIEKNGKKINIGLRVAPRSSPLFQEFKIYQRLNDVEIRSKIDKKDRRYLTQEEKYLLFEELNTKGNLSAAKCLELLIGSSKNHELNFKELDGNRTSQALYEAYIKIIELSGHDVRDYLNVRTNKDEVELHDLTVLASKIKEMVKQIFETIEIDTEILDFNAELDGEAFEQQKSYQLWHLLYSYEGDESVSGNEKLYKLLEKKFSIKREYASPLVNIAFQDDYGSISTKAMRKIYPFIKENNYSTACELAGYRHSKHSLTKEELDSRILKNKLEPLKKNSLRNPVVEKILNQMINVVNELIYKHSKKDENGKITEYFKFDEIRIELARELKKNAAERADMTTNINAAKTAHEKIIKLLQSDFGIKNPTRNDIIRYKLYEELKDNGYKDLYTDTYIPKEILFSKQIDIEHIIPQSRLFDDSFSNKTVVYRRDNLEKGNQTAIDYIESKHSEEKLNAYKSRVEKLFELNKKNKEAGISKAKYKKLLMTGSEIGDGFIERDLRETQYIAKKAMEMLFEISRSVISTSGSITDRLREDWELINVMKEINLPKYRALGLTEMEERKYGQQVEVIKDWTKRNDHRHHAMDALTIAFTRHNHIQYLNYLNARKNEKHKQHGNIIAIEAKETEIRIDDNGDKKRVFKLPIPHFRQLAKEHLESVIVSHKAKNKVVTKNKNKIAGKSKPQEVLTPRGQLHKETVYGKYNYKEIKEEKVSGKFDAKTIEKICNPLHRQLLKQRLEANGNDPKKAFTGKNSLDKNPIFLDNEKTKMLPEKVKVGTWVHDFSIRKDITPDNFKDEKSIEKVLDEGVKTILKKRLADYGNDPKKAFADLSQNPIWLNKEKGICIKRVAISGVSNAVALNHKKDHLGRAILNSQGNPIPIDYVSTGNNHHVAVYKDENGNLQENVVSFFEAVERVNQGLLVIDKTFNQHLGWKFLFTMKQNELFVFPNERTGFNPQEIDLLDPKNKKLISPNLFRVQKFSKVFYENSAVREYVFRHHLETTVNEVKELKEVSYKNIKSLGYFDGIVKVRTNHLGDIVSVGEY

SEQ ID NO: 3017 - protein, 1456 aa, unidentified
  REGION 1..1456: note = Description of Unknown: Cas Enzyme sequence
MPSKTILGLDLGTNSIGWALIQQDFSNNYGKILGMGTRIIPMSQDILGEFDKGNSVSQTAERTRYRSVRRLRERHLLRRERLHRVLNVMGFLPEHYAAEIDFEKRLGKFKEEREPKLAYNNKTFLFKSSFEEMLADFQQLQPQVLINKKGEPALIPYDWTIYYLRKKALTQKIEKEELAWILLNFNQKRGYYQLRGEEEEENPNKLVEFHSLTVVDVIADEPQKGKPDIWYSLVLENGWIYRRSSKTPLFEWKDKTRDFIVTTDLNDDGSVKKDKEGNEKRSFRAPGEDDWTLLKKKTEQEIDKSDKTIGAYIYDALLLDAKQKIKGRLVRTIERKYYKDELRQILKKQKEFHSELQSEDLYNDCVRELYRNNEAHQLQLSKKDFEHLFLDDIIFYQRPLRSQKSSISSCTLEFRKYKDKEGAERIQYLKAIPKSNPYYQEFRVWQWMYNLSIYRKEDDKNVTADFLNNTEDWENLFSFLSNRKEIEQKPLIKYFLELKGLKGKILNSEAEKYYWNYVADRTYPCNETRTLIRTRLEKAIDNPEDFLTRDMEQQLWHIIYSVTDKTDYEKALKSFAGKHQLNEDPFVDAFKKFPPFKNEYGSFSEKAIKKLLPLLRLGKYWSWNAIDQSSKNRIEKILTGEYDENIKDRVREKALHLTAENQFQGLQLWLAQYIVYGRHSEASTTGKWTSVQDVEDYLKHFRQHSLRNPIVEQVITETLRVVKDIWEKYGNGTKDFFDEIHIELGREMKNPADKRKEITNRGLENENTNLRIKALLTELLNDANVENVRPYSPMQQEILKVYEEGVLNSDIIIDDDIIKISKSAQPSSSDLRRYKLWLEQKYRSPYTGEIIPLNKLFTPDYEIEHIIPQSRYFDDGFNNKVICESIVNKLKDNQLGYEFIKNHHGTTIETGLNKKSIRILEIKDYEDFVKQHYSKNRGKRNKLLLEDIPEKMIERQMNDTRYISKFISNILSNIVRAENNDDGINSKNLVPGNGKITGELKQDWGLNDVWNDLILPRFERMQKLRTEKDIAKGFNFVALNKNNKAIPELLPISSQKGFSKKRIDHRHHALDALVIACATRDHINLLNNQYAKSAKRNDLNKKLRIFERIAYNHPQTGERIERDIPQAFKKPWDNFTIDANIGLESIIVSFKQNLRIINRATNHYEKWVGNGTTKMKEMQQQQGTNWAIRKSMHKDTVSGKVDLKRIKVPKGKLLTATRKSIDSSFDLKTIESITDTGIQKILKNYLKSKDNNPELAFSPEGIEDMNRNIENYNDGRYHQPIFKARIFELGNKFPLGQTGNKKAKYVEAAKGTNLFFAIYINDNGKRSYETVPLNVVIERQKQGLASVPIENEGGDKLLIHLSPNDLVYIPSEEERTDMRGIDLANLTKKQKENIYKVVSFTGNQIFFVQQSVATSIVNKAEFSSLNKMERAIDGTMIKEYCQKLNIDRLGNITPAS

SEQ ID NO: 3018 - protein, 1633 aa, unidentified
  REGION 1..1633: note = Description of Unknown: Cas Enzyme sequence
MKIKNVLGLDIGTNSIGAALLKLPEHYEDYGKYGKIEWLGVRVLPDSDYKKAFELGQTNSPQVKTPAANRREKRGSRRLKHRYILRRSRLIKLFKTLGWLDESFPEDFKKAKQNNIDFKFQISDYLEISDQTYTEFYKEFGYSEEIIPNILKEIKYRKTFHKKNNPDLKLLPEDWIVYFLRNKALSKKIEIPELARIIYILNQRRGFKSSRKDLKQDTTVLPYEEFLVIKNNLNNPEYQSKTFETQFVSISKVTDVTQISDELDKKGNLKFLIKVDDPRMEAYEVARKNMPDWKDKEFTFLITQKIKKGKFEQLQPTTPGEDDWSLCTTALDEKIQKVHYPGKYFYEQLVKSHLQNKTFKIRQFPVYRKRYQSELEAIWIKQCELNPELGKLNSDKETLRKLASVLYPTQSKYSLPKLNEFLNNTLLHIISSDIIYYQRELKSQKNLINECRYEKRIGKERTEDGKFIATGKYGLKCIPKSSPLYQEFRIWQDIHNIRILKREEIIDGKIKLDIDQSKIYLDNQTKEALFELFDSKSNINETEILQLIKELHPENDIVISRKKDTPHSHRINLFSNRESLKGNETKSRYIILFKKADFNGDKILNNRDALFKLWHVDYAITSSDEKKSEKGITKALAHLLPDTPNKDKVIQLFLKLSELPKEYGAYSAMAIKKLLPLMRVGKYWKLEDINQITKNRIEKLCDGEYDESIPDDLRKKIAQWEKDNRSLDKIEDYYGLPTWLTCYVVYGTHSENEIEQCNNADEFNNKVIAQLKNNSLRNPVVEQVVRETLLLIRDLWKQLQEKNEKIDEIHIEMARELKKNSEEKQKIAEAQNKNFEERQRIKKLLKELMNDDFKLYNSEGEIEITHFTVKPNPDNLNDIQKFKLWRDLNPSTEEDWRKKVKDEKIPTEQEIKKYILWLSQNCRSPYTGKIIPLSQLYDSNKYEKEHIIPRAKLKNDSLNNLVIAERDINKAKDKELAANFISRCNGKCVYNGKEYKLLTYEEYVKHVNDAFKLNKAKRKNLLATVVPDDFIERQLNDTRYITRKVAALLRPVVGEPTKIIFTGGAITTELKQNWSLTKEWKKLMLPRFERLESITSASYIKENELDRNDIEINIPENEELDIKRIDHRHHALDALIVAATTREHIRYLNTLSAADTDEEHRKIKKAIINPVSQKIRDFKLPWEMFTKEAREKLEETLVTFKTSNKIISKPSNRYYTWKIENGKPEKKQKAQDPNKKWLAIRKSLFKEPLGSVWIKTIKEVSILKAFEIQINRQIKLKNAEKIIYEPYIYDKSARLIIKDILSKCQNDIDNPDALLKEIKAYLKKNKSGKTYILNGTAFDKIAIAEFVFYKTKRMSLNKKEYVEKLSIEKMANDLPYFNYLSEEQFETFNEQQQAYIVKAGLQVSDTKKMSPLNYLLLSHILEYNNIPKEAFSDEGLENLNKKAILYLGKEIKSITRLDGEVDVEDMFNGAFYETDKGANVYFVIYENELTKERTDFISVSAHKAIERIIKGEPIAEDREGYKKIILSPGDLVYVPTQNEIEEIKKDNLSIKELLRNKSLKEISSRVYQVKKFSGKQCYFLKSNISSLLLPYNSETKRGEFGSQNYQEFTDDKRKIVHVCYTIQTDRLGNIIFS

SEQ ID NO: 3019 - protein, 1475 aa, unidentified
  REGION 1..1475: note = Description of Unknown: Cas Enzyme sequence
MNKKVLGLDLGTNSIGWALVNYTENIQEKLFEPSDIIDIGSRIIPMDAATLSDFDNGNLRTQTAERTRYRSIRRLHERYLLRRERLHRVLYILGFLPEHYAEYIDFQKKSGKFLPNTEPKIAYSLNDETGRHEFYFKEPFAEMIQDFLRCQPELVKDGKKVPYDWTIYYLRKKALSEKISKEELAWLILYFNQKRGYYQQRGEEEDINEAKEYQKLYVVSVEDSGDKKGDATWYNVLLENGDTYKKLSRVPLDWVGKTKEFIVTSKIDKNNNEKRSYSIPTDGDWTLIKKRTEKEIDESHKTVGSYIYDTLLANPNQKIKGKLVQTIERKFYRKELNRILSKQKEFHPELNDSELYNLCIKDLYESNEAYRNSIQNKDFIYLFMDDIIFYQRPLKSKKSLIENCQYEYRTYINPKTGEAEKEYLKCMSKSHPLFEEFRLWQFLKNVRIIRREDSVDVTGLYLTDEDSYVALFDRLKEKQEVTEKSFLSLIKDAKLKDTEYAWNYGDRSLPMCPTHAEFVNRLKPVKLGDNFLTSQIEEHLWHILYSVNDKQELEQALKSFAIKYGMDNSDEFVTEFKKIKPFDKDYASYSSKAIKKLLPLMRIGKYWDEDAIEEKTRERINKIIDGEHCETINEITREKVKKELGEELSFSLFKGLPLWLACYVVYNRHSEASETTRWESPEDIDKFLKAFKQHSLRNPVVEQIVTETLRVVRDIWVKHGSLSEIHIELGREMRNPANKRQEITRMNQENENTNLRIKALLSELKNEGNDVRPESLSQQERLKIYEEGVLGSDIEIPEDIVKITRQKQPTQSEIIRYKCWLEQGYCSPYTGRPIPLGRLFTSEYDIEHIIPQARYYDDSFSNKIICESAVNKDKGSMLACEYIRQKGGKSIELGNGKSPVSVLSFDEYENFIKRNFKNSFLKKKKLLMDEIPDDFIERQMNDTRYISQYIKGLLSNIVREENEQEATSKNIILVTGVVTSKLKEDWGLNDVWNKIVTPRFERLNELTKSDNYGYWVDKQTFRTQVPEANQRGFSKKRIDHRHHAMDALVIACATRSHVNYLNNQSAKSSAKETRYDLKMKLCSKNKQGRWLFHKPWDTFTQDTQVALDNIIVSFKQNQRIINKSTNKYQKYEEGIKKSVSQISGDNWAIRKPLHKETVYGRVNMQLKKTVTLSVALDNWKMVADKEIRDKIKLLFDDKFDKKQILAYFKKVGNRYNQKDISRLEVYYFSDEKEPLVATRKTLDSSFTVKNINVVTDTGIRQILLHHLEKYQGNTEDAFSPEGIEDMNKNIRYLNNGKFHKPIYKVRVSEALGNKFNVGDRGNKKAKYVEAAQGTNLFFAVYQSGEGKRSFETVPLNVVIENLKRGENAVSSINEKGDRLLFTLSPNDLVYIPTEDQLENKISIEDVEKNKNRIYKFVSCTGNEGHFIPYYIASAIVPTTELGANNKAQRAWTGEMIKEVCLKMKIDRLGEITERI

SEQ ID NO: 3020 - protein, 1485 aa, unidentified
  REGION 1..1485: note = Description of Unknown: Cas Enzyme sequence
MEKKRVLGLDLGTNSIGWALVNYTVGIDDDNYRPSEIVNLGSRIIPMDAATLSDFNNGILKSQTSERTQYRGVRRLRERHLLRRERLLRVLNILGFLPEHYSKYIDFAKNPGKFLSETEPKITYHENRETGKPDFYYKQSFAEMLQDFAVHQPELVKDGKKVPYDWTIYYLRKKALTQKIAKEELAWLILNFNQKRGYYEQRGEDEDINEAKEYQVIKVAKVEASDDKKGDAIWYNIHLENGDIYRKLSRQPLDWEGRGKEFIVTFKVDRDGNEKRSYSIPTVDDWTLVKKRTEKQLDNSLKTVGAYIYDTLLENPNQKIKGKLIQTIERKFYRKELYLILEKQKEFHAELCDVKLYKRCIEDLYRSNEAYRNSIQARDFIYLFIDNIIFYHRPLKSKKSLIDNCQYEYRIFKNPATSDKEREYIKCMSKSHPLFEEFRLWQFLKNVTIIKNEDGRDVTASFLSDEESYVALFDRLKEKKEVDQKGFLSSIKGAKLKEADYSWNYGGRKLPMCPTHAEFISRLKRSGVDESFLSESIEEHLWHILYSVNDKMELKQALQTFAVKYGVADVALFVEKFGKMKPFEKDYASYSAKAIKKLLALMRMGRYWHENLICDKMRERINKFIDGENCAQINNAVRERVAKELGSELSINSFKGLPLWLACYVVYNRHSEASEAAKWESPEDVDAFLTAFKQHSLRNPIVEQVVTETLRVVRDVWAKYGSLSEIHIELGREMRNPVDKRRKITAQNIENENTNLRIKALLLELKNEGNNVRPESMSQQERLKIYEEGVLGSDIPIPDDIIRITHQKQPSHSEIIRYKCWLEQGYCSPYTGKPISLGKLFTSDYEIEHIIPQARYFDNSFSNKVICESAVNKDKGNMLACEYIRQKGGSKIELGNGKQASVLSFDEYENFVKRNFKNAFLKKKKMLMDEIPDSFIERQMNDTRYISRYIKGLLSNIVREEGEQEATSKKIISITGAVTAKLKEDWGMNDVWHKIVTPRFLRLNELSGTNNYGYWVDKYTFKALVPENNQRGFSKKRIDHRHHAMDALVLACTTRLHVNYLNNLSAKTETSDNEERKRRQIDQRFRMKSVLCSKTEQGRWLFNKPWDTFVQNAQAALANTIISFKQNLRVINKSTNKYQRYENGVKKLCRQTCGDNWAIRKPLHTPMPYGKIICQFEILKISDNLGKFNCIIDENVRGKVGEILKQFDNKMTNTKNFLRNNPITDIRGNTVITTAFKINVEKYRKRQPISKLSDRGQTGIKTLEKMVDFINKIVDIRLRQDLFDHLEQNNNDIDIAFSSEGIERFNSGRIKPVYRLPIAEKGVGRFQIGNRIGSKHKWGEAEKGTNLFFAVYETEEGKRVFETIPLNVAIDNLKQGKAVAASDSEKKLLFTLSPNDLVYLPTKDQLERGNIDVKDVEENKDRIYKFVSCTGNEGHFIPYYIASPIVPTTELGSNNKAQRAWTEEMIKEVCVKLKISRLGDVIGLN

SEQ ID NO: 3021 - protein, 1171 aa, unidentified
  REGION 1..1171: note = Description of Unknown: Cas Enzyme sequence
NIFSEGVKIEKGIESSKAAERTDHRSVRKHYWRRKIRKIRLLTVLSENNLCPPLKKEDLRQWRLKKLYPQDEYFMEWQRTEDKANVNPYKFRYICLTQKLDLTDITQRFILGRALYHINQRRGFLSNRKESTKESEGAVKEGISVLSEDMKAAGCEYLGEYFYQLYQKGKRIRNHYTARKEHYLKEFKAICSKQELDADLVSKLEHAIFDQRPLKSQKGQVGTCTFEKGKSRCPSSHPLYEDFRMYSFLNNIKVQVNTMFEKSERYLTDDEKQKIIPLFKRKSKRTFPFEDIAKKLAGKNNYTYNKSGEDKPYKFNYQMDIQVSGSPVNAQLEEIFGEDWLTSVCEVYTLAKNKTRFQIMNDIWHALFFYDDEDKLKQFAIRRLQLDEDQAEKFSKISLPNDYAALSLKAIRKILPYMRNYGLIYSESVFLANLVEVLPQHVWGIKEMREAAVENVINMMHSYDKSNVDALTLETCVKVFLKERYQVSDEALKKLYHPSMMELYPRQRPNDEGVFQLGSPRISSVKNPMAMHSLFRLRKVVNLMLKKGYINPDTKIHIEFSRDLNDANRRWAIQSWQRENEKDRERCRKEIEKYITNPSDTDILKYQLWEEQNHKCLYTGEEIRITDFLGDNPKYDIEHTIPRSAGGDSTKMNLTLCSSRFNRDEKKTKLPAQLAVHDDILERIKDWKEKYEELEKQIRKISTKGVSSKEEKDNKIRRRHLLSLQRDYWRGKYQRFTMTEVPEGFSRRQGTDISVISRYARMYLRSVFKQVYIVKGIATSDFRKMWGIQEEYTKKERVNHVHHCIDAITIACIGKTEYDKLAQFYHESDEYKQGRGEKPVFEKPWPSFVSDIKQIQDELIIAHYSKDNLEKYTKKNLRGKDGRIIRDQQGNKLQMKGDTSRNSLHNDKFYGAINHDGTIRYVYRTNIEDLDAKSIDNIVDPAVRGIIEAAIATHGSLKAAVNNGIWMNEEKRIPIKKVRIFRNDVKKPIELKDQRDLSDKEYKHHYYVTNDGNYMMLIFSKINNKGREIREHVVINSLEATEVIKSHKRTQNGKVAWESYYSKEGYDLIYKLKSGTMVLLYENNGDEIWDLDKRNLQRRLYIITKMKYDGRIYMMHHQEAREKKDLEEKSGLFKENEEYRPIIVNSYNQFKALVQGVDFEINDLGEIKRLI

SEQ ID NO: 3022 - protein, 1204 aa, unidentified
  REGION 1..1204: note = Description of Unknown: Cas Enzyme sequence
MERILGIDTGTNSLGWAIVDKDESVYHLVAKGTNIFSEGVKIEKGIESSKAAERTDHRSVRKHYWRRKIRKIRLLTILSEHDLCPPLKKEQLRQWRLKKVYPTEDTFMEWQRTEDKANVNPYRFRYICLTQKLDLSDLTQRFILGRALYHLNQRRGFLSNRKESTKESEGAVKEGISSLSEDIKAAGCKYLGEYFYQLYQKGEKIRNHYTARKEHYLKEFQAICEKQGFDSELVSKLEKAIFDQRPLKSQKGQVGTCTFEKGKSRCPSSHPLYEDFRMYGFINNIKIQANTLYDKDERYLTDDEKQKIIPLFKRKSKRTFPFEDIAKKLAGKNNYSYYKSGEDKPYLFNYQMDTQVSGSPVNAQLEEIFGEDWLTSVCEVYTLAKDKTRFQIMNDIWHALFFYDDEDKLKDFGRKRLQLDDVQAEMFRKISIPNDYAALSLKAIRKILPYMRNYGLIYSEAVLLANLVEVLPQHIWGIKEMRKAAIENVIGVMHSYDKNNMDGLTLEACVKAFLKDRYQVNDDDLKKLYHPSMMELYPRQRPNDDGVYQLGSPRISSVRNPMAMHSLFRLRKVVNLMLKEGYITPDTKIHIEFSRDLNDANKRWAIQVWQRENEKDRERCRKEIEKYIVSPSDTDILKYQLWEEQNHKCLYTGEEIRITDFLGDNPKYDIEHTIPRSAGGDSTKMNLTLCSNRYNRDVKKTKLPTQLAVQNEIMERIQGWKEKYEDLDKQIRKISTKGASSKEEKDNKIRRRHLLSFQRDYWRGKYQRFTMTEVPEGFSRRQGTDISVISRYARMYLKSVFKQVYIVKGIATSDFRKIWGIQEEYTKKERVNHVHHCIDAITIACIGKAEYDKLAQYYHESDEYKQGKGKKPFFEKPWLSFVSDIKQIQDELLIAHYSKDILPKQAKRYVRDSKGNKVLTQGDTARASLHNDTYYGAINRDGEVRYVVRKNLDGLDEKDIKNIVDDEVRSKVENAILLHGSLKKAMEETIWMNEEKRIPIKKVRVFSGSVTRPINIRQQRDKSRHEYKRQYHVQNDRNYMMAIYVGQDKKGKEKREFELVNNITAANFYRRSNDRVPTDNQLVPLFSKSGYELRYKLKIGTMVLLYENSPEEIWELDRKHMQKRLYKVTGMSSMVIQGKFEYGTIELVHHQNARPSSDIKKINGEYKSGEEFRPGIKMLHSQFRALVQDVDFVINDIGEVKRQI

SEQ ID NO: 3023 - protein, 1203 aa, unidentified
  REGION 1..1203: note = Description of Unknown: Cas Enzyme sequence
MDRILGIDTGTNSLGWAIVDKDDNAYHLVAKGTNIFSEGVKIEKGIESSKAAERTEHRSVRKHYWRRKIRKIRLLTILSDYDLCPRLKKEDLRQWRLKKVYPTDDTFMEWQRTEDKNNVNPYKFRYICLTQKLDLSDITQRYILGRALYHLNQRRGFLSNRKESTKETEGAVKEGISSLTEDMKVAGCEYLGEYFYQLYQKGERIRNHYTARKEHYLKEFHAICAKQELDEVLIAKLEKAIFDQRPLKSQKSQVGTCTFEKGKSRCPSSHPLYEDFRMYSLINNIKVQVNTLYDKGERYLTDEEKQKIIPLFKRKSKRTFPFEDIAKKLAGKNNYCYNKSEEEKPYKFNYQMDTQVSGSPVNAQLEELFGEDWLTSVCEVYTLADGKTHFQIMNDIWHALFFYDDEDKLKEFAKNRLQLDDGQADKFSKISIPNDYAALSLKAIRKILPYMRNYRLIYPEAVFLANLIEVLPQHVWGIKEMREAAIENVIDVMHSYDKNNLDGITLEVCVKAFLKQRYQVSDESLKKLYHPSMLELYPRQRPNIDGIFQLGSPRISSVKNPMAMHSLFRLRKVVNLMLKKGYITPETKIHIEFSRDLNDANRRWAIQAWQRENEKDRERCRKEIEKYIDNPTDTDILKYQLWEEQNHKCLYTGEEIRITDFLGKNPKYDIEHTIPRSAGGDSTKMNLTLCSNRYNRDVKKTKLPTQLASHVDILERIKGWKEKFEDIDRQIRKISTKGASSKEEKDIKIRRRHLLSLQRDYWRGKYQRFTMTEVPEGFSRRQGTDISVISRYARMYLKSVFKQVYIIKGIATSDFRKMWGIQEEYTKKERVNHVHHCIDAITIACIGKTEYDKLAQFYHDSDEYKQGRGDKPVFEKPWPSFVSDIKQIQDELLIAHYSKDIMPKQAKRYIRDSKGKKVLTQGDTARASLHNDTYYGAIGVDGEVRYVVRRSLDGLDEKDVKNIVDGEVRSKVENAILLHGSLKKALEETIWMNEEKQIPIKKVRVFTGSVTRPINIRQQRDQSKHEYKRQYHVQNDRNYMMAIYVGQDKKGKEKREFELVNNIAAANFYRRSNDRVPTDNQLVPLYSKSGYELRYRLKIGTMVLLYENNPEEIWELDKKNLQKRLYKVTGLSSLVIQKYNYGTIVLVFHQEARPSTEVKQTSGVYKSTDDFRAAIKLYHTQFNALVQGIDFEINDLGEIRRLI

SEQ ID NO: 3024 - protein, 1204 aa, unidentified
  REGION 1..1204: note = Description of Unknown: Cas Enzyme sequence
MERILGIDTGTNSLGWAIVDKDENAYNLIAKGTNIFSEGVKIEKGIESSKAAERTDHRSVRKHYWRRKVRKIRLLTILSENNLCPPVRKEDLRQWRLKKQYPSDDSFMEWQRTEDKANVNPYKFRYICLTKKLDLTDLTQRYMLGRALYHINQRRGFLSNRKESTKESEGGVKEGISSLSEDMKAAGCEYLGEYFYQLYQEGKRIRNHYTARKEHYLKEFHAICAKQELDEDLISKLEKAIFDQRPLKSQKGTVGVCTFEKGKARCPSSHPLYEDFRMYSFLNNIKVQINTLYEKGERYLTEEEKMRVIPLFKRKSKRTFLFEEIAKKLVGKNNYCYYKDDEDKPYKFNYQMDTQVSGSPVNAQLEEVFGDDWLTGACEVYTLAGGKTRFQIMNDVWHALFFYDDEDKLKEFARNRLQLDDEQAEKFSKISLPNDYAALSLKAIRKILPYLRDCGLIYSEAVFLANLVEVLPHHIWGIKEMREVAIENVINQMHSYDRNNVDGLTLEACVKAFLKERYQVSDEALKKLYHPSMLELYPRQRPNDEGIYQLGSPRISSVRNPMAMHSLFRLRKVVNLMLKKGYITPDTKIHIEFSRDLNDANRRWAIQAWQRDNEKERLRCRKEIEKYVANPSDTDILKYQLWEEQNHKCLYTGEEISITDFLGDNPRYDIEHTIPRSAGGDSTKMNLTLCSSRYNRDEKKTKLPTQLPVHEEILERIKDWKDRYEDYDRQIRKISTKGATSKEEKDSKIRRRHFLSLQRDYWRGKYQRFTMTEVPEGFSRRQGTDISVISRYARMYLRSVFKQVYIVKGIATSDFRKIWGIQEEYTKKERVNHIHHCIDAITIACIGRAEYDKLAQFYHASDEYQQGRGKKPEFEKPWPSFVSDIKQIQDELLVAHYSKDIMPKQARRYVRDSKGRRVLTQGDTARASLHNDTYYGAIESDGEVRYVVRKSLDSLDEKDVKNIVDGEVRSIVEKAILIHGSLKKALEETIWMNEEKHIPIRKVRLFANSVTRPIHIRQQRDQSRHEYKRQYHVQNDRNYMMAIYVGLDKKGKEKREFELVNNITAANFYRRSNDKVPTDSQLVPRFSQSGYELRYKLKIGTMVLLYENSPEEVWELDRNNLQKRLYKVTGLSSYVLQQRYDYGTIELVFHQDARPSSEVKKISGEFRSGEEFRSGIKMLHTQIRALVNGVDFEINDLGEIRRLM

SEQ ID NO: 3025 - protein, 1222 aa, unidentified
  REGION 1..1222: note = Description of Unknown: Cas Enzyme sequence
METNEKKRILGLDTGTNSIGWAVVDRLGDQCALVDSGVHIFTEGVKEEKGNEVSKAAERTSHRAMRRGFYRRKLRKIRLLRILSELGLCPYLSPELLSQWRLKKIYPATPEFMQWLGTDDDNAITPYRYRVICLHEKLDLTQEAQRYILGRALYHMAQRRGFRSNRKDQSNDDEKGKVKEAISDLSHKMKEEGCEYLAEYFEKLYNKGKRIRNQYTSRDKHYVEEFHAICRRQELDEDTIKRLEHVLFDQRPLKSQKHTVGHCLFEPSKSRCQMSHPDFEEMRMLQTINQIRMKTPDDDMLRPLWEDERELIVPLFLRKSKSNFDFEDIAKELAKPYIKMYGKKCYGYYKTDGDKDILFNYPMDMGIAGSPFTAGMVAALGSDWKAVIDAQYVKGDNKSLDDKVNDVWHTLSFFDNDDKLEAWLETNLGLDADTAKKVAGIKMVSAYASLSHKVIRKILPFMRGGMLYSYAVMLANIDAVLPAYVRDNDYMRQAAVDMAVGCLNEYDKKTCECTMYQWLKNFLAEKYHIGHKTLNRLYHPSDLETYPHVLPDDQGRMHLGSPRISAIRNPMAMRSLHRIRHVVNALLDKGLIDHDTEVHIELGRELNDANMRAAIRQQNKHNESERAKAKAVLKDYGVNNVSDDDIAKYILWEEQGKKCLYTGKQIGFECIFGPDPKYDIEHTIPRSRGGDSTMENLTLCDSRFNREVKKTKLPSELANADEVMQRVAFMKEKADDLQKQIRRCRTNASMDKSQKDRIIQKRHSLELQQVYWRNKYRRFEMTEVPEDFSRRQGATAGIVARYARLFLKSLFDDVSIVKGAATADFRKAWKLQSVDEKKSRDNHTHHQVDAVVIACIGRGDYQRLAASYHLNGYADRERPSVPEPWEGFVDDMRRIQAETLVSYDFTDNAPKQVRRRIRFTGSHHIKGHKPSHISESDTARLSLHMDTNYGAIEHDGEVKYVIRKPITELTSQSDIERIVDPIVREKVQAATRGLDKAPEIKTALANPIWMNEAKGIQIKKVRCFTPDVTRPLNVRKNRDISRHEYKRTGHFKNDGNYCIAIYEQVLPQGSTAKAKRSFRIINNLAAASHFKVGNRANRAELYPPVDENGYRLKAILHQGDSVLLYENSPEEVYNATAAELCRRLYVVSGISSMVITNNKYGVLQLRHSQKAGKYEKGKNGAYVVGENLRSTITMLHTQFKALIQNQDFTIDVLGKIKFLKHD

SEQ ID NO: 3026 - protein, 1239 aa, unidentified
  REGION 1..1239: note = Description of Unknown: Cas Enzyme sequence
MENTGKQRILGLDTGTNSLGWAVVDRLPYGGYELIDKGVHIFQEGVNIEKGTIEKSRAAERTEHRSLRKIYWRRKVRKIRLLAVLSNAGLCPPLSSEELHTWRVEGIYPLRNENFMRWQRTDENKGINPYAARCQCIERELDMENRIDRYLLGRALYHITQRRGFLSNRKDRTDDKNSESGKVKEGIKNLTQKIQDAGCEYLCQYFHQLYQRGERIRSCYTDRKEHYEKEFDAICKKQHLGEALVNELRKVIFEQRPLKSQRRGVAKCPFEPSKHCAPVSHPLFEEFRLWSFIRNIKMQTPADNGLRMLTDEEVNKILPLWFRKSKANFHFEDIAKTLAGKDKYCYYKSAEEKPYRFNYYLDTNVAGCPVSAQLKEIFGEEILKNRDTVDTVWHALDFFTDDMKLREWGIRHFNLTDEQADALVKIRLPQGYASLSLKAMENIVPLMRDHGMIYSAATLVAKLRDLTRDYPFDTDFDGEVDAYLKTDIEDYLTIPTDKDGKPTMTREERKQALDNKWKTHYNLSDIDIQKLYHPSMIEEYRKVEHKTKEGVYQLDSPRISALKNPMAMRSLFRMKAVVNQLLKDGTIDENTIIHIEFARELNDANRRAALRQYQAALRKEREEAVEAIKDVVPNPSDDDILKYLLWKDQGGKCVYTGKTISISALGRCTYTGREISLKALYNGTEFDIEHTVPRSMGGDTTRENLTICDAKFNREVKKNRLPSQLSEQQQAIVQANIEEWKKKYEDLGKQLRRMKGSTSGLSTKDAKDRVITKRHLLEMQRDFWKNKYKTFTISSDDVKGFTRRQGTDISVISRYGRLYLLSLFNRVDVVKGSMTAAFRKIWGIQSAYEKKNRENHVHHCIDAITIACMGKQEYDDLSAWYHADEENRSHNSGQYIPKPWQTFTEDIKNIEREILVAHYTANPMGKQTRKKLRDSQGHIIRDKQGNPRYATGDTARGVLHNDMIYGMITNSHDMDDKHAAGKRFAVKRIPLRDVDIKNVVDPIVKQVIIDAITRYGSLQNAITAEQENNDGSIWLNKEKGVLLKKVRCFQDNAINAKPIRPLRDLSEKEYKRNHYSMTNGNYMSAIYEGVDEKGKRKRTFEIRSLFEAAQAYSRNEPLVPATKDGCHLIMTLKLGDLVLLYESTPDEVRNASQKELVKRLYKITGMSDSSGLQITLRHQQEARDAGVLKNEYGNPKTGLFNAQQDIYPRRMLLHTQFNALVQGQDFEISDTGKITFKQC

SEQ ID NO: 3027 - protein, 1219 aa, unidentified
  REGION 1..1219: note = Description of Unknown: Cas Enzyme sequence
MKERILGIDTGTNSIGWAIVDYNSEAIDNKYTLIDKGVNIFQEGVKIEKGIESSKAAERTEHKHQRIGYWRRKIRKIRLLKLLIENNLCPPLSTESLRNWRSKKEYPLDDKFMEWQRTDDNENKNPYYYRNLCLTETLDLSDINNRYKIGRAIYHLNQRRGFLSNRKETSKESDGAVKEGINSITKSIQDNGMEYLGQYFYMLYQNHKKIRAKYTSRIDHYEKELLAICKKQELSEELTNELCKIIITQRPLKSQKHNIGKCVFEPSKPRCPLSHPLYEQYRMYAFINNIKMQGPKDSNLRFLTDEEKEAIIPLFLRKSKKDFKFEDIAKNLSASKKNFCYYKDKSECTYRFNYPMDTTVSTCPVIAQLSEAFEIKNDIDGWLDAACEVYTLASGKNRFEIMNDIWHVLFFFDDENRLKKFAIDKLQMDEEHASIFSKIHLPSDYASLSLKAIRKILPYMKQYGMIYSHAVFMANLPVVIKCDIDKEALLPMLPRNEAEDIIRAFYEYDPSMSALKTQEEYVKKYIAYKYNLDNDGEKNLQKLYHPSMIETFPKVRQRTEEGYYQLGSPRTSSMRNPMAMHSLFRLRHVINTLLMEGKIDEDTTIRIEFARELNDFNKRTAIRQWQNGLEKSKKEAIERIKEHFGNNYTPTSTDLLKYKLWDEQGHICIYTGKKIGLKELFNPNEYDIEHTIPRSVGGDSTDMNLTVCDSRYNREIKKAQIPSQLSDHENILERINEWKIKIEKLNKDIRKINTRGISDKNTKDSMIQKRYRLILERNYWEGKYNRFKMTEVPEGFSRRQGIDIGVISKYARLYLKSLFRNVYIVKGIATSDFRKIWGLQEEYEKKERRNHCHHAIDAITIACIGKAEYDKLAQYYHDEERHNWSMDSRKATFPKPWIGFTEDIKHIDETLLVSHYTIDNINKRTRKKIRKNGKTTGGYMQGDTARVSLHQDTYYGAIERNGEIKYVIRKPIGDIDPKNIVDDAVREKVIAAVSEYGSLKKAVEAGIWMNKDKGIKINKVRIYATQIKRPLNIRKQRDKSDKQYKRDFHVANDSNYVMGIYIGTDKKGKEKRTFELINSLDAVRFYNSDVIKQKIDLLPHEDSNGYKLKWKLKTGTLVLLYESIPDEIYDLDSNKLVKRLYKITGMSSMVVSGCNYGVLSLVYHQEARPSTEFSCKNGVYKSNEEFRPGITLLHTQFKALVQGQDFEINDLGKIKFLRR

SEQ ID NO: 3028 - protein, 1203 aa, unidentified
  REGION 1..1203: note = Description of Unknown: Cas Enzyme sequence
MEKILGIDTGTNSLGWAIVEKHEDGYKLLHKGVNIFQEGVKIEKGIESSKAAERTEHRSTRVRYYRIKIRKIRLLKLLSDNALCPPVSSEELALWRNRNIYPKNELLLQWESTDDEKYKNPYTCRYKCLNEKLDLNDTTQRYILGRALYHINQRRGFLSNRKSEDSGDDGTVKTAIDDLSKAIEDAGCEYLGEYFYKLYHKGEKIRNHYTARNDHYLKEFKAICEKQQLDSFLIKKLEDVIFFQRPLKSQKGMVGHCVFESKKTKCPASHPLFEEFRMLQFVNNIKIQTPKDDSMRPLCEEERKIVFSKFFRKSKSVFDFEDIAKELAGKNNYAYYKKPMGKPYLFNYQMDLSVSGCPITAGLMDIFGENWLESICEVYDKANGKTDLQIMNDVWHVLFDFADKEHIVEFGKKHLQLSDEEAKKFGGIKVHSDYASLSLKAIKKILPYLRLGIIYSIATFFGKLEDIVPEELWSVEDKRQQIIDELLSVISNKDNNPADTRTTEQCIKDYLISHLGVNEEDTDKLYHPSMIESYPHVPDGVNKLGSPRINSVRNPMAMRSLFRMRHVINTLLAEGKIDRDTTIHIEFARELNDFNKRQALYRYNREKEKERQKAKEEIIKLYKEQTGNDIEPTDVDILKYLLWNEQSHKCIYTDEEIGIADFLGKDPKYDIEHTIPRSVGGDSTMMNLTLCNSKFNRDIKQTSLPSQLSNHEDILLRVENWKEKYEDLDKRIRKNRTIAGMAKEAKDRRIQERNYLKLQRDYWYGKYQRFVMTEVPEGFSRRQGSGISVISKYGRLYLKSFFNRVFVVKGRATSDFRKIWGIQEVYSKKERVNHVHHCIDAIVIACIGPVEYNKLAEYYHDEENSRWYGASKAKFDSPWSTFAADINKIQQEILVAHNTIDNMAKKGKHKILLKGEKVWADGDTARASLHLDTYYGAIERDGEIKYVVRKALDDSFKVSDVKNIVDDTVKEILLAAIKEHGNLKNAIKGGIWMNKEKGIAIRKVRCFAPSVTRPVNIRKQRDLSPKEYKQQYHVMNDGNYAMAIYIGHDKKGKEKRAFEMINNLEASKYFKNSNDKESVGFNLVPLSKKDYPLAYVLKKGTMVLLYENSPEEIEECTKQDLVKRLYKVTGLSSMVVSGCDYGTITMQHSQEARPSGDLKLQKGAYKVHEEFRSKIFMYHTQIKALVEGYDFTINDIGEIKMLR

SEQ ID NO: 3029 - protein, 1199 aa, unidentified
  REGION 1..1199: note = Description of Unknown: Cas Enzyme sequence
MEKILGIDTGTNSLGWAIVEKHEDGYKLLHKGVNIFQEGVKIEKGIESSKAAERTEHRSTRVRYYRIKIRKIRLLKVLSDNALCPPVSSEELALWRNRNIYPKNELLLQWESTDDEKDKNPYTCRYKCLNEKLDLNDTTQRYILGRALYHINQRRGFLSNRKSEDSGDDGTVKTAIDDLSKAIEDAGCEYLGEYFYKLYHKGEKIRNHYTARNDHYLKEFKAICEKQQLDSFLIKKLEDVIFFQRPLKSQKGMVGHCVFESKKTKCPASHPLFEEFRMLQFVNNIKIQTPKDDSMRPLCEEERKIVFSKFFRKSKSVFDFEDIAKELAGKNNYAYYKKPMGKPYLFNYQMDLSVSGCPITAGLMDIFGENWLESICEVYDKANGKTDLQIMNDVWHVLFDFADKEHVVEFGKKHLQLSDEEAKKFGGIKVHSDYASLSLKAIKKILPYLRLGIIYSIATFFGKLEDIVPEELWSVEDKRQQIIDELLSVISNKDNNPADSRTTEQCIKDYLISHLGVNEEDTDKLYHPSMIESYPHVPDGVNKLGSPRINSVRNPMAMRSLFRMRHVINTLLAEGKIDRDTTIHIEFARELNDFNKRQALYRYNREKEKERQKAKEEIIKLYKEQTGNDIEPTDVDILKYLLWNEQSHKCIYTDEEIGIADFLGKDPKYDIEHTIPRSVGGDSTMMNLTLCNSKFNRDIKQTSLPSQLSNHEDILLRVGNWKEKYEDLDKRIRKNRTIAGMAKEAKDRRIQERNYLKLQRDYWYGKYQRFVMTEVPEGFSRRQGSGISVISKYGRLYLKSFFNRVFVVKGRATSDFRKIWGIQEVYSKKERVNHVHHCIDAIVIACIGPGEYNKLAEYYHDEENSRWYGASKAKFDSPWSTFAADINKIQQEILVAHNTIDNMAKKGKHKILLKGKKVWADGDTARASLHMDTYYGAIEHNGEIKYVVRKTLDDSFKESDVKNIVDETVKEILLAAIKKHGNLKNAIKAGIWMDKEKGIAIKKVRCFASKVQTPINIRCHRDISAKEYKQKYHVVNDGNYIMGVYIGTNKKGISKRSFEFVSNFEAAEYFKSSTNKEILGYCIVPQRSKEGYPLAFKLKIGSIVLLYANSPEEIWEDLSSFNLVNRLYKVVALDRTNQRIVIRNVQEARPAKELEKQFGAYKGSDGYIPERVLRVSQLNMLVEGFDFKMTESGTIIRLI

SEQ ID NO: 3030 - protein, 1213 aa, unidentified
  REGION 1..1213: note = Description of Unknown: Cas Enzyme sequence
MKKILGIDTGTNSLGWAIVGKDDDDRWLIDKGVDIFQEGVKVEKGIESSKAAERTDHRAQRVRYYRIKLRKIKLLRALSDNYLCPPLTSEELRAWRLKKVYPVNELFMRWQCTDDDADKTPYAFRHRCLHERLDLSSVTDRYVLGRAFYHLAQRRGFLSNRKDQASDDTGKVTKGITQLTADMREAGYEYLGDYFYELYRKGEKIRCHYTARNEHYLAEFNAICERQGLDADLASKIRHAIFDQRPLKSQKGQVGKCVFEKKKAKCPASHPRYEEYRMLAFLNNIKIKAPGDIELRPLTDGERAKVIPLFYRGTKKQFAFEDIAKKLAPKKQYGFCKRSEDRMMPYLFNYPMDTPVSGCPVTAALRGLFGDDWEQSVCEVYTLAKDKSREEIVNDVWHVLFFYSDGDKLMQFAQDRLQLSPEEAKKFAEIRLPSDYASLSLKAIRKILPYLRRGLIYSHAVFLANLGEVMPAYEWGNEAMREAAIAHVVQAMDSHDPCDGRTMEQRVKDCLRDRYHVSDKALERLYHPSMMEAYPPVRPDAQGRLRLGSPRISSVRNPMAMRSMFRLRHLVNQLLAEGCIDADTEVHIEFARELNDANMRKALESQARANQKANDAARKRIAELYKEETGRDIEPTDRDVLKYVLWEEQKHLCVYTGQQIKLADFVGDNPRFDIEHTIPRSVGGDSTRMNLTLCDSHFNRDVKKTKLPTELACHEDILVRIAPWKDTVEQLDKQIRKLKGASKGATTKDQKDSIIQRRHELELQRNYWRGKYERFTMTSVPEGFSRRQGTDISVISKYARLYLKSLFRHVYTVKGLATSDFRKIWGVQEVYSRKERVNHVHHCIDAIVIACISPDDYNKLGAYYHDEENHEWYGASKASFPKPWPTFVEDVKRVQDEILVYHHTPDNMPKQGRRRIMAEGKRVLSCGDAARGSLHKDTYYGAIEREGGVRYVKRMALADLKDAKDVEKIVDETVKAIVKQAIAEKGFKAAMDPENTIWMNEEKRIPIRKVRCYQPSVTNPLHIRQQRDVSPKEYKRQFHVANDDNYLLAVYAGKDKKGKDKRTFELVNRLQAAEFFKTSNDKEAAGHHLVPVKSQEDYPLAFTLKIGTMVLLYEKSPVEVWEATPKELNRRLYKVAGLSSMVISGNPYATIKMRHHEEARQSKDIKAKNGAYKQGEELRPAILMLHTQLRALVQGYDFEINELGEIKWLRTHD

SEQ ID NO: 3031 - protein, 1212 aa, unidentified
  REGION 1..1212: note = Description of Unknown: Cas Enzyme sequence
MTKILGIDTGTNSLGWAIVEKQADEYHLLDKGVNIFQEGVKIEKGIESSKAAERTAHKAARVRNYRIKLRKIRLLRVLSDAHLCPPLSKAELSAWRLKKEYPKNELFMQWQSTDDGSEKTPYAYRHKCLHDCLDFSCITDRYILGRAFYHMIQRRGFLSNRKDQSGDDTGKVKESISNLTQEMHDDGYEYLGDYFYSLYNKGEKIRNHYTARNEHYLAEFKAICEKQKLDKNLGPEIVRQIEKAIFDQRPLKSQKGQVGKCVFEKNKTKCPSSHPMYEEFRMLSFINNIKIQTPNDSALRPLSAEERELIMPLFFRKSKKQFDFEDIAKKLAPKKHYGFYKKSSDAEMPYLFNYPMDTSVSGCPVTAALKDIFGENWIDALCETYMLAEGKSRLDVVNDIWHALFFYTDETKLAEFAKNRLQLNDEEAKKFCEISLPSDYASLSLKAICKILPYLRNGLIYSHAVFLGNLCEVMPQYEWNIGEMRNAAIDNIIHEMNQIDSKDTRTFEVCIKEYLKEQYRVSDEKLKKLYHPSMMETYPRVLRTNNHGVYQLGSPRIDSVRNPMAMRSMFRLRKLVNRLLEEGKIDQDTEIHIEFARELNDANKRNAIAAYTKENQNNNDEARKKIRNLFKAETGNDIEPTDADVLKYVLWEEQGHICLYTGKQIRISDFVGANPKFDIEHTIPRSVGGDSTRMNLTLCDSRFNREIKKTKLPTELSNHDEIMTRINEWKEKYETLEGQIRKQKKLSKGASSKEQKDSIIRKRHLLELQRDYWRGKYLRFTMESVPDGFSRRQGTDISVISKYARLYLKSLFKHVYTVKGIATSDFRKIWGIQKVYSKKERVNHVHHCIDAIVIACIGLDEYNKLGAYYHDEENHEWYGMSKAYFKKPWSTFVEDIEKVQDEIMVYHYTPDNMPKQGRRRILIDGKKVLSKGDAARGSLHNDTYYGAIESDGVVKYVKRINLASMKENDVKNIVDDTVRGIIEAAINEKGFKEAMSSTIWMNEEKQIPIKKIRCYTPSVTKPLNIRQQRDVSSKEYKQQYHVTNDSNYLLALYIGKDKKGKEKREFEIINMLQTAQYFKTSNDKVAVGNNIVPIKSEHDYPFAYSLKIGTMVLLYEKSPNEVWDASVKERGRRMYKITGLSSMTINGCSYATINMRNHEEARLSKEVKAKNGTYKQGEEFRPAIIMLHTQLNALVQGYDFEINELGEIKRLK

SEQ ID NO: 3032 - protein, 1208 aa, unidentified
  REGION 1..1208: note = Description of Unknown: Cas Enzyme sequence
MTKILGIDTGTNSLGWAIVEKKADEYHLLDKGVNIFQEGVKIEKGIESSKAADRTAHKAARVRNYRIKLRKIRLLRILSDAHLCPPLSKVELSAWRLKKEYPKNDLFMQWQGTDDESEKTPYAYRHKCLHECLDFNSMTDRYILGRAFYHMIQRRGFLSNRKDQSGDDTGKVKESISNLTQEMHDDGYEYLGDYFYSLYNKGEKIRNHYTARNEHYLAEFKAICEKQKLDKNLGPEIVRQIEKAIFDQRPLKSQKGQVGKCVFEKNKTKCPSSHPMYEEFRMLSFINNIKIQTPNDSALRPLSAEERELIMPLFFRKSKKQFDFEDIAKKLAPKKQYGFYKKSSDAEMPYLFNYPMDTSVSGCPVTAALKDIFGDNWIDSLCETYTLAEGKSRLNVVNDIWHALFFYTDETKLAEFGKNRLQLDDEEAKKFCEISLPSDYASLSLKAICKILPYLRRGLIYSHAVFLGNLCEVMPQYEWDIEEMRNAAIVHIIHEMNQINSKDARTFEVCIKEYLKEQYHVSEEKLKKLYHPSMMEVYPRVQRTNNHGVYQLGSPRIDSVRNPMAMRSMFRLRKLVNRLLEEGKIDSDTEIHIEFARELNDANKRNAIALFTKDNQKKNDEARKKIIDIMGKDYDVKDDDILKYILWEEQGHICLYTGRQIAISDFVGTSQKFDIEHTIPRSVGGDSTRMNLTLCDSRFNRDVKKTKLPAELPNHDEIMARINDWREKYESLDGQIRKLKGKSKGATTKKQKDDIISKRHLLELQRDYWRGKYLRFMMESVPDGFSRRQGTDISVISKYARLYLKSLFKHVFTVKGIATSDFRKIWGIQKVYSKKERVNHVHHCIDAIVIACIGLDEYNKLGAYYHDEENHEWYGMSKAYFKKPWSTFVEDIKKVQDEILVYHYTPDNMPKQGRRRILIDGKKVLSKGDAARGSLHNDTYYGAIENDGVVRYVKRINLASMKESDVKNIVDDVVRGIIETAINEKGFKEAMSSTIWMNEEKQIPIKKVRCYTPSVTKPLNIRQQRDVSSKEYKQQYHVTNDSNYLLALYIGKDKKGKEKREFEIINMLQTAQYFKTSNDKVAVGNNIVPIKSEHDYPFAYSLKIGTMVLLYEKSPNEVWDASVKERGRRMYKITGLSSMTINGCSYATINMRNHEEARLSKEVKAKNGTYKQGEEFRPAIIMLHTQLNALVQGYDFEINELGEIKRLK

SEQ ID NO: 3033 - protein, 1203 aa, unidentified
  REGION 1..1203: note = Description of Unknown: Cas Enzyme sequence
MAKILGIDTGTNSLGWAIVEKTEDNYNLLDKGVNIFQEGVKKNEKGKESSKAAERTKHRSARVGYYRRKLRKIRLLRILSDNHLCPPLSQEELSTWRLKKVYPKNELFMQWQRTDDDTEKTPYAYRHKCLHEKLDLSDITDRYILGRAFYHIIQRRGFLSNRKEQGGDDSGKVKEGISTLTQEMNEAGYEYLGDYFYALYNKGEKIRKHYTARNEHFLSEFKAICDKQDLEKELGLEVVRNIEKAIFDQRPLKSQKGQVGKCVFEKNKTKCPSSHPMYEEFRMLTFINNIKIKTPNDDVLRPLNAGERESVMSLFFRKSKKQFDFEDIAKKLAPKKMYGFYKKEEDAEMPFLFNYPMDTSVSGCPVTAALKDVFGADWIDAICETYTLGEGKSRFDIVNDVWHVLYFYSDKDKLAEFAINRLQLSEDEAKRFSEISLPADYASLSLKAICKILPYLRRGLIYSHAVFFGNLCEVMPNYEWSIKEMRDAIIDNIIMEMDRYDTKDKRTFEVCIKEYLKKQYNISDESLKKLYHPSMIETYPRVQYTNEYGVYQLGSPRIDRVRNPMAMRSMFRLRKLVNRLLAEGKIDQDTEIHIEFARELNDANKRNAIALFVKENQSANEEARKKIIALFKKETGKNIEPTDKDILKYVLWEEQNHICLYTGKQIRISDFIGANPKFDIEHTIPRSVGGDSTKMNLTLCDSRFNRDVKKTKLPVDLSNHEEIMERINDWKKKYETLDFQIRKQKKLSKGATTKEKKDDIISKRHLLELRRDYWRGKYERFTMECVPEGFSRRQGTDISVISKYARLYLKSLFNRVYTVKGIATSDFRKIWGIQDIYSKKERVNHVHHCIDAVVIACIGLDEYNKLGAYYHDEENNKWYGMSKATFKKPWATFVEDIKKIQDEILVYHYTPDNMPKQGRRRIKIDGKKVLCKGDAARGSLHNDTYYGAIENDGAVKYVKRIDLASLKEGDVKNIVDDTVREIIEAAIKDKGFKDAMASTIWMNEEKRIPIKKVRCFTSVKNPLIFENRKPRDVSDKEYKRNYYVTTEGNYMIALYVGLKTNGKKKTFYEFVNIMEAARYYRTSNEKSIVGYNVVPQIKNDCHLAYILKKGTMVIFYRETVDEVWEYSSADFAKNLYYVSVIESDGRVTFKHQQEARQDKELPRTASESMDIKPKIRIGLATAKILVQGYDFEINELGEIKRLR

SEQ ID NO: 3034 - protein, 1207 aa, unidentified
  REGION 1..1207: note = Description of Unknown: Cas Enzyme sequence
MTKILGIDTGTNSLGWAIVNKEANGYHLLDKGVNIFQEGVKIEKGIESSKAAERTDHRATRVRYYRIKLRKIRLLHILSINHLCPPLSKEELSAWRLKKIYPQNELFMQWQRTDDNIDKNPYAYRHKCLHEKLDLNSISDRYILGRAFYHMIQRRGFLSNRKDQGGDDSGTVKEGISLLTKEMKEAGFLYLGDYFYFLYNKGERIRQHYTARNEHYFAEFKAICEKQNLDKELALDIERAIFDQRPLKSQKGQVGKCVFEKNKTKCPASHPLFEEFRMLTFINNIKILTPKDSDMRPLNTEERELIMPLFFRKSKKQFNFEDIAKKLAPKKQYGFYKKSSDKEMPYLFNYPMDTSVSGCPVTSALKDIFGDNWIDAICEIYTLGKNKSRLEIINDIWHALFFFSDNEKLALFAKDRLQLSDDEAKKFSEISLPSDYASLSLKAICKILPYLRRGLIYSHAVFLGNLCEVMPSYEWNTKEMREAAIDNIINEMAKYDSRDERTFEVCIKDYIKEQYHVSDESLRKLYHPSMMEAYPRVRPNKEGEFRLGSPRIDSVRNPMAMRSMFRLRKLINRLLEEGKIDQDTEIHIEFARELNDANMRQAIAAFAQNNQKENDKARKNIITLYKEETGKDIEPTASDVLKYTLWEEQNHICLYTGKQIRLSDFIGANPKFDIEHTIPRSVGGDSTKMNLTLCDSHYNRDVKKTLLPTELSNHDEILSRISSWKDKYENLDKQIRKQKGISKSASTKEQKDKAIRRRHELELERNYWRGKYERFTMESVPEGFSRRQGTDISVISKYARLYLKSLFKRVFTVKGIATSDFRKIWGIQDIYSKKERINHVHHCIDAIVIACIGLDEYNKLGAYYHDEENHEWYGTSKASFKKPWDTFVEDIKKVQDEILVYHYTPDNMPKQGRRRIKIDGKKVLCKGDAARGSLHQDTYYGAIENDGNIKYVKRITLAALKESDVKNIVDDTVRGIIEEAIKAKGFKEAIGSTIWMNKEKQIPINKVRCYTPSVTKPLNIKMQRDISPKEYKLQFHVTNDSNYLLAIYIGKDKKGKEKRDFEIINMLQAAQYYKTSNDKNAVDGNLVPIKSEHDYPFAYSLKIGTLVLLYEKSPAEILEATTIELGKRMYKIIGLSSMVINGCAYATIKMKHHEEARQSKDIKAKNGVFVNGEDYRAAIVMYHTQIKALIQGYDFEINELGEIKWLK

SEQ ID NO: 3035 - protein, 1222 aa, unidentified
  REGION 1..1222: note = Description of Unknown: Cas Enzyme sequence
MKKVLGLDLGVGSIGWCLVEKDDKNIPLRIIRMGSRIVPITKEEENGYTRGNAISKNADRTTKRTARKCYDRYQLRRKALVNLLKRCGMMPDKGLILEQSPLDLWQKRADAASKEISLEELGRVLLHINQKRGYKHSRLSNSDSKETAYVQEVNSRYDELKAEGLTVGQHFAAKLKENEQISADGKKYYNYRIKEQVYPRHAYEEEAKRILEVQSQFDTDVLTTNVCKEIFDTIFYQRDPKSCKNLVSFCEFESYTIKKNGKNITIGPKVAPRTSPLAQLSSILETANNITIRNRRNDELYISPEQRQAIANFLDNNEVMKLTDLYKILNIGRKDGWWAGKAIGKGLKGNTTKCQIRNALCKLSQEQIDKLTSFDLIFDEYVDEETGEVRKRINNSHAERQPLYRLWHLVYSIKDNDELSGALRSLGIEDEECIHNLCNLNFRTAGYANKSAKAIGRILPYLMEGMMYSEACKRAGFDHSRRVNPERELLTSLPQIQKNELRQPIVEKILNQLVNVVNALLEKEGTIDEIRVELARELKQSKDERNETYRRNNQNEKKNKEYAERIKKYELTPTRNRIMKMKMLEESEYKCMYCGQTVREKEFLQGADVEREHIIPRALLFDNSFTNQVCSCRSCNSQKGMRTAYDFIADDKGQEGLEAYIERINDLFNKKKISRSKLNRLLVSYKAYVSRKAQGKETEEDVQLWENFIDRQLRQSQYIAKKSVEILQQVCKNVYTTSGSVTDFVRHQWEYDEILHDLNFERFKKANLTTMVKQLHSGKEVEVERIKDWTKRLDNRHHAVDALAIACTTQGMIQRLNTLNASRDAMLDELNNKEQRMIDSERSMLEKWIISQPHVSYAEAKKEIDKILISLRPNTRITVPGKRYITKNGKRTLVQTGIIVPRGALHAEFVYGRIMKQEADGVTLTPQYVRKYKLGIGTQGYIFNGNETYKEELKKDKKTGLPQIVVTDKIKDVLEKIVDGGIRKRILERLNRGFEDGTDYRTNTAKALENLKNLDEDPIYSDDAKTRPIRTVRKYVNSSTMVAVRKDGNGKPVSFVEPDGNHHVAFYKDKDGVITESIVTKWQAVQRKLKHIPVIVDNPTQTWNDLVGRNDVSEELLQSLPKDNSEFMLSLQKGEAVILGLEEAAYQKAIDSNDMHTLSNHLYFVQSASLSDYRFRRHVESSFDKMGMNKEDQRFLNVKSIGAFFNYNPHKVKVTILGDIIK

SEQ ID NO: 3036 - protein, 1415 aa, unidentified
  REGION 1..1415: note = Description of Unknown: Cas Enzyme sequence
MSKILAFDPGTNSLGMVLRDTDNGNLADQVTSGVDIFRDKTERDKRGRHHSAASQRRSFRNARTRLRSVKRRKQATLKLLIKHGCCPLDMDSLNKWRFDDDEKGYDRTFPVSNESFMNWINFEFQIGNEKVRSVYRLREILATTPLDYSKPESWLMLGRAIYSIAVRRGFKSSRLDSTKSDDTENDDTQQLQKSEEELSKGLSAYMTEHNCPTVGAAFARMERVDRIRIRANEDFKPIRAMLKKEIETIFDVQRLDTDSDLYKGLMSEKKHEGTIFYKNPLKSQKGKIEYCTLEPHRRRCPKSHPANEFNVAWQLLNNIKIKREGVWEFLDIQVRQTLYQELFVRNVKHFDFKEIREKLEDIYNLTLEYRESINYSDTKSVNGCPISHYLQKIFGPDWQIEKIPGTKQHLTHADRRKGLKLEEAGHQTKYTAEDIWHICFESDEKQFVKDFAKNELNLPTAKVNSMGALWENIQDGYSNLSLCALRKINPFLERGYKYSDAVMVANLPTIMGKEAFEQHEQEILHLIEDERARIAAINRDYDIANKLISEYKSLQLEGLAFAERDYDYTLKEDDIDAVKAACAENYGREWDTMAEGDKGAIITRIAHLYQDFFFSKKRDYYKRINLSDSLKSVMMEQFPFFTKGKLNKLYHHSDNAYYAPAKYGDDGIPRLGSPAKASLANPNVLKVLYKIKQNVNKMLKSGDIDTDTIVVVENAREALNDFNMRWAIEEYNNKREREHKYIEKALNELSAELGFSIPKESVEIARLALYHNENFTPYNPNESHKFYDKLFERYKLWLRQGFIDFYTGRPISLTELFSENNLVEVDHILPISKSFDDSISNKVLSSSRYNSGVKGTKLPCQLPNYQVDTPEGTAIIHRIDDIREKVKYLENKVDYWKGRSSRAADPDAKNSAIKQMHLWQMEYDEWNKRLINLTATEITPKFRSSQLNDTRIISKYAYHYLKTVFGRVVVQRGETTAVFRKIFGFQSAYEKKDRSRHTHHAIDALTLSLIPYGPKRERMMELFYEKQEAHRFKDYALEKQLQARLDSEIRFCGLGQYSPDEIIKHIEETTLVRNDATNNALTKNVKRYRVRGKVVPQRDANGNVIYEHTAKGKRVKAKHVSQGDSIRGAIHDQTFYGKISKWKDDDVSHEKEEQFVLRRKIEYKSGDIGSGFKSWDDLKKQIVDQKLFEHLKKNAEGKDFQTACAEGLFVYVVENGEKRKVRVRHVRCKAQTAQPLKRHTFQPKDKHAEHYYYVSPGEAYGIFEYKSSDGKFIYETDNLFSLSMKMKNGELKELPCPKHIIRKGKEYTHTRTILKEDTILVYPPKEQQEDQFKLTPAEISKRLYRINSIELPNRIKLTRHNLAESFKGRDTITDDDFNNLPDGFRKSVTTLKFLLLGKDFDIINGKMVPISKTDE

SEQ ID NO: 3037 - protein, 1380 aa, unidentified
  REGION 1..1380: note = Description of Unknown: Cas Enzyme sequence
MKRILGLDLGTTSIGWALVNEAENDNETSSIVRLGVRVNPLTADEKSNFEKGKAITTNADRQKKHTARINLQRYKLRRQNLYNCLKEYGWFGNNALFEEGKASTFETYKLRAKAAEEEISLHELARVLFMLNKKRGYKSNRKANNKEDGQLFDGMTIAKKLSEEHLTPAEYSLQLLNKGKRFTQGYYRSDLNAELERIWNEQKKYYPEILTDEFKEQLKGKTKVNTNKIFLAKHHIYSADLKGSDKKMQSLKWRVEALRQQVDKEILVYVISDLNGQIANTSGLLGAISDRSKELYFNKQTVGQYLWASLEENPHISIKNKPFYRQDYLDEFEKIWETQAAFHKQLTPELKQKIRDVIIFYQRPLKSKKGLISVCELEQRKVKTVIDGKEKEITIGPKVAPKSSPVFQEFRIWQNINNLLLINNDTNEKRSLNEEERNLLYQELSIKAKLSKTDALKVLNKNGKQWELNYKEIEGNRTQAILFDCYNRIITLTGHEECNFKKLKASEIRHYVTTIFKRLGFNTDILDFNPLLEKHELEKQPMYMLWHLLYSYESDNSRTGNNSLLRKLETTFGFPEEYATVLCDVVFEDDYSNLSVKAMRNILPSLQAGDDYSQACAHAGYNHSRRSLTKDELEEKVYKDKLELLPKNSLRNPVVEKILNQMINVINTIVTEYGKPDEIRIEMARELKSSAAEREKTTRAISQANTENQRIRDILEKDFALSYISRNDIIKYKLYEELEANGFKTLYSGTYIPKEKLFSKDFDVEHIIPKARLFDDSFSNKTLEARNINIAKSNKTAFDFIKGEYGDEGAEVYKKKLDMLLSKDVISKAKYNKLLMSEADIPSEFIERDLRNTQYIAKKAYEILSELVRTVTPTTGEITNRLREDWQLVDVMKELNFEKYQKLGLAEVVEDRDGRKIKRIKDWTKRNDHRHHAMDALTIAFTKPAFIQYLNNLNARSNKSSSIYAIENKELHREDNKLKFNAPIPIHEFRAEAKRHLSAILISIKAKNKVMTQNVNKIKTKQGVIKKIQLTPRGALHNETIYGTKKRPIITMVKVGAALDEATINKISNLTIREALLKRLNEYSGNAKKAFTGKNTLDKNPIYLNAERTKTVPTLVKTIEWESFHPTRKLIDKDLNVDKVVDKCIRNILKTRLEEFNGDAKKAFSNLEENPIYLDQTKKIALKRVSIEGVLSAIPLHTLKDQAGKLIIGKDGKPVLGNYVQTSNNHHIAFYTDEKGNLQDKAVSFFEAAERKSQGLPIVDKNYNHDKGWRFLFTMKQNEYFVFPNEATGFIPTEVNLMDEANYDMISPNLYRVQKVSRIEKGASTSRDYWFRHHLETILNDDSRLKNSAFKRINSLKPLEGIIKVRINSIGKIVAVGEYD

SEQ ID NO: 3038 - protein, 1436 aa, unidentified
  REGION 1..1436: note = Description of Unknown: Cas Enzyme sequence
MKTILGLDLGTNSIGWALVKEAEKESEQSEIIKLGVRVNPLTLDELQNFEKGKSITTNADRTLKRSMRRNLQRYKLRRENLIKILKENNFITDEAILSENGNFTTFETYRLRAKAATEEITLEQFARVLLMINKKRGYKSSRKAKGSDDGALIDGMEVAKILYNEHLTPGQYCLQQLQSGKKYLPDFYRSDLQQEFDRIFEKQMTFYPELLTKELQEELRGKKRDAVWAICLKAFKEKGFELVGTKRQGNTGEQKIENFVWRAKGLTDKLDLEQLVIVLQQINIQINNSSGYLGAISDRSKELFFNKITNPDGTVRAQTVGEYQMAILNNNPHASLRNMVFYRQDYLDEFNTIWEKQAAFHKELTTELKREIRDVVIFYQRPLKSQKSLISFCEFESRKIEVETDGKKKIKTVGSRVIPRSSPLFQEFKIWQILNNIEVFGKGRKNKKQKEKSLFSNIEDPLQNGGRRALYQEEKELLAEELSLRKELKKTDALKLLFDNPKELDMNFNSIQGNLTQAALFEAYKQVIELSGHEIDIEKKSANEILKVVEEIFSALGFNTDILYFDSSKPLDKQPMYKLWHLLYSFEGDNSKTGNENLIDKITELYGFDKESAKILAKVTFQDDYGSLSAKAIRKILPYLKAGNKYDVACQYAGYRHSASSLNREELNAKNYKDHLEILPKNSLRNPVVEKILNQMINVVNSIIDTYGKPDEIRIELARELKKNAKEREELSKSIAETTKLHEQYKAILSKPPFNLSYISHNDIVRYKLYEELKENGYKTLYSNTYISPANVFSGDFDIDHIIPQSRLFDDSFSNKTLELRSINIEKGNKTAYDFIKDKYGEVGGENSLDNYLIRIEDLYKKEILSRAKYNKLKMQEKDIPEGFINRDLADSQYIAKYAKTMLGELVKFVVSTTGSITDRLREDWQLVDVMKELNWEKYNSLGLTEEFMNEGGQRIRKIKDWTKRNDHRHHAMDALTVAFTKRQFIQYLNNLNARRINENHGISNTEKEEQDNVAIGAEDIPLSTRDVLGIERKYLYRDNKNKLRFVPPIPLDEFRAEAKRQLENTLISIKAKNKVTTKNINITKKKGGVNKKEQLTPRGQLHNETVYGSHKEYVVKEETVNAKFDSEKIATVANPAYRAALTERLQQFHNDPNKAFTDSNALSKKPIWLDELHTKKVPEKVKTVSFEIVYTIRKDISPDLKVDKVIDKKIRQILENRLKEFGGNAKQAFSNLEENPIWLNREKGISIKRVTIYGVNNVESLHDKKNKEGKLILDENGNKQPVDFVNTGNNHHVAIYRDAEGNLQEKVVSFFEAVNRRNLGLPVIDKNYKSDEGWEFLFSMKQNEYFVFSNEKTGFNPNEIDLLDPDNYSLISTNLFRVQKITTKDYTFRHHLETNVENNNLLKGITWIRTGLNGLSNVVKIRINHLGQIVSIGEY

SEQ ID NO: 3039 - protein, 1315 aa, unidentified
  REGION 1..1315: note = Description of Unknown: Cas Enzyme sequence
MAKVLGLDLGTNSVGWAVVEKDNDEFTLVDKGVRIFQEGVKIEKGIESSKAAERTNYRSARRLKYRRKLRKIETLIALSEYGYCPKLSKEELDLWRYKKVYPESIEFRNWWRTDDENNINPYYFRNLVVTQKLNLEQQDSRFIVGRVFYHIAQRRGFLSNRLEGTKESDGAVKKNIAHISEEKGNLTLGQYFYEKYLKGEKIRDTYTHREEHYLEEFKKICSFQNLPEEFCNAIERAIFFQRPLKSQKGLIGKCVFEKNKQRCAVSHPLFEEYRMLCFINNIKIKTPKDEKLRFLNSEEKQKILPQFFRKSKEHFDFEDLAKQISPKKQYCFYKDRSKKLEFNQFNYSMKTTVSGCPISARMKALFGSEFIDDKFKFSLNSEGSLPKKIQDAWHVLLNFDSDEKLKEYAIDKLDFDSEQIKEFLNIRLKQDFGSLSLKAIKNILPYLRESMIYSHAVFMANLDSVIPKYEWSNPATQKNISDEIKLLIVTQSEEKQIVEIVNGIIKNCRDNGECWSKEAEEYFRKDIIKQLNLYYGRNKYASFSEEKQQRIESKLANLLKNQMQKNNDRGEFAKIETIDEKLKSLIVNKFKVSKKNLCKVYHPAAIEVYKKPERSIDGKKYLGSPMVSAVRNPMAMRALHQLRKVINELIKNDIIDSTTKVNIEMARDLMNANERKAYQKWQNEREKMHKTYAEHIKEYYTSNNIMIEPSSNEILKYQLWEEQNHACLYTGNSIALSDFLGSNPKYDIEHTIPRSISFDNSQVNKTLCENKFNRAIKKNRIPFELTNHSEILARIEKWKENYENLETQISVAVRQSKGAIDKDTKDRAIQKRHKLSFEKNYWKDKYRRFEMEDVPSGFKNSQIVDTGIITKYSRMYMNTVFDKVYTVKGNTVADFRKIWGLQEEYEKKSRVNHIHHCVDAITIACITKENYEKLAKFYHDSEEMFLKGIETKPKFDKPWRTFTEDVKQVKNEVFISHYTSDNLPKKAKKQLRKRGVIQKNDNGEIKYQKGDSVRGSLHKDTYYGAIERTVLNTKGEEEKKIKYVLRKSIFALKKTDIVNIVDEVVKNKIENAIRNGILIITSSDTQQNKLEREIWMNEELQIPIKKVRIFANSVTNPIHLKEHRDKSTQRKKEYKEYVHVVNDSNYAMALYEGLDKGGKVKRDFELVSNLEAVKLINFIEDELQENSLFPSNKEIINGKLDLKCVIKIGTNVILYENAPDEVWECDAEEIVRRFYKVIGLSEQVIQKKYCYGTVVLRCNNEARQSVDMKVLDGAFKIDEEYKGIRKMNHNQLNALIEGVDFLISSTGKISRLETC

SEQ ID NO: 3040 - protein, 1510 aa, unidentified
  REGION 1..1510: note = Description of Unknown: Cas Enzyme sequence
MITLGLDIGVSSLGTAIVDTQKNQILHTGVYVFPAGKEAFGTNKEKPKNETRRVARQGRRQNYRRRLRRSQLLKFLYQLSELNSPEGDRYVPLTFEEIDAWLSWDKEGKTAARQFPDSEAFRAWMAMNPYEIRSRAVEGSITRAEFGRLLYHIIQRRGFQSSRKMKADEGAMAKGKDDIIGYTQTKSEIGEQTLGQYLYQISAKEGEPFTQREEKPRGRYTLRSMYVEEMERIWGQQSKRLGLEGLEIEGTPVKELLIGQISHDPESGELLYKSNDSVLFWQRPLRSQKHLINKCSLESRKMYDPVKQRHYIQGPRVAAVSHPTSEFHRALQVLSNVRVEGRTLYDMGLFQTSLDFLCSKNSKTIKVADLKRHLSLVSKLNYDDDQTLPGCPTIASITDLFEKGALSYHYGETDTIYIDIWQKLLFYDDERLLEKNIADYAQDKGLKLKADFAKRLEGINLVDDYGSISIHAMDNIIPFLLQGRSHTEAIFLGGVKNAFGPRYYYFEKEEQMWQELLQIINEPASKGEKIDRLIEFLSNPDEQTGLDEKRLRMKLYHPTQSVQKIEIQNRLGEVDNLRNPIVEQALWAVRRQVNALIDQMIEQTGNPNFRFDRTAIELSRDLKSSLDRRLKIRQEQEANRAENEEAVMWLRALNVQVNRDNILKYRLHKELQQQDGIARCPYTGKTINPAHLFAGNNYFQIEHIIPRSISLDDSFGNKTLCESNFNREKGNKTPYEFYSVNSSKTLWGAEDWDEITHRVRRVLPARKASRFLSKRSAQEQLEELPNKMLNDTAYMSVKAREYLTTICGDVRSVTGHITADLRRMWQLNKILGETYECAPGAVSEELIARGDTDVYALLDSESQVVNRVAPKLNLIPNPTADEIRIPVVVKGSKLYRDGKEYPKPAHLDLSGVTGEALIAYHRVGGTPHCQPLFNPKPSAKDRLVVPATINSKNQLTSDYIEALRKVKRGNYPTEPGKYWVTLQLKGEPIWELPSNKKRVAANAVRVSGRLNGNAFWSPLFETEVDSSVVNMEEHRNRTAYLNLDYDTAEFTKMLRPAPEVGEGELLLTGVANHGSLLLDQCDGKTIDVQHLNLQEQTKYYVSLRYGETISPEERVTIYPLYAKAPTPRSGEVLLEGKLFLLDKSQDLYALEPVKNRDDHRHHAVDALVIALAKQNYVTELSTYNRQDDSYRQGERLKPRFDLPWDGFREEAEQSINDILVVHKKNRVDPLSKVTRKITKNGKVYTSEGYAVRGALHMDTIYGQRKAPGQTEVGYHSRKSITEVTNMSQLNKVVDAAIRKEMLRILKEELGLDTSNSSLTFPKNAFIDEDGKTKVYLPNRNGGEPVPVKKVRLRENFSSPRCLKKQNQFVKTENNHHMLVYKTKKGKFNESIVTFWDVVERLNRGEAIFQLPEDGEKIIFKLMANDYFIIGLKKQEIISNLSNPSLLSKYLFRVTSLSSRDYRFRLVAASTDKNKHENRRIRTPNFFDPTKENIHAVEVDLNGNIRLKEDD

SEQ ID NO: 3041 - protein, 1370 aa, unidentified
  REGION 1..1370: note = Description of Unknown: Cas Enzyme sequence
MKLIFGFDLGSTSIGWAVVQEKENDTEASRILKLGVRVNPLTTDEKTNFEKGKPITTNANRRLAHGMRLNLSRYKQRRKELIKSLIRFKFISPDTVLCENGSNTTFETLRLRAKAATEEITLEELSRVLLMINKKRGYKSNRKAQPNDNGAIDNIDIAKKLYQSHLTPGESVFNNLKQGIQYIPPFYRSDLINEFNKIVDCQTQFYPHLKNIDTGSLLKAKNCDIILDGQDVQRIKQKGSPSEKKRELYCLRAQAATQQIRLEELALVLEKISSEIRNSSGYLGDISDRSKELFINNQTIGQYLMSQLDRNPNNKLKGQVFYRQDYEDEFNRIWETQARFHKELTPERLHIIRDIIIFFQRDLKSQKSNIAICEFEKQKKEITVDGKKKIIEFGPKVCPKSSPIFQEFKIWQTINNLKISNIYGEELSLSSDERQILFEELSIRKKLTCAEILKLLHKDSKCSLNYKEIQGNATISAIFDAFKEIILQSGHDNNNFNKASFKDTMLIIEPIFKMLGINTDILSLDCPTDSHSLKTCPIYQLWHLLYSYAGDNSKTGDSSLIKKLQRRYGFSKEYASIMSKISFDNDYGNLSAKAIMRILPHLRNGLQYSDACNAAGYNHSKRSLTKQDILNKVLVSQIDLLPRNSLRQPVVEKILNQLINITNALISTYGNPDEIRIELARELKKSADERAKLNSANNANEKENNSIRKLLQERFGIQNPSRNDIVRYKLYKELEHTGFKTLYSQSLITDDILFSKEIEIEHIIPQARLFDDSLSNKTLEFHNINQNKSNQTAYDYILSEFGEDYAVQYKKRIDDLLKNGKISRTKHKYLLMSETEIPTDFINRDIRETQYISRKAMEILEPATRKVVASSGAITARLREDWQLVDVMKELNWEKYKALNLTETIQDKDGRRIYKIKDWTKRNDHRHHAMDALTVAFTKPSFIQFLNNLNARSDKGNAIYAIQQKELHRNKDGKLCFNPPLPLDEFRAEAKRQLNDIFVSHKAKNKVATRNSYMTKNGKGTKIVELTPRGQLFNETTYGCVKQYETKLESVNSSFDTDKIMTVADKSYRQALMKRIEEFDGNASLAFSQKNSITKNPIYVDDSHSDTVPVKVKTVVPKPVFTQRIAVDIKLDKTKIAQILDAKIRRILTDRFYEFGEDPQKAFSNIDENPIWLNKEKGIAIKKVTIKTGISGVPIRHKRNNMGRPILNSDGNKIPSDFVVPGNNHHIAIYKDADGNIKEQAVPFYIATNRVIHKQPAVDRNFNADKGWKFLFSIKKNEYFVFPNEKTGFNPAEIDLLNPDNNKIISPNLFRVQKISSSNYYFRHHLETTVDTNNALNGTTWKHVQSLKALENIIKVRVNNIGQIVAVGEY

SEQ ID NO: 3042 - protein, 1220 aa, unidentified
  REGION 1..1220: note = Description of Unknown: Cas Enzyme sequence
MTKILGLDLGTNSIGWAITEPQNNSYTLLDCGVDIFQEGVAREKGEEKPMVQTRTNARALRRHYYRRRLRKIELLKVLIANNLCPYLSEDSLDNWRYKKQYPLDDNFILWLRSSENANPYSDRFLALTHTLNLSIKEERYTLGRALYHLSQRRGFLSNRKDADNSEDGKVKGAIKQLDEDMSAAGCTYLGEFYYKLFLAGDKIRTGDGYGYAGRIAHYEKEFNAICDKQNLSEDLQKALHRAIFFQRPLKSQKGLVGNCTFEKDKARCPISHPRFEEFRMLSFINNIKIKTPADSRLRMLNSEEIRLIEPLFYRKSKEYFDFEDIAKKLAGGKKGSYAYIADKTDAAYRFNFKMSATVSGSPMTTALRDIFGEDWLSTMSSVYLKGGWKTELQVLNDVWHILFSFNDDDKLRVWAKSNLQLNEEQADKFVKIPIKQGYAALSLNAINKILPYLQMGYRYDEAVFVANLQKSVPQEIWQNGDTRKKIIDDICTLLNEYAENPLYRHITKKQAIDNMLLDHYGIGYNESARLYEPSNIETYAQAQPNKDGVLQLGSPRTSSVRNPMAMRALFRLRSLINQLLKEGKIDKTTKINIEFARGLNDANMRSAIERYQRENEKKSIEYVSDIVRLYKEECGVEISPTEDDILRYKLWLEQNKWCLYTGEQIGICDFIGANPKYDIEHTVPRSRGGDNSQMNKTLCQSDFNRRIKREKLPAELANHAEIMTRIEQLGWDKEIEKLEKQIFGCDRSAKSATTKEIKDKAIRDRHYYRMRLNYLRGKLSRFEMAEVPDGFSNRQGVDIGIIGKYAKMYLETVFNRVYTVKGATTADFRKMWGLQEEYSKKERVNHVHHCIDAITIACIGSGMYAKWAQFQRDSERYDWHREHKPVFDKPWITFTEDVKAIADDLIISHYSANNVPKHSRKKLRVRSKVQYNAAGQPIYVQGDTARASLHQQTFYGAIKRDDEIKYVVRKAINTLQPTDVEKIVDEAVRECVKGAIAREGFKEAMSKPICFNETKGVYIKKVRIFTPSVTSPIHLKKHQMLSRFDHKQNYYVTNDGNYCMAVYEGVDAKGKTKRSFQIVNNLEAAKFYNGKTNRYDLVPQSDENGYPLKCILRTGTMVLFYENSPEELYECSRAELSKRLYKVTGMSKQVISGIYHYGLTTLKHHQEARPAGELKEKKGLWKIGEEYRPIIVINHNQLNVLVEGYDFELSVTGEIKFKHQ

SEQ ID NO: 3043 - protein, 1206 aa, unidentified
  REGION 1..1206: note = Description of Unknown: Cas Enzyme sequence
MERILGIDTGTNSLGWAIVDKEESSYRLIEKGVNIFQEGVKIEKGIESSKASERTDHRSIRKLYYRRKLRKIRVLRVLSDNHLCPPLSQGDLSMWRLHKKYPIDNNFIDWEQTDDKENKNPYYYRHLCVTKKLDLNKLDQRYILGRAFYHIAQRRGFLSNRKETTKESDGTVKLSIDELSTEISDSGCKYLGEYFYSLYQKGEKIRNHYTARKEHYLKEFKAICEIQGIDEGLAIKIEKTIFTQRPLKSQKGQVGTCTFEKGKSRCSASHPYYEEFRMLCFINNIKVKTPQDDDLRLLTKEEKELIAPLFYRVSKKNFNFEDIAKKIAGKNNYGYYKKETYKPYLFNYQIDTSVSGCPVLSQLRAIFGDNWIDTVSQYYTLRKDKKKSEIVNDIWHALFFYSDEDKLKGFAGNRLQLEEEKAEKFAKIAMPSDYASLSLKAIRNILPYLRKGLPYSHAVFLGNLGSIIPHYIWEIDDTRGFIIDEICKMIDQYDPSKETGTLDQCIKGFLNDNFDLPTNATDILYHPSMMDAYPKVRPNDLGEYQLGSPRTGGVKNPMAMHSLFRLRKVINQLLKEKKIDNNTTIHVEFARELNDANKRKAINDIQRSNQKKHDEYKNSIKEQYKAETGIDIEPNDSEVLKYELWEEQNHICLYTGETIRISDFIGANPKYDIEHTIPQSVGGDSTVMNLTLCNNRFNRESKGTKLPSQLPNHEEILERIEDWKDRYESLEQQIRRTKANAASSKEQKDTIIQKRHRLSIERNYWKNKYIRFTMTEIPEGFSRRQGTDIGIISKYARLYLKSVFPKVYVVKGLATSDFRKIWGLQDDYVKKERVNHVHHCIDAITIACIGKYEYDKLAQYYHDEENHKWFGLQKAQYPKPWATFTEDLKNIQQEILIAHYNANNLPKQSKHKIKMPDGSIQYAQGDTARGSLHNDTYYGAIQQDGQIKYVVRKQLKDIKESDIANIVDDVVRQKVMNAVTEKGFKTAMSEAIWMNEGKQIPIKKVRCYTPSVTNPLNIRNQRDQSQHEYKRTYHVTNDRNYMLAIYIGKDNKGKEKREFELVNNLDAAAYYKRSNDKGLTDHQLVPQISKSNYPLAYCLKIGTRVLLYEKSPSEIWENDLSVIQQRLYKVTGLSSLRISKYSYAAINMVYHQEARASSLIPVTKGIFKKEDLFRPGIFMLNTQINALVEGYDFEIDELGKLKRLRQ

SEQ ID NO: 3044 - protein, 1216 aa, unidentified
  REGION 1..1216: note = Description of Unknown: Cas Enzyme sequence
MSERTLGLDLGTNSIGWAIVERTGEICKLLDRGVTIFSEGVARDKTGEHPMVETRTNARATRRHYFRRRLKKIELLKVLVKYKLCPELTPEQLETWKKYKEYPLDKDFIEWQRTNDNCGKNPYHDRYVALNQKLDLATERDRYVLGRALYHLCQRRGFLSNRKDKSADTDGVVKSEIDNLTKKIKEEGCEYAGEYFYKLYQKGDKIRNTYMSRTEHVIKEFDAICDKQNLSDDLRKELNDAMFYQRPLKSQKGAVGKCTFEKNKARCPISHPSYEEFRMLSFMNNIRIKTLQDVDYRSLNDFERKLIAPLFFRKSKDTFEFEDIAKAIAGKKAIYCTRESNADAAYRFNFDMTTSVSNSPVTAVMRDVFGEDWIGTLRSSYAKAGKKTDEQIINDVWHALFDFDSDEKLKQWAMDNLGLDEDKAGTFVKCPIHQGYASLSLNAINKMLPYLRCGERYDRAVFMANLEKILPETVLEDADSFDDVKNQIRLTLDEYNTNSDLKKYTKYELVKDVLSGIAGVEYKDLEKLYHPSMIETYPEATLNNHGELLLGSPRIAAIKNPMAMRALFRLRHLINTLLRERKIDKCTKINIEFSRNLNNANERKAIERYQRENEKERKDAIERIKEHLKEQGYDIEPSEDDILKYQLWKEQGEQCIYTGKQIDISDFIGDNPKCDIEHTLPRSIGGDDSRMNKTLCDAYFNRSVKRAQLPAQLSNHDEIMARIEQLGWKDKIIDLKKRINRTKGGNFATKEAKDRNIQLRHFLTMHLKYWQGKYDRFTMTEVPSGFSNRQGVDIGIIGRYAREYLATVFHEPNRNLIYTVKGATTAEFRKMWGLQDEYAKKERINHSHHCIDAIVIACIGKAQYDQWAVYKQKQEQTEWDNAARFTIEKPWETFTQDVKAISDELLVVHNTPDNTLKQSKKKLRKRGKVQKTASGKAIMQQGDTARASLHKQTFYGAIERNGEIKYVIRKRIDELDAKDIKNVVDESVRQIIEQQISDKGFAKAMAEPIWMNEEKGIQIKKVRMYVPSVTKPINLKPQRDLSIKDYKQFYHVSNDSNYCLAIYEGTTNKGKIKRSYKLVNNLDAVSAPKGESIVPSSDDNDYPLKWLLKVGQMVLLYEKTADEIYEANKRELVRRLYKVVGLSYLPVGTGYGSIVLRYHQEARPAGELKIQKGAWHAGEELRPSLFLYHTQFNALVQGQDFEISDDGEITFKRVKI

SEQ ID NO: 3045 - protein, 1204 aa, unidentified
  REGION 1..1204: note = Description of Unknown: Cas Enzyme sequence
MEKILGIDTGTNSLGWAIVEKHDDGGYKLLDKGVNIFQEGVKKEKGKESSKAAERTGHRSIRKQYFRRKVRKIRLLKVLSDNNLCPPVSSKELSLWRHRNIYPSNKLLRQWEQTDDKTDNNPYSFRYKCLTKKLDLSDITQRYILGRALYHLNQRRGFLSNRKSGVSDEDGIVKSGISDLSKEIEETGCHYLGEYFYKLYQQGKKIRKHYTARKDHYLKEFQAICRMQQLDENLVSHLENVIFFQRPLKSQKGQVGHCVFEPKKTKCPASHPLFEEFRMLSFLNNIKIQTPSDDSLRLLSEKERNKVIPLFFRCSKPTFDFEDIAKSLAGKGKYAWIKHPSGKPYLFNFSMDTSVSGCPVTARLKEIFGDNWIDSICEVYDKGYGKSRLQIINDIWHVLFDFTDKEHLEYFGKNHLQLNDKEAKSFGRIDVCSDYASLSLKAICKILPYLRMGYGYTLSAFFGNLEEVIPSEIWHLPDNRKRIIDELTDAVNNKLQCVADKRTVEQCIKDYILDHYNVSEKVVNKLYHPSMIETYSRVPKGVNKLGSPRVSSIRNPMAMRSFFRLRHVINTLLAEGKIDRNTTIHIELARDLNDSNQRQALSRYIKKNESDRKKAKDEIIKLYREATHKIIVPTDTDVLKYQLWEEQGHRCLYTGEQIGIADFLGGNPKYDIEHTIPRSVGGDSTKMNLTLCNSKFNREEKQTSLPADLPNHDEVLIRIEDWKKKYEELGKRIRKIHTNSCTTKEQKDRLLQYKNLLKLEYDYWYGKYQRFVMTDVPTGFSRRQGVDIGTISKYVRLYLKSFFDRVFVVKGIATSDFRKIWGIQDVFAKKERVNHVHHCIDAIVIACIGPGEYSKLAEYYHDEENHKWYGSSKGHISFPWPTFVEDIKKIQNEVLVSHNTINNIGKSGKHKILLRGKKVWANGDSARGSLHKDTYYGAIENDRKIKYVVRKPLDVNFKDADIENIVDDTVKGIVKKAVLQYGSLKEAITKGIWMNEEKGIAIRKVRCFTPSVTRPLDIRQHRDLSSKRYKQQYHVTSDINYAMAIYVGTNKKGKEKKAFELVSNLDACNYYKKSNDKEYVDYNLVPLSKNDYPLKYVLKRGTMVLLYENTPDELRECSKSELIKRLYKVTGLSSFIPGDHEYGRITLIHSQEALPSSEIKVKAGAYKQLEEFRNGILLLHTQFNALVSDYDFQINDIGEINWIR

SEQ ID NO: 3046 - protein, 1218 aa, unidentified
  REGION 1..1218: note = Description of Unknown: Cas Enzyme sequence
MSEKTLGLDLGTNSIGWAIVEKDGETCKLLDRGVTIFSEGVARDKSGEHPMVETRTNARATRRHYFRRRLRKIELLKVLLKYKLCPELTSNQLEDWRKKKAYPLDKEFIEWQRTDDNCEKNPYHDRYVCLTEKLDLTLDKSRYVLGRALYHLNQRRGFLSNRKDQSSDSDGTVKSGIDNLSKAMENAGCQYVGEYFYSLYGNGGKIRNTYTSRLWHIKKEFDAICDKQQLNDSHRKELSNAIFYQRPLKSQKGAVGKCTFEKNKARCPISHPAFEEFRMLQFINNIKIKTLFDSDYRQLNESERAVVIPLFFRKSKDSFDFEEIAKKIAGKKAIYCTRNENADAAYRFNMDMSTSASNSPVTAVMRDLFGENWISTLRDVYAKSNEKTNEQIVNDIWHALFNFDDDEKLKQWAITNLGLDDIKAETFIKCPIHQGYASLSLNAINKILPYLRLGIRYDQAVFLANLEKILPEAVLEDAEQFDDVRNRILSTLNDYNTNSNLKKFTKDELVKDVLIGIPGVEYNDLQKLYHPSMIETYPEATLNKHGELLLGSPRIAAIKNPMAMRALFRLRHLINTLLREHKIDRGTKINIEFSRNLNNANEREAIAHYQRDNEKERVNAVSRIKEYFKNRGKDIEPTEDDVLKYQLWEEQKHQCIYTGNQIDISEFIGENPKYDIEHTVPRSNGGDNSKMNKTLCDAFFNRSVKRAQLPAQLSNYDEIIARVEQLGWKEKIVNLKKRINRTKGGSFATKEAKDANIQQRNYLTMQLKYWQGKLERFTMTEVPQGFSNRQGVDIGIIGRYAREYLATVFREPGRNLIYIVKGAATAEFRKMWGIQDEYTKKERVNHSHHCIDAIVIACIGKAQYDQWAIYKQKQEMSEWDNAPRFTLVKPWATFTQDVKAISNELLVVHSTSDNTLKRSKKKLRKRGKVQKTASGKVIMQQGDTARASLHKQSFYGAIERDGAIKYVVRKPLDSLKADDIKNIVDDVVREKIEALIAEKGFANALSEPIWMNKEKGVQIKKVRLYVPSVTNPIHLKPQRDLSVKEYKQYYHVANDANYCLAIYEGTDNKGKTKRSYKLVNNLEAVNAPKGESIVPNSDENDYPLKWLLKVGQMVLLYENIPNEIYNADNCELVKRLYEVTGLSYMVINKSYEYGRIVLKYHQEAHQSSDLKAKNGVWHIGEEIRPAICLLHTQFNALAQGQDFEISDDGEITFNRVQI

SEQ ID NO: 3047 - protein, 993 aa, unidentified
  REGION 1..993: note = Description of Unknown: Cas Enzyme sequence
  MOD_RES 940..943: note = Any amino acid
SLGWALVDESENEYTLIDKGVDIFQEGVARDKNNEKPAVQDRTSARALRRHYFRRRLRKIELLKILIRYDLCPPLPEELLTAWQKEKRYPQDNEFLRWQRTDDNGDRNPYHDRYVALSERLDLGNRTQRWLLGRALYHLAQRRGFLSNRKEAGNEKEDGTVKECIKNLSAEIAAAGCRYLGEYFYGLYQHKERIRDKYTSRNEHYLAEFNAICDRQQLPDEWRKALHRAIFFQRDLKSQKGSVGRCTFEPTKSRCPVSHPRFEEFRMLSFVNNIRITGPGDNAPRPLTQEEFETIRSLFFRKSKPYFDFEEIARRIAGKGKYACKEERTEAPYRFNFARTATVSGCPVTASLQAIFGDDWITEIRSLYLLGAGKNEDQMLNDVWHALFSFNDEGRLRSWACEKLQLTDEQAKAFAAIKLPQDYAALSLNAIGKILVYLRCGYRYDEAVFLANLRAALPKEVYADESRRHEIEQDIASLLLDYKRNPYNKFDSKEHRIADYFSDHGLDASRLIRLYHPSKIETYPDAQPKANGILQLGSPRTATIRNPMAMRALFRLRNLINTLLREGRIDRDTKIRIEFARGLNDANRRKAIEQYQREREVENRKYAEEIHSQYAAETGREIKPSDDEVLKYRLWEEQQHVCPYTGRQIRISDFVGSAPDFDIEHTLPQARGGDDSQMNKTLCENRFNRETKRAKLPAELSNHVEIMERIESFGWREKMESLQKQIEAQVRRSKSAAIKSEKDDAIQRRHYLQMQLDYWRGKYERFTMAEIPEGFSNRQGVDIGIIGKYARLYLKTVFDRIYTVKGSTTAAFRKMWGLQEEYARKERTNHVHHCIDAITIACIGRREYDRWAQYVADEERYGYGESGKPRFEKPWPTFTEDVKAAADELLVAHHTPDNMTKQTRRKLRVRGRIKLNADGEPIYQQGDTARCRLHQDTFYXXXXTALLSRMERSAMSSANRSRSYSRRTSTRLSTMQSGIAYGRQSTRSDSRRR

SEQ ID NO: 3048 - protein, 1201 aa, unidentified
  REGION 1..1201: note = Description of Unknown: Cas Enzyme sequence
MEKILGIDTGTNSLGWAIIEKDEKGTRLIDRGTNIFTEGVKIEKTGIESSKAAERTGYRAMRKHYWRRKVRKIHLLTLLVENKLCPPLDYNELREWRLKGIYPHNDDFMAWQRTEDKKNINPYHFRHICLTEKLDLSNLTQRYILGRALYHLNQRRGFLSNRKETSKASEGTVSKDISALTAEMRDAGCEYLGEYFYQLYQKGEKIRQHYTARNEHYLREFHAICEKQELPQELSQELVNDLERAIFYQRPLKSQKGTVGTCTFEKGKPRCPSSHPLFEEFRMYSFLNNIKIQTPIDSELRYLSGDEKSKILPLFKRKSKHTFSFEDIAKKLAGKNKYKYYRDKEDKPFRFNYQMDTQIPMCTVTAQLEDIFGQNWLEGACEVYTLAEGKTPYEILNDVWHALFFYDDEEKLKGFAKSRLQLTEDQAEKFSKISMPNDYAALSLKAIRKILPYLKDYGLIYSHAVFLANIDAVLPPFYSRFEKEHQRAVDIIINALLDYDKKHDERPLEFYLKDFIRDNFDDVDTEDLKKLYHPSMMEHYPRAVPNADGIYQLGSPRTSSVRNPMAMRSMFRLRKVVNLLLAKGYIDENTKVHIEFSRDLNDANRRWAIQSWQRTQEKERDECRKRMQDDLIIANPTDTDILKYQLWEEQNHRCIYTGEQIGITDFLGANPKYDIEHTIPRSAGGDSTRMNLTLCNSRYNRDIKKTKLPVELAEHEAILQRIEHWNERAEELNKQIRRLKGNRATTREEKDKIIRRRHLLSLERDYWSGKYKRFTMTEVPEGFSRRQGTDISVISRYARLFLKSVFRHVYIVKGIATSDFRKMWGIQEEYTAKERVNHVHHCIDAITIACIDNVQYAKLAQFYHDDDAYKQGNGSKPQFEKPWPTFVTDIKHIQDELLIAHHSKDNMPKHTRKREGNVIVQGDTARGSLHNETYYGAIERDGDIKYVVRKSLDSLESKDIKNIVDDEVRRKVEEAIAQHGSLKKALELGIWMNEEKQIPIKKVRIFANSVTRPINIRQHRDKSRHEHKRQFHVQNDRNYMMAIYVGNDGRGKEKRAFEIVSNIKAASFYRRSNQEPGGQPLVPKSKIGLPIKHQLKIGSMVLLYEKNPEEVWKLSKHEIERRLYKIIGLNSFAAKTSNYGRISLVHHQEARPSSEIKLKNGAYQSGENFRSGIILLHTQFKALVAGEDFEINDLGEITRLK

SEQ ID NO: 3049 - protein, 1225 aa, unidentified
  REGION 1..1225: note = Description of Unknown: Cas Enzyme sequence
MAKVLGLDLGTNSLGWALVDESEQGYALLDKGVEIFQEGVAREKNNEKPAVQDRTDARALRRHYFRRRLRKIELLKVLIRYDFCPPLSDGQLSTWRQKKQYPIDGEFLRWQRTDDNEDRNPYHDRYTALTESLNLSDRTQRWLLGRALYHLAQRRGFLSNRKEAGDEKEDGTVKEGIKNLSAEMKAAGFSHLGEYFYELYQRKEQIRSRYTSRNEHYLAEFDAICNRQQLPDECRKALYRAIFFQRDLKSQKGSVGRCTFEPTKSRCPVSHPRFEEFRMLQFINNIRITEPNASTPRPLTTGEIEAIRPLFFRKSKTYFDFEEIARKIAGKGRYACKEDRTEAPYRFNFAGTVTVSGCPVTASLMAIFGDDWLREARSLYLLGEGKTEEQVLNDIWHALFSFNDEERLREWACKNLQLADEQAKAFAAIRLPQDYAALSLNAINKILPYLRCGYRYDEAVFLANLQAALPKEVYADETRRREIERDIASLLLDYKRNPYDKFDSKERRIADYFSDHGLDMSRLDRLYHPSKIETYPDAKPNAEGILQLGSPRTSAIRNPMAMRALFRLRDLINILLREEKIDRDTKIRIEFARGLNDANRRKAIEQYQREREAENRKYAEEICRQYAAETGREITPSEDELLKYRLWEEQQHVCPYTGRQIRISDFIGANPDFDIEHTLPRAKGGDDSQMNKTLCENRFNRETKRAKLPAELSNHAEIMERIESFGWREKIESLQKQIEVQVRRSKSAATKSEKDGAIQRRHYLQMQLDYWRGKYERFTMTEIPEGFSNRQGVGIGIIGKYARLYLKSAFDRIYTVKGSTTAAFRKMWGLQEEYARKERTNHVHHCIDAITIACIGRREYDRWAQYAADEERFSYGESSKPRFEKPWPTFTEDVKAVADELLVAHHTPDNMAKQTRKKLRARGQVKLNTDGKPIYQQGDTARCRLHQETFYGAIEREGEIRYVVRKALGQLQLGDIDKIVDDAVRDRVREAIDEVGFKTAINSDEYTIWMNREKGIPIRKVRIFTPNVTQPIALKKQRDLSDKEYKRDYHVANDGNYCMAIYEGQDKKGKPKRTFELVSNFEAAQYFKASADREARPDLVPLADANGFPLKCILKTGTMVLFYENSPAELYDCTPKELTKRLYKVTGMSTLTLQQKYKYGTLSLKHHQEARPAGELKAKNGVWTTNEEYRPVISIYHTQLNAYVEGYDFELTVTGEIRFKQTMPC

SEQ ID NO: 3050 - protein, 1220 aa, unidentified
  REGION 1..1220: note = Description of Unknown: Cas Enzyme sequence
MATILGLDLGTNSLGWAVVEETEHGYTLKEQGVDIFQEGVAREKNNEKPAVQDRTNARALRRQYFRRRLRKIDLLRVLVRYDLCPPLSGEQLTAWRKEKRYPLDEAFLQWQRTDDNADRNPYHDRYVALSEQLDLGNRQHRYLLGRALYHLAQRRGFISNRKEAGKEQEEGTVKSSIRSLTAKMEAAGCRYLGEYFYQLYQHKEKIRGKYTSRNEHYLAEFEAICERQQLPDEWRKALHRAIFFQRDLKSQKGAVGRCTFEPRKSRCPVSHPRFEEFRMLQFINNIRITSPQDTAPRPLTQEEVEVIRPLFYRKSKPHFEFEEIARKIAGKGKYACGEERTEAPYRFNFARTTTVSGCPVTASLIAVFGSDWLREMCSLYLLGEGKNEEQVLNDVWHALFFFKDEECLRTWALEKLQLTAEQAKAFAAIRLPQDYAALSLNAINKILPYLRLGYRYDEAVFLANLKAVLPKEVYDNEERRHEIEHDIAELLLGYKRNLYDKYDSKERRIADYFSDHGLGLSRFDRLYHPSMIETYRKAQPDAAGLLQLGSPRTPAVRNPMAMRALFRLRALVNRLLRDGKIDRNTKLRIEFARELNNANLRKAIEQYQREREAENRKFAEEIRSQYAAETGRTIDPTDDEVLKYRLWEEQQHVCPYTGRQIRISDFIGANPGFDIEHTIPRARGGDDSQMNKTLCENRYNRVVKRSKLPTELSDHAEIMARIESFGWQEKVETLQKQIDAQIRKSKAAATKAEKDSAIQRRHYLKLQQDYWRGKYERFTMTEVPEGFSNRQGVDIGIIGRYARLYLKTVFDRIYTVKGATTSDFRKIWGLQAEYEKKARVNHVHHCIDAITIACIGHREYLAWKRYAEEAERYQLGEGDRPDIEKPWPTFTEDVKAVADELLVSHHTADNMAKQTRKKLRVRGRIRLNDAGKPIYMQGDTARALLHKDTFYGAIEREGEIRYVVRKSLGQLQPGDVDKIVDDAVRERVREAIEAVGFKTAMNADEYTIWMNREKGVPIRKVRIYTPSVTQPVALKKQRDLSEKEYKQDYHVVNDGNYCMAIYEGVDKKGKKRRTFEIVSNLEAARYFKASTDRNERPDLVPVADTNGYPLKCILKTGTMVLFYENTPAELYECSRKELVKRLYKVTAMAAEGRVQFLFHQEARDQKTISSIYGAGASQFSLSKPSPKLRLSVSSFNMLVEGYDFELTITGEIKFKHAMPC

SEQ ID NO: 3051 - protein, 1228 aa, unidentified
  REGION 1..1228: note = Description of Unknown: Cas Enzyme sequence
MTKTLGLDLGTNSIGWAIVERDDNDGCCRLLDRGVDIFQEGVAREKNNEKPAVQDRTEARALRRHYFRRRIRKIELLGLLVQYDLCPPLSRDQLHAWRSRKRYPLDEEFLRWQRTDDAAGRNPYHDRNRALSETLDLDDRADRHALGRALYHLAQRRGFLSNRKQAGAESEDGTVKQGISDLSEAMRKAGCEYLGQYFHTLYLRKEKIRTHYTARNEHFLAEFRAICEKQQLPGEWREALHRAIFYQRPLKSQKGQVGRCTFEKKKSRCPASHPRFEEFRMRSFINNIRITGPGDEEPRPLRTDEIERIRPLFLRKSKPHFDFAELAAKLAGKGNFACKGDRNEAPYRFNFPRTTTVSGCPVTEALIALFGDDWQAALRSRYTLAADKSDDRIVNDIWHALFSFDDEERLRDWARTKLGLSEDEARHFAAIRMPQDYASLSLNAIDKILPGLRAGLRYDEAVFMANMQAVLPDDVRDDAAKLERIGTDIAVLLEDFGRNPLNARTTKEQCVRDYLRNCCGIDDRHLDRMYHPSMIETYRAALPDAAGILRLGSPRTDSIRNPMAMRALFRLRILLNTLLRQGKIDRTTKINIEFSRNLHDANHRKAFELYRRDREAENRRYADELRAQYADATGRTIEPTETDILKFRLWKEQQHRCIYTGKQIGIADFIGSNPRFDIEHTVPRSRGGDDSQKNKTLCDCRYNREVKRAKLPSELADAQAIGARIEELGWRKRIDELEKQIGNQIRKSKNASTKQEKDFAIQRRHYLKMQLDELRGKYERFTMTEVPDGFSNRQGVDIGIIGRYARLYLKSVFERIYTVKGATTDAFRKMWGLQEEYAKKERVNHVHHCIDAITIACIGRTEYDRWAQYKAEDENYRFGRGDRPLFVKPWPTFTEDVLAVAEGLLVAHHTPDNMGKQSRRKLRVRGRIRRGTDGKPLYAQGDTARGVLHQQTFYGAIRREDEVKYVVRKSLDQLQESDVAKIVDDAVRKRVEKAVADVGFKTATNTAEHTIWMNEEKGVPIRKVRIYTPSVTQPIHLKRHRDLSDKEYKQEYHVANDGNYCMAIYEGTDRRGKTKRSFELVSNLEAARYFRRSADRAARPDLVPQSDADGYPLKCILRPGTMVLFYENSPAELYECTPQELTRRLYKVTGLSILRVQKKWEYGAITLKHHQEARPAGELKAKNGEWKTGEAYRPVIAINHTQLRAYVEGYDFTLSVTGEIEFKHRPSC

SEQ ID NO: 3052 - protein, 1195 aa, unidentified
  REGION 1..1195: note = Description of Unknown: Cas Enzyme sequence
MEKILGIDTGTNSLGWAIIEKDEKGTRLVHKGTNIFTEGVKIEKGIESSKASERTGHRSVRKHYWRRKVRKIRLLNILVDYRLCPPLTKEQLREWRLKKVYPMDDAFIAWQRTEDKNNVNPYQFRHICLTQKLDLNNLTQRYILGRALYHLNQRRGFLSNRKETTKASEGTVIKDINQLSVQMSEAGCEYLGEYFYQLYQSGEKIRSHYTARNEHYLKEFYAICEKQELPHELVTKLEKAIFSQRPLKSQKGTVGQCTFEKGKSRCPASHPLFEEFRMYSFLNNIKIQTPDDASLRYLNGEEKAAILPLFKRKSKHTFNFEDIAKKIAGKNKYEYYRDNAGKPFKFNYQMDTQIPICTVTARLEEIFGENWVEGASEVYTLADGKTPFQIMNDVWHALFFYDDEEKLKGFARDRLQLTDEEAAKFASISMPGDYASLSLKAIRKILPFMKDYGLIYTHAVFLANLDEVLPPFYKRFEKERQEAVNKVIDALLDYDKSHDERPLEFYIKDFIIDNFDDVDREDLKKLYHPSMIEQYPRVMPNEKGIYQLGSPRISSVRNPMAMRSMFRLRKVVNLLLSRGYIDENTKVHIEFSRDLNDANRRWAIQQWQRQQEKDRAECKKRIQEAGINNPTDTDILKYQLWEEQNHKCIYTGDEIGVADFLGANPKYDIEHTVPQSAGGDSTKMNLTLCNSKFNRETKKTHLPTELANHDQILQRIEHWKEKTDELDKRIRKLKGSRATTKEEKDVIIRRRHLLSLERDYWRGKYKRFEMSEVPEGFSRRQGTDISVISRYARMYLKSVFKHVYIVKGIATSDFRKMWGIQEEYTSKERVNHVHHCIDAITIACIDKVQYDKLAQYYHDEDRYKEGNGAKPQFEKPWPTFVADVKHIQDELLVPHYAKDNMPKHTRKRDGNRLIQGDTARASLHNDTYYGAIDVDGDIKYVVRKTLDMMDEKDIKNIVDEEVKRKVEEAVAQHGSLKSALEHTIWMNEEKQIPIKKVRVFTGSVTRPIHIRQHRDKSRHEHKRQYHVQNDRNYMMAIYSGKDNKGKEKRAFELVSNIVAANYYRRSNKDVSTVPLVPETKNGYSIKYLLKIGTMVLLYENTPDEIWQLDDHGLQHRLYKVTGLSSYLVSGYLYGTISMVHHQDARPSSDITLKNGVFKASEEFRPGIKMLHTQFKALIAGVDFELNDLGEIKRLR

SEQ ID NO: 3053 - protein, 1190 aa, unidentified
  REGION 1..1190: note = Description of Unknown: Cas Enzyme sequence
MEKILGIDTGTNSLGWAIIEKDEKGTRLIHRGTNIFTEGVKIEKGIESSKAAERTGYRALRKHYWRRKVRKIHLLTLLVENKLCPPLDYNELREWRLKGIYPHNDDFMAWQRTEDKKNINPYHFRHICLTEKLDLSNLTQRYILGRALYHLNQRRGFLSNRKETSKASEGTVSKDISALTAEMRDAGCEYLGEYFYQLYQKGEKIRQHYTARNEHYLREFHAICEKQELPQELVKDLERAIFYQRPLKSQKGTVGTCTFEKGKPRCPSSHPLFEEFRMYSFLNNIKIQTPIDSELRYLSGDEKSKILPLFKRKSKHTFSFEDIAKKLAGKNKYKYYRDKEDKPFRFNYQMDTQIPMCTVTAQLEDIFGQNWLEGACEVYTLAEGKTPYEILNDVWHALFFYDDEEKLKGFAKSRLQLTEDQAEKFSKISMPNDYAALSLKAIRKILPYLKDYGLIYSHAVFLANIDAVLPPFYSRFEKEHQRAVDIIINALLDYDKKHDERPLEFYLKDFIRDNFDDVDTEDLKKLYHPSMMEHYPRAVPNADGIYQLGSPRTSSVRNPMAMRSMFRLRKVVNLLLAKGYIDENTKVHIEFSRDLNDANRRWAIQSWQRMQEKERDECRKRMQDDLIIANPTDTDILKYQLWEEQNHRCIYTGEQIGITDFLGANPKYDIEHTIPRSAGGDSTRMNLTLCNSRYNRDIKKTKLPVELAEHEAILQRIEHWNERAEELNKQIRRLKGNRATTREEKDKIIRRRHLLSLERDYWSGKYKRFTMTEVPEGFSRRQGTDISVISRYARLFLKSVFRHVYIVKGIATSDFRKMWGIQEEYTAKERVNHVHHCIDAITIACIDNVQYAKLAQFYHDDDAYKQGNGSKPQFEKPWPTFVTDIKHIQDELLIAHHSKDNMPKHTRKREGNVIVQGDTARGSLHNETYYGAIERDGDIKYVVRKSLDSLESKDIKNIVDDEVRRKVEEAIAQHGSLKKALELGIWMNEEKQIPIKKVRVLTGLRNPINIRQQRDKSRHEYKQQFHVQNDRNYILAIYSGTNAKGKEQRAFELISNLAAARFYRRSNENNKNILPASKNGLKLSYKLKIGLMVILYENDPNEIWSLNKNEIQKRLYIITRLGINSPTAMLITLVHHQEARPSSEIKLKNGAFKASEEFRPGIKMLHTQFKALVAGEDFEINDLGEITRLK

SEQ ID NO: 3054 - protein, 1433 aa, unidentified
  REGION 1..1433: note = Description of Unknown: Cas Enzyme sequence
MAQNILGIDLGSSSIGMALRNPDRSDNLLEQLEYYSVDVFKAGVGSNKSGEYSLAAERTKNRQSRRLYETRRRRLWATLELLIQEGYCPMKMESLMKWKTYDKSKGLFRKYPIDDKAFDSWIKLDFDGDGLPDYTSPYQLREELMERQFNFNDVQDKFKLGRALYHIAQRRGFKSSKGETIKEQEDNESQSGEDMEVSMKKSEEKKSKELISFMEENKLETIGCAFALLERNGIRIRNSIYSPVRDLYRDEIKKIFEFQNGLFTKSDLYLRLMSVKKGEGTIFYKKPLRSQKGLIGFCTLEKNKKRCPVSHPSYEFFRAWTLLNNIKYRTEIDGRWIDLSKEQKEAIYNESFIGKVRREFQFKEIREKLQRMLGFQLVYSNNNNKTINFKDTQTIAGSPVTARLIKMLGNDWDKVKIAGNKSRYSKGSDISHEVSYDAFDLWNVCFCSDDPEDITVFAKIRLEWDDEKTKLLMKLWSSLSQGYAMLSLKAINNINSMLYRGLNYSDAVFLAKIPEIIKINESQLSVIINDFKLIKSDNAFDKTIKSITNKLIVEYKSLSYGEKFAEKNYGYKLDESDYNDILDATISIIGKKQWESFGNVEQERIIEGVKCGYQQFFANPNRDFIRLNRLEDDLKQYLVDNFNCNDKQLKKLYHPSQVSLYNTPSKDGYSNELRLGSPNIGSIRNPVVLRTLNILRRKINKMLDAGLITSDDTRIVVETTRSINDANMRWAIEQYQKEKENERRTIEKILQEHYPARVINATDIGKAKYMLEQSDEYDYKSGLSFALNVSKYKLWLEQGCCCMYTGKTITLSNLLNGDACDIEHTIPRSISFDNSDANLTVCDSYYNRTIKKNQIPTQLLNYNKDVEINGRIYTAIKPRLEKWEEKVEKLTDMVNFWKSRSRNAQDKARKDYCIRQRHLWQMQLDYWKQKLYTFTCDEVKEGFRKSQLVDTGIITKYATLYLKSVFSNVEVQKGRNTAVYRKMLGIQGLDDKKDRNLHSHHAIDAVVLTCIPVAAKRERMLKLFYEIQEAKKQGHDCTSQVLQLQNEIQDCGFGNNIEAVVETINNNLIVNSRYKDQTLRFNRKRLRINGKKVYSKDSLGDKREIWSGGDSISGRLHKESFYGAIALPKADERYEDYIPKVKNGHFVYENSEKDFVIVMRFEIRDKEKFSKVEDLEKIIDTSIKKQLITIVKQRMAQGMSFVEAVNKDIYLLDKNGKEIKYDKNGRKLSPLRHVRCRVKAGRGYMSYSTSITIRHQLNKSNRQLVNLDNRTHKEFLYAQNDDDGNYALLIYEGVFKGHIKRVSKIVNLFELSLLSRERDLNGNHFSFNEIPAYSTITIKGTKYKLKQIIKTGLRVILLDGEIDVRNVVMQGDLLSKSLYRVKKFNTNGVFLIHHLLTSTDDKDAKKLSVSNLNCLVEGADFDVDELGNVILRQ

SEQ ID NO: 3055 - protein, 1260 aa, unidentified
  REGION 1..1260: note = Description of Unknown: Cas Enzyme sequence
MITRILGLDTGTNSLAWAVVDRDANGNYTLVKRGDVIFTEGVKIEKGIESSKAAERTAHKALRVHYSRRRLRKIDTLKVLVSLDLCPYLSDEQLSLWKAKKTYPLTDDFMLWQRSGSAEENNPYYCRYRCLTQKLDLTDQSQRFLLGRAFYHLAQRRGFLSNRLDTSADSDESGKVKSGIAELSVEMEKAGCHYLGEYFYQLYRQHGNTVRLRSRYTDREEHYKKEFLAICEKQELDAQWVEKLQKALYFQRPLKSQRKGVGKCTFEPKKPRCAESHPDYESFRMLCFLNNVKIQTPNDTSLRPLNEGEREKIWPLFFRKSKPNFDFEDIAKALAGKNNYAWIKDAGEKPFKFNYRMQQGVSGCPVTAQLIDIFGSDWQTAIAETYTAVEKKNGTKTIDEMADDVWNVLYSFSSKDKLKAFATEKLQLDETSATKFANAKLPHGFASLSLKAIRNILPFLRQGFIYAHAVHLAKIPDIVTKAVWNDADKREMILSGLMEIIENYNPKDRGVEGTIDFCIKSHLQDVVDLRPGAADALYHPSMIETYPDAKLNKMGVFQLGSPRTNAIRNPMAMRSLHILRSVVNQLLRDGTIDRDTEVHVEYARELNDANKRKAIADYQREQEKKRKQYRDDIITLYKSECHKEIEPTDTDILKFQLWEEQNHKCLYTNGEIGICDFLGDNPKFDIEHTIPRSVGGDSTQMNLTLCDATFNRQVKGAKLPTQLSNHADILVRIDHWKSKCEDLRKQLDKIRTYGGMEKAMKDRLIQKRHRLKMELDYWQGKYSRFTMTEVPEGFSRRQGAGIGLVSKYAGLFLKSLFHNEQNPNKSNVYVVKGVTTAEFRRMWGLQGEYEKKSRLNHCHHCIDAITIACIGKAEYEKMAQYYHDEELFQWRGTTSKPHFNKPWRTFTEDVLALEQSLLVKHLTKDNMPKQAKKHVRTAKGKYLAQGDAARGSLHKDTYYGAIQQEGEIRYVLRKSLSDFNSESELENIVDQAVKEKIKAAVAGKNFKTAIAEPIFMNKEKGIRINKVRCYADSVKNPLHIRQQRDLSDKEYKQQFHVVNDSNYMLAIYEGEVKGKVKRDFALVNNITAASFFKRSNRRKNAEPLVPRTSPKGNWALLVMLKIGMQVLLYEKSPEEIKFDKPHDLVKRLYKVVGLSIDGSCIMIDLRYNQEARQAKDVKPKKGAYMENEQFRPCIRLRHTQFKALVEGVDFEFNILGEVKKKNPHAKKKSLFSSPRNSVVEERTTGDNFKGTARCLSDCSH

SEQ ID NO: 3056 - protein, 1229 aa, unidentified
  REGION 1..1229: note = Description of Unknown: Cas Enzyme sequence
MITRILGLDTGTNSLAWAVVDRDAKGDYTLVRRGDVIFSEGVKIEKGVESSKAAERTGHKSLRVQYARRRLRKIDTLKVLVSLDLCPYLSDEQLSQWKAKKTYPLTDDFMLWQRSGSAEENNPYYCRYRCLTQKLDLTDQSQRFLLGRAFYHLAQRRGFLSNRLDTTADSVESGKVKSGIAQLSVEMEKAGCTFLGEYFYQLYKQHGNTVRLRSRYTDREEHYIKEFLAICEKQELDAQWVEKLQRTLYFQRPLKSQRKGVGKCTFEPKKPRCAESHPDYEAFRMLCILNNIKIKTPKDVSLRPLNAEEREKVWPLFFRKSKPNFDFEDIAKALAGKNNYAWYKDAGEKPFRFNYRMHQGVPGCPVTAQLIDLFGPDWKAGIAETYMAVEKKNGTKTIDEMADDVWNVLYSFSSKDKLKAFATEKLQLDEARATKFANAKLPHGFAALSLKAIRNILPFLRQGFIYAHAVLLAKIPDIVTAAVWDDTDKRQQILSGLLEVIENYNPNDRGIEGTIDFCIKSHLQDVVDLRPGAADALYHPSMIEAYPDAKLNKMGVFQLGSPRTNAIRNPMAMRSLHILRSVVNQLLRDGTIDRDTEVHVEYARELNDANKRKAIADYQKDIERKRADYRKRIIELYKEECHKEIEPTDTDILKFQLWEEQNHKCLYTDSEIGICDFLGDNPKFDIEHTIPRGVGGDSTQMNLTLCDAMFNRQVKGARLPSQLPNHADILVRIAPWKSKCEDLRKKLDKTRTFSGMAKEIKDSQIQKRHRLKMELDYWQGKYERFTMTEVPEGFSRRQGAGIGLVSKYAGLFLKSLFHSADNPNKSNVYMVKGVTTAEFRRMWGLQGEYEKKSRLNHCHHCIDAITIACIGKAEYDKMAQYYHDEEVSRWHGSAGKPHFKKPWPTFTEDVLALEQSLLIKHLTKDNMPKQAKRRVRTAKGKHLAQGDAARGSLHKDTYYGAIEQEGEIRYVLRKPISKFEKESELENIVDQAVKEKIKAAVAGKNFKAAIAEPIFMNKEKGIRINKVRCYADSVKNPLHIRQQRDLSDKEYKQQFHVVNDSNYMLAIYEGEVKGKVKRDFVLVNNITVASFFKRDRREGQGKMLVPARSQKGNLPLLTTLKIGTQVLLYENSPEEIQFENPQDLVSRLYKVVGVSSMTITGNDYGVIILRNHQNAQQAKDVKYKNGKYLEHEELRQGIRFLHTQFKALVEGIDFEFNILGEIKKKEHHA

SEQ ID NO: 3057 - protein, 1217 aa, unidentified
  REGION 1..1217: note = Description of Unknown: Cas Enzyme sequence
MKKRILGIDTGTNSLGWAVVERNEEGTYSLLRKGSLIFQEGVKIEKGIESSKAADRTEHRASRKHYFRRRLRKIEVLKVLVKYGWCPRLTDEQLQMWHTKKQYPNSEAFMAWQRTNENLEQNPYYYRHVCLHDKLDLSNEAEAYILGRALYHLAQRRGFLSNRLDQSEEDESGKVKSSISELSKQMEDAGCEYLGDYFYKLYSEQGNNVRIRNRYTDREAHYRKEFDAICRMQELSDEQVTELSRALYFQRPLKSQRQGVGKCTFEPRKPRCADSHPAFERFRMLTFLNNVKVKGPYDVDMRPLNEEEFHKALPMFYRKSKTNFDFEDIAKAIAGKNNYQYIKDSGEKPYKFNYRMTQGVSGCPTIAQLRDIFGEEYEAGIAELYMKGEGKNPQQMVDDVWNVLYSFPDKENVKHWAKDNLQLAEEQAEKFSKIKLSHNFASLSLNAIRKILPWLEQGLIYSHAVSMAKVPDIVGRDIWEEHKDIITKELTSLILNFNPKDESMQGTLDYCIKDYLKNNFELKPGTADKLYHPSMIETYPDAKKNAKGVYQLGSPRTNAVRNPMAMRSLHQLRKVINELLREGTIDQNTEVHIEYARELNDANRRWALGDWNKQQEKKRKEASEDIIRLYKEATGKDIVPTDDDITKYLLWKEQNQICIYTNNHIGITQFVGSNPEYDIEHTIPRSVGGENVMSNFTLCSSRYNRDVKKAKMPSELGADYEGILERISSWKDKIEELRKSKDKVRTHSGMAKNVKDGLIRKRHKIDIELKYWQDKYNRFLLTEAPEGFARRQGAGIGLVGKYAGLYLKTLFHKPDDRSKSNVRTIKGTTTAEFRKMWGLQDEFVKKSRDNHVHHCIDAIVIACIDTGNYNEVARYYQQLEEYERTLMNRPRFPKPWATFTEDIMALKNEMLVVHDTPDNMSKHAKKYVRTSKGKFLAKGDVARGQLHNDTYYGAIERDGEIRYVVRRAISSFEKESDIENIVDETVKAIVKQAIAEKGFKKAIAEDIFMNEEKGILIKKVRCYAKSVKKPLNIRSQRDVSNKEYKRQFHVQNESNYMLALYEGEIKGKKKRAYELVKNIEAANFFRASTSTDDYPSIVPEKSEMGLPLKHKLTIGKHVLLYEESASEINFDNIKDLSKRLYKVTGLSYLPVGKGFGIIVMRHHQEARMASEFKTKNGAYKNGEGYRASILMLHTQFNALVEGEDFIITPLGDIKPIN

SEQ ID NO: 3058 - protein, 1223 aa, unidentified
  REGION 1..1223: note = Description of Unknown: Cas Enzyme sequence
MITRILGLDTGTNSLAWAVVDRDANGNYTLVKRGDVIFTEGVKIEKGIESSKAAERTGHKALRVHYSRRRLHKIDTLKVLVELDLCPYLSDEQLNLWKAKKTYPLTDDFMLWQRSGSAEENNPYYCRHRCLTQKLDLTDQSQRFLLGRAFYHLAQRRGFLSNRLDTSADSDESGKVKSGIAELSVEMEKAGCEFLGEYFYQLYKQHGNTIKLRSRYTDREEHYKKEFLAICEKQELEPKWVEALQRAIYFQRPLKSQRKGVGKCTFEPKKPRCAESHPDYEAFRMLCFLNNVKIQTPSDTSLRPLNEDEREKIWPLFFRKSKPNFDFEDIAKVLAGKNNYAWYKDAGEKPFKFNYRMQQGVSGCPVTAQLIDIFGSDWQTAIAETYTAVEKKNGTKTIDEMADDVWNVLYSFSSKDKLKAFATEKLQLDEASATKFANAKLPHGFASLSLKAIRNILPFLRQGFIYAHAVHLAKIPDIVTKAVWNDDDKREMILSGLMEIIENYNPKDRGVEGTIDFCIKSHLQDVIDLRPGAADALYHPSMIETYPDAKLNKMGVFQLGSPRTNAIRNPMAMRSLHILRSVVNQLLRDGIIDRNTEVHVEYARELNDANKRKAIADYQREQEKKRKQYRDDIISLYKNECHKEIEPTDTDILKFQLWEEQDHLCLYTGTQIGICDFLGDNPRFDIEHTVPRSVGGDSTQMNLTLCDATFNRQVKGAQLPTQLSNHADILVRIDHWKSKCEDLRKQLDKIRTYGGMEKAMKDRLIQKRHRLKMDLDYWQGKYSRFTMTEVPEGFSRRQGAGIGLVSKYAGLFLKSLFHNEQNPNKSNVYVVKGVTTAEFRRMWGLQGEYEKKSRLNHCHHCIDAITIACIGKAEYDKMAQYYHDEELFQWRGTTTKPHFNKPWPTFTEDVLAIEQSLLVKHLTKDNMPKQAKKRVRTATGKYLAQGDTARGSLHKDTYYGAIEQDGEIRYVLRKPLNKFENEAELEKIVDQTVKEKIKEAIAGKNFKTAITEPIFMNKEKGIRINKVRCYVKPSARLKVRQQRDLSSKEYKQYFYVENDINYMVAIYEGELNGKKEREFCVVNNLTAASYFKKSSHEKADSLVPERSPKNDLPLLYVLKRGVQVLLYENSPKEIQFDDPQDLVYRLYEIVGIGLDGNALMIDLRFHQEARRSSDLDRKKGAYKENETLRPCIRLRHTQFKALVDGVDFEFNILGEIKKKERHA

SEQ ID NO: 3059 - protein, 1219 aa, unidentified
  REGION 1..1219: note = Description of Unknown: Cas Enzyme sequence
MEKVLGLDLGTNSIGWAIIQREGDQSTLIDKGVSIFQEGVAREQGAEKPAVQTRTDARALRRAYRRRRKRKIDLLRVLVDHELCPPLTHEQLDLWLQKKRYPLDEAFLAWQRTDEATGRNPYRDRYRALSEQLDLTGEKGRYTLGRALYHIAQRRGFLSNRRDNTAESEGKVKQGIDSLTEAMKAAGCRYLGEYFYMLYGKGEKIRNHYTSRNDHYRAEFDAICSRQQLDPTLTDKLRRAIFYQRPLKSQKGTVGKCTFEKGKSRCPLSHPRFEEFRMLSFINNIRITTPYDFGASRPLNEEERAAAIRMFMRKSKSKPTFDFEDIAKALAGRKRSYAYEEDAGEAPYRFNYRMSTSVSGCPTTAALADIFGEDWVSGICSLYTRAEGKTKERIVDDVWHVLFSFDDDDRLRQWAAERLQLSEADAEKFAAITPKQGYAALSLNAIDKILPYLRAGRRYDEAVFCANIKAAVPAEVRSDEQLLGRITDEVSRIVADFKPDPTIKADTKQSRIEGCMREHGIEADMKKLYHPSMIETYRKAEAGDDGLVQLGSPRTSSVRNPMAMRALFRMRALLNRLLREGRIDSKTKINIEFARGLNDANKRKAIEQWQREREKENKRYAQEIRKLTGSPIEPSEEDILKYRLYEEQNHICLYTGRQISITDFIGSSASCDIEHTLPRSRGGDDSQMNKTLCDNRFNRETKCSKLPSELSEHSDVMARIEQLGWKQRIDDLHKQIETASRRSKNATTKEDKDKAIQHRHKLRMQLDYWQGKYERFTMTEVPEGFANRQGVDIGIIGRYARLYLKSVFERIYTVKGATTAAFRKMWGLQEEDSEKERTSHAHHCIDAITVACIGRNEYDRWAQYAAQEEYYRRCEGVKPSFDKPWPTFTEDVRAVADELLVAHSTPDNMSKPTKKRLRKRGRIVSGDDRRPIIVTGDSARASLHKDTFYGAIKRDDEIKYVVRKSLSDLGEKDIDKIVDEAVRARVRDAVERMDFTQAVAGTIWMNEQKRIPIKRVRIFAPTVTAPIKLKEHRDLSKKEHKRHYHVVNDGNYCMAIYEGQDKKGRTKRSFEIVDNLEAAEYFKASADRSERPDLVPRSDACGNPQRCILKTGTMVLFYENSPEELYDCSKRELAKRLYKLTQFSTLRIGNNSYGIIVFRHHQEARPASELKPKNGVWKIGEEYRPLIRILHTQFNALVEGSDFELTVTGKIRFKHRSHD

SEQ ID NO: 3060 - protein, 1284 aa, unidentified
  REGION 1..1284: note = Description of Unknown: Cas Enzyme sequence
MNALAIHLYLIIRYINLSFNYFCNFYRIIAITHIMKKILGLDLGIGSIGWALIGIDEEKTEESKIEGLGSRVILLKENETTGITQGNGETINRQRTLKRSMRRNMDRYQQRRKMLAQLLEEYGMNFSESLLKLSPLELWKLRSDAARGEHLSLPEIGRVLYHLNQRRGYRSSKDENQENKNSTYLSAIGEREKEALSHDETPGQYFYRKLNESRYQTERGHTACSYRVKEQVFPRRMYEAELKQILTSQAVYYPEILSEENQARIFNIIMYQRPLRSCKHLVSICEFESKEIINNKGKKIQIGPRVAPKSSPLAQLCRIWETVNNIELKNYKNKSKKKQSTIPLFGDGRLSEFIYTLNNSERTAIAEFLSKNEKMSSKELLKILGLKKDDGFTVDKNVSKGIKGNSTYCALKTALEDEPDAEKYLRFDIHSEESSLVDTETGEILKKVSSSYLKEPLYMLWHTVYSINEKEELSKALNSKFGIVNPSTIDKLFHLDFRGEGYSNKSSKFICKILPYLTDGLKYSEACEMAGVNHSSSLTKEENEKRELTTCLEPLPKNSLRQPVVEKILNQMIHQVNAIVKENGPIDEIRIEMARQLKQSKEERNREFSRNNARERENKKISEIISGYGFKPSKNRIQKYRMWKESEECCMYCGKPIGVHEFLSGMDVEKEHVIPRSIFFDDSFSNKVCACRDCNHRKGQMTGFDFMQNEGEKKFKEYTDRVERLYAQYKTSKGTAGISRTKHDRLMTSKSEIPQDFIERDLRQSQYIAKKAIEILKGICRNVYASSGSVTDFFRHAWGYDKILHELNLPYYTKAGQTETITVNHKGSSWEEERIKEWSKRLDHRHHAIDALTIALTRQGYIQRLNTLSSISPDNESKIEGEYMRQGQNLDKWASEQFHFPYHAVKKAVSEIAVSFKSEGKVTVPGKRYIYKRGKAIHVQSGLMIPRGPLTEDSVYGIIKRVNSKTGIGELFKQPQNICSPKIREAIENRLSEFKGNITKAKNSLKKRPLAVSGKDTNPATAAVFESIVVIRYKIEAIKYSKVDQIVDIPVREAIKRRFEELNHSDEAFAKSLSERPIFRDNDCRFPIKRVRCATNNKLESMTVIKKDADGNPIGYSLNGNNHHVALYETPEGTVEISVIPFTHAVRRKQLGIPVIIKDPQQVWEIVSDRDDIEEDILSRIPMPDCKFLLSMQINDMFVIGLTDEELSDCKMNRDFATLTSHLYRVQSISWRDYVLIKHTSALTRSRKEQSANGNYIRITSLETLKKLNNKKVRINRLGKIEFL

SEQ ID NO: 3061 - protein, 1678 aa, unidentified
  REGION 1..1678: note = Description of Unknown: Cas Enzyme sequence
MKKILGLDLGTNSIGWALVEIDHEKRIVRILGLGSRILNMDAAEIAKFESGAKLSSAAAQRTQRRTPRKLNERYLLRRDRLHCILNLLNTLPSHYQLSIEFENEKGKRSGKFLKGKEVKLAYQKDENGKDQFLFKDAYEKMESDFILRQPELLYQKKNGKVTQIPFDWTLYYLRHKAVADPHYELTKEQLAWITLSFNQKRGYEKVIGQDEKEQKEGERSETFIGKVISVQKLHEQDIYEIILSDNNDESLELFRYKEESKIQITVVGDLKEIERISKFNEAGEIDNSKTEYIINEIRELFIADVRNTWQKRKENFVFEIELETGWIKEQQSRFTPKWKDTKRDFIIRTKYNEQGNRILKGADKGRNIGIPKDEDWTLMKLKTETSITSFNSKNNTVGVASFIYYNLLQNPKQKIKGDLVTVIERDYYREELDRIFKNQEKFHPELKNRILYEQAIQLLYPNNISHQKVIKEFDFNYLIKEDILMYQRDLKSKKSLIADCAYEIRKYKDVETQKLVDVPIKAIHKFNPLFQEFRLWQFIKRLKIIKKQDFDVVNNEIKLNIDVTDQFLGSIEIKEKLFDYLNDKDFVSEKNTLDFLSKAYNDKTIKADNYKWNFVSEKEPCNTTRHEFLLRTKRINGFDYKTFLSPETEYKLWHFFYSVKRKDEFYKGLNSLFKRLLEDSKLSNDFLPELVKNFCSFGGYPNDYGTYSEKAIKKLLSFLRLGKYWNVKDVEANLKKDLPEDITRKVIDKEGINGEMDDFQGLWISSACYLVYGRYSEVGEVKFWDSPYDIENYLKNEFRQHSLNNPVVEKVLVETLHLVKDVWKYFGEVMGKDERGNPVYAKLFDRIHIELGREMKKNNKQKERDDKSNKENRKANERIIEILKELKKENRSLEVKSPFQQEKLRILEEGLLSSIEFDKDTTEYNLPEGKISKKQIKEITSKEISKVSRSDFERYKLWLDQRYQSPYTGKIIKLSDLFDRKKYEIEHIFPQERITLNALSNKVICENEINKVKGSNTGYGFIIGANEKEIFCAAHNKKVKILSVDRYEQLVNQNFIDKKREILLSKDIPDDFTNSQKVNMQYISKMAMKLLSNIVREKDEDTYRSKNILATNGTITSELKRHWKLNEVWNDLNSPRFKRLNELTNSNLFGDYRKIDGHDVFVNDVPEETRKNFDPKRIDHRHHAMDALVIALTTEEHVQYLNNISSQEENDEQKLKTRKGLKYILTNSRRGFNDEKEWYFLPPAQTKSAEGISEIEYQFKDSKSKIFKDIAKEALDNTVASFKQKNRILRQRWNKYLKSDNSGLIDIQREENLKSKLKYNVRQALHLDTFYGKVKLQNNEMTSTNVVEVDFKTAIAERYDFVDIDIVNRIKILREQKQSNDNIIGLLSPEYPKVKVYSKFVASRFGNELTSLASSDKIQKAIESITDTGIQKILLNHLEKYKGKVDAEGNEIAPQTLAFSPDGIKELNLNIKSLNDGKLHQPIFKVRMADAMGTKFPVSEEGTKSSKYVATASGSNAFCGVYQKDKDRKYYVPTLRESIFNLKDGYDPCLSVHPEDPDYKLIFVLNPNDLVYVPTNEELENFETFSLNKISSEQLKRIYRFTDGSGTTMNFVPVNVASLLFNVSKKDQEIIGLSLPIQNELGVGSPQSKNQNSFEGVQIKSVCWKLKVDRLGNISKIE

SEQ ID NO: 3062 - protein, 1244 aa, unidentified
  REGION 1..1244: note = Description of Unknown: Cas Enzyme sequence
MKKILGLDLGSASIGWAVIAENVENGKTKYDILGMGSRIIPYEGTEGKDFAKGTGESRNSLRTKARTARKGYDRYQLRRKYLVDTLVKNQMFPNEVTHSLPKMKLWELRDKAVHSPVSLMELGRLLLWLNQKRGYKSSRSDANLGKKDTEYVATVKSRHEKIKELNLTIGQYFYSKLSADEFFKVKENIFPREAYIEEFDTICKTQQLAHPTILTNELIDKIRNEIIYFQRPLKSQKGLVSVCEFEGFWRIGKDGKEYFVGPKVAPKSSPLFQLAKMWENVNNIKIGSRAGEDMKLTTEQKWAIFQHLDNNEKLTPTDLLKILNLKKENCYFNKQLTKGLVGNITKHAIRQCFGNSDIYENLLKLELKVMENYQCDRVTGEIFDDITIKFIDPKVEQEPFYQLWHTIYSIHDQEECSRVLQTKFNIEQAIANKLASIDFSIHAFGNKSAKVIRKILPYLMEGDGYSEAMSYAGYDHSNSQTKEENLQRKLLDQLKAIPKNSLRQPIVEKILNQMVNVVNAVIEKYGKPDEIRVELARELKQSKEERSDTDKAMNKRQRENDAITKRLEEFGLRATRNNIIKWRLYEEIDNQEKKLNAICVYCGQPISLTEALRGNEVDIEHIIPKSKLFDDSQSNKTLAHRHCNKNKNDLTAYDFMKGKPETVFNEYVERVNQLYANHIIGKAKRDKLLMTESKIPDNFIDRQLRESQYIAKKAREILQTICHNVWSTSGTVTAELRHLWGWDDVTMNLQMAKYRELGLTHQVEWESEHGKNKHEKEVITDWTKRDDHRHHAVDALTIACTKQGFIQRFNTLSAAKTRADMMFDVDERSLEFKEKRSLLEKYIIGEQPLSVDEVEKAVANILISFKSGKKVAVFGKRKVGKRGNKKVVQEKIIVPRGSLSEESVYGKIKKQEEKDYKYLFENPQLIFNPNIKTKVEERLLMFDGDVKKAIASLKKVPIYLDNEKTVVLEKATCLKDEYVIKYSVDTNFNKVDKVVDPKVKEMLQTRLKKFGGKEKEAFKDVQLEDKTVIKWYDDEGLERPIKSVRCFTGLSAVVPVKKDEKGNDIGFVKPGNNHHIVIYTDADENKQQHVCTFWHAVERKKYGIPVIIKKSNEVWDKIQSQPDGIYPKSFLEMLPPPNLNLLVSMQQNEMFILGMATEDIKTAIEQLDYKQISDKLYRMQKMSIKPSSGQIDLVFRHHLETQLIDYENSKKSKRFYNVQSLGALFALNPYKVRIDNLGNLVIQE

SEQ ID NO: 3063 - protein, 1466 aa, unidentified
  REGION 1..1466: note = Description of Unknown: Cas Enzyme sequence
MTKTILGLDLGTNSIGWALIQNDFENKEGKILGMGSRIIPMTQDIKDEFGKGNSVSQTADRTRFRSTRRLRERHLLRRSRLHRVLNVLGFLPEHYAKELDFENRLGQFMAETEPKIAWKKNEKEKFEFLFQQSFHEMLEDFKANGQDIKIPYDWTIYYLRKKAIAHKISKEELAWLVLNFNQKRGYYQLRGDEEEEKANKLVEFYSLKVVDVVPDPEINRKGEIWYSIHLENGWIYRRSSKIDLSDWNNKIRDFIVTTELNDDGSVKTDKEGNERRSFRAPGEEDWTLIKKKTEQDIEHSRKTVGTYIYENLLLNPKQKIKGKLVRTIERKFYKEELETILRKQIELQPELFTDDLYSDCVRELYRNNEVHQIQLSKRDFVHLFVNDIIFYQRPLKSQKSSIGNCALEYRVYKVKGKDGKEFDKKEYLKAIPKSHPLYQEFRIWQWMYNLKIFRREDEADVTQTYINSDEDRARLFDFLMQQKEVDHKNIIKYLLEPQGLKGKILTKEISKYRWNYVYDNEKDESKKYPMNETGYELRRRLAKVENVPNDFLTVEKELQLWHLIYSVTDKVEFEKALHSFAAKYNLDEKSFFENFRKFPPFKSEYGSFSEKAIKKLLPLMRTGKYWNWKNIDLSTQKKIANIINGEFDETIKNRVREKAAQHQLQTETDFHGLPLWLAQYIVYDRHSEAEITGKWQSIEELKKYLEEFKQHSLRNPIVEQVVMETLRVVGDIWEKYGNGKQDFFNEIHVELGREMRNTAEERKRLTAIVSDNEATNLRLKELLIELKENSDGKLNVENVRPHSPMQQEALKIFEDGALSTYDVPDDILKISKTAQPSKSELQRYKLWLEQRYQSPYTGKIIPLGKLFTSEYEIEHIIPQSRYFDDSFSNKIICESAVNKLKDKQLGFAFIKKHAGEIVQDGDKQFKVLTESEYKDFVKNHYSKNQSKKRKLLLEEIPDAMIERQLNDTRYTSRFISNILSNIVRSEDGKDEEFRSKNVLPGNGKITQTLRQDWGLNDIWNELILPRFERMNQLTDSNQFTSKNTEGKTIPAIPLEYSKGFQKKRIDHRHHALDALVIACATREHIQYLNNENAKSQKYHLQMGLAQKLRKMETIEVFKWKKADNDVWIKCEEKIEKRVPKDYLKPWETFTQDTKAQLGKIVVSFKQNIRVINKTNNKYEKFVEKNGKISREFVSQTKGDSWAIRKPMHKDTVSGRIDLPRIKVPKGKMLTATRKSVDWSFNLNTIESITDTGIQKILKNYLNFKGNKPEIAFSPEGLEEMNKSIAQFNDGKAHQPIYKARIFELGSKFALGETGNKKHKYVEAAKGTNLFFAVYADNNGKRSYDTIPLNIVVERQKQGLRSVPDTNEKGHHLLFYLSPNDLVYVPIEDEKDAADGIDFGKLSKEQVNRIYKIISFTGNRLYAVPVSVATVIVNKLEYTQLNKIEFIKDKELCFKLDVDRLGNITKA

SEQ ID NO: 3064 - protein, 1461 aa, unidentified
  REGION 1..1461: note = Description of Unknown: Cas Enzyme sequence
MNKKILGLDLGTNSIGWALVEQDFENKKGRILGMGSRIIPMGQDILGDFGKGNSVSQTAERTRYRSVRRLRERNLLRRERLHRVLNVLGFLPEHYAAEIDFEKRLGKFLEETEPKLAWKKDIDGKFSFLFQSSFNEMLADFKANGQDIKIPYDWTIYYLRKKALTQKITKEELAWLILNFNQKRGYYQLRGEEEEETTNKLVEFHSLKIVDVFADETPNKKGELWYSLKLENGWEYRRSSKIPLFDWKDKVRDFIVTSDLNDNGSVKIDKEGKEKRSFRAPSEDDWTLLKKKTEHEIEQSKKTVGKYIYETLLQNPTQKIRGKLVRTIERKFYKEELRVILEKQIDLQPNLFTDDIFNACVCELYRSNEAHQLQLSKRDFVHLFLDDIIFYQRPLRSQKSSIGNCSLEYRTYKVNGEEKKEYLKVIPKSNPYYQEFRVWQWLYNLKIYAQTDDIDVTETFLKSIEDLENLFEFLMSKKEVDHKDVLKYFFKDLKGKVQTAEIAKYRWNYVYDSEKDESKTYPMNETGYEIRRRLEKVENVPANFLNREIEQHLWHIIFSVTDKKEYEAALETFAKKHSLYFVPKSERDDKNPNKKCFVYNFRNMVWKEKNYGSYSEKAIKKLLPLMRLGKYWNWENIDLKTQTRIDKVLTGEFDEEMQIRVREKAITLTEHGHFQGLQLSLASYVVYNRHSEAGNISKWNTTEDLNTFLIEFKQHSLRNPIVEQVITETLRVVKDIWTKYGNGAKDFFDEIHIELGREMKNTAEDRKRITNQISESENTNLRIKALIMELKENSDGKLPVDDVRPYSPTQQEALKIYEDGVLNSNIEVPDDIVKISKSAQPTKAELARYKLWLEQKYRSPYTGKAIPLSKLFTSAYEIEHVIPQSLYFDDSFSNKVICEAEVNSLKNKQLALEFIKNHHGQKVSTSIGLVEIFSEEAFTSFVKEHYEKNHSKKTKLLLEEIPEKMIERQMNDTRYISKYISSVLSNIVREEKDDEGVNSKNILPGNGKITAKLKQDWGLNDVWNELILWRFERMNELTKTTAFTSKNTSNKIIPTVPLELSKGFQKKRIDHRHHAMDALIIACATRNHVNLLNNQSAKSDTKRYDLEYKLRNTEKWTDKNGKERDKFTEFKKPWETFTQDTRNELEKTVVSFKQNLRVINKATNTYERFENGKKTDKKQEGVNWAIRKPMHKDTVSGKVELKRIKVPKDKILTATRKSIDTSFDIKTIESITDTGIQKILKNYLASKNNLPELAFSPEGIEDMNKNIAQYNDGKPHQPIYKARIFELGSKFPLGQTGNKKDKYVEAAKGTNLFFAIYKDEKGKRSYDTIPLNVVIERQKQGLLSVPEVNSNGHHLLFYLSPNDLVYVPTKEEIDNSTLVDFNNLSKEQINRIYKMEKASGSECYFIRYDIASLIKQYDPKSKVGELSSQNKLETTMDADGERIKEVCIKLKVDRLGNISKA

SEQ ID NO: 3065 - protein, 1379 aa, unidentified
  REGION 1..1379: note = Description of Unknown: Cas Enzyme sequence
MKRTLGLDLGTNSIGWAIIEQEDGAKKLAAAGSVIFSEGVARKEGKEIPSVSKRTSKRRTRRLYMRRRMRKLRILGRLIRNGMCPLGEAARTVWEEKGLYPKEDAFTEWLILNPYELRAKGLEEKLSSHELGRVLYHIAQRRGFRSNRKGGDGEQRTLHAGDPKKGITGYDETKELIEKYGTLGKAGAELAKTHTPIRNRYVMRVDLIDEFNQLWEVQKNFHPILTDALKAELGDGKNGDLFFQRPLKGKKADVGRCTLESGKKRAPLSSPIVEVFNVLHAVNNIKLNGEPLSEKGRNAVLPLFFRKSAGTFPIDDVRKALKKAKIEGELNYEKWEVRAAKEGKEVKLTGAKTIAHLADLWNEDPLNILRAYGIMRAEDAGERQKWDDRWNIIHREQNAWGEISERKEKGQYVRRSESLHEQRDLKEYAGETGVWKFNAEKIEALKKFDPKDGYHNLSARAIGRILPYLYDGIPYHYAVLYANLPAVFKVVHKKCDANGQPVLDVHGDFITEMRTGANGKAEPMVDDRWSLMTAEQREAIKAGIRQEVEGQQQYSVKTLLHNGLIRNYLDEFGDEGRRENFWNSSWEVRLAKAIQEAFTRGQKEAVGEAGLRDLARQIKARFIHAIESHDRVGFEKVQSMEERIKLWLIDTYPEYELGKAIDKRGLKRRVDQLYHHSAISTYRERDDRLGSPVTRGMKNPMVYRALHTLRRLVNQMIEEKLIDKKTAVHIEMARQLDSANKRRAWEKYQAEMRTYNEEAEKEARAYFESHGNTNDPTEDEITRMWLYQEARHLFGEAKCVYTGKPIGVADLFNGGVEIEHTWPRSKTADNSMANKMLCDTTYNRDVKKGQLPSGLPNYNHPARAAGRDCPALVESTKPIYAKWKKYERDVNALRNKSKAATTKEQKDRAIQDRWYAQFFRDYWRTKYEHLTAEEIKPRFLNRQLVATAQITKLARSYMNSYFDKVVCYKPEALSAFRKEWMGESFVREKDRSKHSHHAVDAAVCAAVDHTAFNALAAYYEVHDSTDPTASFAHPWETFGSEMHALRDGALIYHVDKASIGRRSSFKREIKLKNGRVIKWDVGRATGDTVRGSLHEDTYYGRVKRKNAETKEYELQTVIRKSLLGVTQFPFLEEDKANVVDPEIKALLAEADLEAIKVNGGLDMKTKNGDGFTMQKMKKVRVMIKGRVKNPVGIKAHRDRLPGFEHKHQLWVTGGGNPIAAVYADERGRPYGYVFSQLELAQFAKDAKRTTRASLAQLIPKTHPAHPEWPVMLLDNRPFIVHAGQKVVMYKSGPEEIERNDHEDMNRRTYVIDELQIKGNSFRLLMTNVLDARKPEDIPKETESVWDPNSPLRRLRFVLSKLKAQFDGMDIDLSPLPPSR

SEQ ID NO: 3066 - protein, 1410 aa, unidentified
  REGION 1..1410: note = Description of Unknown: Cas Enzyme sequence
MEKVIGIDLGTNSIGWALRNLLEKENQIIDKGVLIFDKGVGEVKGIETPLVKPRTDARGKRRNYQAEKYRKWELLEFLIEKKMCPLTTKELDEWRKYKKGVGRKYPQSEKFIQWLRFDFNGDSKPDFKLFGFDKHESYYLFRMLVVSEDKHHKEIFESNSHILGRVLYQIVQRRGYRGRDDEDEEAKTILKGSEKNGTIGVEDIIPYIEKYKTLGAALYYLQKEKKERIRKRYNLRTDYEQELKEICRVQNFDENCYKRLWKAIIWQRPLRSQKGLVGICTFEKNKARCPVSHPLYEEYRTWVFINNLKIELPENTDKVKYLKDNIYPIFYKASDDFKLSSVAKVLDKVGGKITARFPHGIKDEKGKYKKDGPDTKVVSAKLLNSFQEIFGENWKVLKIETNNTKQVRKKDGRVSEHQITYTFEDFWHVLFSFDSKDKLKEFAKEKLNLNEDQSERFCKIRLQQGYATLSLSAIKKLLPYLTQGFIYSEAVYLANLHKVLGAKELTDGIIEEFSIEVRKIIDEQKNEKQLISVVNNLISEQLSNENRFGMKPDYKLDADDKKTIEGKLQDMYGSTTWKELTEDERASDIDFVGDHYESFLQKPITAKKDGLFLKIPRLHDRIFTYLKDKYTLPDKNIKYLWHPSEQETYLPAKEKDGIKQLGDPQPISRGFKNPMALKTLHKLKQLMNYLLKTGKIDETTRVVVEIARELNDANRRKAIEKWQRDREKQNDEYKKKISEIAIECDLNLDINNKEIVEKYRLWIEQNHTCLYTGQIIDVCDLFNGTRFDFEHSIPASMSFDNELKNLTIADSRYNREVKKKMIPFKCPNYNSEYVYEGITYSAIKPRLKFIEEKVNHLENLLDEWRTKSKFASTKDIKDACIQRKHLISFELEYWRKKLDTFTCKEYKAGWRNSQLRDTQIVTKYALPYLKTAFNKVDVQKGSVTAAFREIYKIQPRLEKKDRSKHSHHAIDAAVLTLIPPSANRDKILLRYNEEKDKNSNNTYHEKPSQWSSFESRHILSIEDDVLINFQAQHRTLTDTYKKVRKRGKQQFVKEKHQDGKWQYKLDEKGDKIPLVAQGDTIRGALHNDSFFGLVKQPEYKVEDNKFIPLTDGIGNFIFQKNEKRDDDLFVVKKELLSDAAKFSKIEDLEKIIDPNLKSFLGKKIGKRISNGKTFIEAISEPIWAFDKSEDKNGNLIRPIRHIRCKVKGGGGGYVTNPAHIREKQAYLSSKSYKNSDYALNGETYLCALYQVAFEDRKVRETRIFSILDIAKTIGLNGKENSVDEKLIVKKGKKQIEIPLYAKLLIGQKVIFYKDSIDDLKTISKDSLNKLVYYIIKFEDGKISFKHNLTALSEDTIKSEMKKRELPETGASFIDFERPILKLRLARDNFNFAIEGKHFEVKPDGKIEWSF

SEQ ID NO: 3067 - protein, 1439 aa, unidentified
  REGION 1..1439: note = Description of Unknown: Cas Enzyme sequence
MGGKNILGLDLGTTSIGFAHVIEGETPDQSSIERIGVRVIPLSTDEQINFEKGKPITTNAERRLKRGMRRNLNRYQDRRRNLIQALFNAKLITKESILAEDGKGTTHETWCLRAKSVTEKIEKEQFARVLLAINKKRGYKSSRKAKTEEEGQAIDGMAIAKRLYEENLTPGQLVYQMLKDGKKAIPDFYRSDLQVEFDKVWDCQHRFHSEIFTNEFYRELQGKGQRATSTSFWNKYKFNTSENKGTREEKRLRAYEWRAKALSEKLEKEEAAYVITDINNNLNNSSGYLGAISDRSKELYFRKETVGQYLFRQLQDNPHTSLRNQVFYRQDYLDEFEAIWKEQSIYHIELTNALKSEVRDIIIFYQRRLKSQKGLISICELENREIEIERGGKKVQKRIGSRVAPKSSPLFQEFKIWQTLSNVFIRQKGSRKRELLSRAGQTSTEEGVYSLDLQAKQQLFEELNIRGNLKADKVIELLGYNPREWELNYTQLEGNQTNKNLYKAYLKILDAEGYDIRDLLKAKSFKDEIELEDLSASALEIKQQVRSIFSSLDINTAILDFSVEMDGKEFEQQASFQLWHLLHSYEEDTSVSGNEKLYELLNKKFGFKREHSQILANIALPDDYGNLSAKAIHRIYPHLKELQYDKACAAAGYRHSAASLTSEEIAKRPLKDRMELLKKNSLRNPVVEKILNQMVNVINSLIEVNSKKDLKGNVTECFRFDEIRIELARELKKNAAERAEMTSNINEAKAKHEKIIKLLQNEFGIKNPSRNDIIRYKLYEELKNNGYKDLYTDTYISRDILFSKQIDIDHIIPQARLFDDSFSNKTVIYRKDNLKKGNMTAFDYLESQYGKESAEEFLKRLENLFEKGKKSLEEGISKAKFQKLQKRSSEIGDGFIERDLRDSQYIAKKAKSMLYDISRSVVSTSGSITARLREDWDLVNIMQELNIEKFRKLGLTEKVKKKDGSMKERIVDWSKRNDHRHHAMDALTVAFTKHNHIQYLNYLNARFNENHKQHRNIKAIEDKEMLVIKDDRGNSKRLFNLPMPNFRTEAKDQLEKILVSFKAKNKVVTKNKNKIKAAKGEKIKTEFTPRGQLHKETIYGEYRYPVHKEEKVGPKFDLETINKVDNPIFKMLLIKRLTENDNDPKKAFAGKNTLSKNPIYLDNSKSETLAETMGLTWFEKGYSIRKDVTPENFKDIKVIEKVLDEGVKRTLHARLKEYGNDPKKAFSDLDKYPIWLNREKGICIKRVTISGVSNVEALHYKKDHFGNFILGENNSKIPADFVSTGNNHHVAIYRDENGHLLERVVSFYEAVILTNAGLPVVDREFNKGIGWQFMFSIKQNEYFVFPNEKTSFNPNSIDLVDPKNNTMISPNLYRVQKLATKNYLFTNHLETLATDADTLKNKKLLSGVTFQFIQTPAKLSNIIKVRINHIGQIVKVGEY

SEQ ID NO: 3068 - protein, 1322 aa, unidentified
  REGION 1..1322: note = Description of Unknown: Cas Enzyme sequence
MDPDFIKEYETGQKITKNAKRRQMRGARRLLQRYHQRRDNLIEVLKAIGAVESADQIQQPQFIKEYDQEFTKLIATGKAKTAWYNYFLRAKALSSPVTLKELALILYHLNQRRGYKDIGELMDEMAGFEKKDEEGYSKSYEILKIVAVSPDNDRKGKREVYNVTLEDGRKPCTTTSKVLNEMIGQEKELEVRVRTNKKGEITYELALPDNAAWQYRLDALNKKLTDSELTPGNFFWRKLHNEPNYRVKQNLVYRDRYLDEYDQIMAEQIKHHPFLVDPKIYIDILTKLIPANIPERNRWKSSGLISFIRNYIIYYQRPLKSQRHNVDVCRYEKGFKTYDENGDILVNRPAYVAPSSSPLFQQFRVWQDLAHLGFKDKYGYTTLLSNTEKEILYRELLRVGEITHSAIYKILGKDKKLFPEINRPEDKKIAGNETLNLLKKALTRVEYNNLRLLEEDETFLERLWHLLYSVKDQNARKKSLIRQFGFTDSEAMSLMSVNFPGGHSNLSSKAIKKLLPLMRAGNYYIERDVCPEAKNQINEFLSGTFNEVDVNKVTKITEGRLSVSDFQGLLYWEAAWLVYGSHTTNDDAEPFKQPDDIKRFPLHSLRNPVVEQIVNETLMVMKDIWNTYGKPDEIVVELAREMKMTADNRKKMTEANSKAEKIRKACAKELIEQFNKPNPSRNDILKYQLWNQQYKRCIYSGESIQAGDIFSGAVDIDHIIPRQRFFDDSQNNKVLAFKTENQNKGNKTAYEYMNQTGRWEGYKERVDALRSTKGINMKKYNLLLAEEIPDDFINRQLQETRFIAVKVTSELKRLTPNVRSSIGTITDHLKQSWRLNEVFKEVQLPRFERLESLFPNISWINHVTDKEGHPILQLCGWDKRIDHRHHALDAIIIACTTYSMINQLNHLNTLYGQLQLEGKPAQHFPLPFTGFFSKLRDVLSGIVVSIKSTDKLVTKAKNTITRFDPETNRYYNSKQEKNGWAVRGALHDEQPLGELIRQEKEAVSKVLDKLAANPMLLDEIDKSSKYLAVPWQREAIKKHLALFNNDFIMMKRGLKKMPLLNDYGKAIESITVFKKYYTKIRPIDVSLTLKQVNMIIDPLIKQEVKSLLEQNGGDPKKAFTTDNLISWNAQRKVPVFKVKCKVDDTEVGTSEGRTLLTKQSPYNYIKHIEKGDNYALLINEEITNNKRTFEVISFFDAVDFKLTGIPITSEKHGFKSFILRKNSLVYIPTPEENIGSIDLSQTKRLNERIYRVVKFSGKQFYFIPVAISQVIKNPLSEPGLIIEEYGSQSCTEFHGISDSRIKIAEVCLPLGINRLGQLTKLG

SEQ ID NO: 3069 - protein, 1553 aa, unidentified
  REGION 1..1553: note = Description of Unknown: Cas Enzyme sequence
MKKILGLDLGTNSIGWALVQQDFSSKTGRILGLGSRIIPMSQEILSEFDKGNSISQTATRTGFRSTRHLRERHLLRRERLNRVLNVLGFLPEHYANQIDFEKRLGQFIDEKEPKVAWKKITDNKYEFIFKKSFEEMLSDFKSNQPELLNRKNRKGEDAKIAYDWTIYYLRKKALSQKLEKEELAWLLLNFNQKRGYYQLRGENDETPSNTREYVELLRIVQIVKGEGDKKNNKKHWYTITLENGWTYSATFSTEPQWLNIEKEFLITEELDENGSIKIVKERKQDKEGKEKRKITPLPSFEEIELMSKSDQDKIYKKIKVKTEITISNSGKTVGSYIYDILLQNPSQKIRGKLVRTIERKFYKEELKAILQKQIKLQPELFSDELYNDCVRELYRNNEVRQSTLGKRDFIHLFLDDIIFYQRPLKSQKSSIGNCMLEYRIHKVNKKDEFGSPVKNGFEKNENGKDIEVKEYLKVIPKSNPYYQEFRIWQWLYNLKIYRKEDDTDATSEFINSIDTIENLFAFLMTKKEVDHEDVLKYLFESRKLKPKELKAEIGKYRWNYVYESVKGISKKYPCNETGYEIKKRLEKVSNISNDFLERIDTKEIINKKGKKETVSLGTREYQIWNIIYSVTDKLDYEKALKSFAKKYGIDEESFVENFKKFPPFKSEYGSYSEKAIKRLLSLMRLGKYWNWQVVDAKTKNRITKIAAGECDEEIKNRIREKAIHLTEQTHFQGLQLWLAQYIIYDRHSEAALVGKWKSVADLKKYLEEFKQHSLRNPIVEQVVTETLRVVQDIWTKYGNGTENYFDEIHIELGREMKNTAGDRKQITNQVFENENTNLRIKALIMELKENSDGKLSVENVRPYSPIQQEALKIFEDGILNSETEIPDDIVKISKTAQPSKSELQRYKLWLEQRYRSPYTGEMIPLNRLFTADYEIEHIIPQSRYFDDSFNNKVICETVVNGNPYKDNQLGLEFIKNQGGRIVDELSKNGKVIKIFTENEYKDFVKQHYDKSRSKRNKLLLEEIPDKMIERQLNDTRYISKLISNLLSNAVRADKDDDGINSKNVIHSNGKITSILKQDWGLNDVWNELILPRFERMNQLTNSRDYTAWNENHQKFLPTVPLNLSKGFQKKRVDHRHHALDALVVACATRDHINLLNNKHAKSNERFDLNRKLRKYEKVQYTDKRSNKLIERDVPKDFLKPWNTITENVREALEKIVVSFKQRLRVINKTTNQYEKYVEKNGKKIKEMVIQTKGDSWAIRKPMHKDTISGEVKLDRIKVSKEKVLTATRKFVDASFNLETIDSITDTGIQKILKNYLASKDNKPELAFSSEGLDEMNKNIALYNDGKYHKPIYKARIFEIGSKFPLGETGNKKNKFVEAAKGTNLFFVTYERKDNKSRMFDTIPLNEVIEHQKQQVAEDIPKANRTPIPIKRTLEDRGKEVEVNYQFHLSPNDLVYIPTNDERENINRINWESLNSEQVKRIFVVNDFSSTCYFTPNHLAKSIAPKEVDLCFDTNKNKLTGSFDTKTASFEGKQIKDECFKLKVDRLGNIKLAQ

SEQ ID NO: 3070 - protein, 1410 aa, unidentified
  REGION 1..1410: note = Description of Unknown: Cas Enzyme sequence
MEKILGLDLGTNSIGWAIREVNNSLENQIIDKGVMTFDKGVAEDKSGEHPMVQKRTESRGKRRNYQAEKYRKWELLECLINNNMCPLTIEELNEWRHYTKGIGRKYPQSEKFIQWLRFDFDGDSKPDFERLGYSKHSSYYLFRLLIIDETKIQVFKNEPQIIGRVLYQLVQRRGYNDGQNIEEGEKDELSKTIMKGGGEAGAVGVNDILPFIEKHKTLGAALYHLQKEQNVRIRKRYNLRSHYENEIREICRVQNLSHLFKVFWGSIIWQRPLRGQKGLVGVCTFENNKRRCPISHPLYEEYRTWVFINNLKIKPIDDRDTRTDQEKQEELKKVLSKTVYPQFFKAASDFKLSSIAKELKKTGFEITAKFPEDTKVISLSFLYKMRELFGDDWSDEIGWRDLLKRNPKAQKYNIEDLWHLHFVKSDNKETGESSQNYLRRFALEKLHLDESKADTFSKLRLQQGYATLSLTAIRKILPYLQQGFIYSEAIYLANLHRVMGVAKITDSIVAHFSEEVRKIIRHNNSERKLIQAINELINDQLNSEARFGMNTSYRLDDDDHTDIHKKLLDVFGKYSWGRLTTEERDSTTKFVSDKYLAFLQKEIHAKSVFEKTGRLHDKIFGWIKETYSVADENIKYLWHPSEQDNYERARNYQEIKLRDKMIFIEDSKVDTFLKENTSATKGQFNGELLGNPEPISKGFKNPMALKTMYKLKKLVNYLIGVGKIDKDTRIVVEIARELNDANKRKAIERWQREREKENDKYKKTIDEINDECKTNLDRDDKNLIDKIRLWEEQKKICIYTGNTIGLCDVLNGAKYDFEHTIPASMSFDNELKNLTIADKKYNQQIKGKRLPSECPNYDKEYTYEAVTYPPILSSLQNIFGRITETEKKIKGKVIKRNSFKKIEELEDEYAEWKSKTSDDKQIKDNIIIRRHLIRMELDYWRYKLLTFTTTEYKAGWRNSQLRDTQTITKYALPYLKTVFNKVDVQKGNITSDFRKIYKIQSRLEKKERTKHSHHAIDAAVLTLIPPAVVRDKILLRYNEAQENQQGYHEKPRYWNSFHHQHIISMEDDVLINFQAQHRTLTPTYKEVRKRGKVQYVKEKLSTGKWQYKLDKERNKIPLIANGASIRGQLHKESFFGAIKNKGELNLVERYSISSFTSIADCKNIVDDAVREIVRLELEKRINEGQSFDKAKLEPIPFPNGKAIIKKVRCKVAAGRGYLTPDRALKIHEHTYQSRHSYKQNVYAQNDQNTYCLYYEKEEDNKIHRAFRIVGLFELAKLGINREVELFQNEAFNSIEVGKGTKNKKLSLSFILKVGAKALFYKEHLDELKGGSSKELSQQLFRIYKFNEMGTPNLFLQNHIEARKNELLDDGDTSFNPSSYQYRLKIKADKFTAAIEGKHFEVMPDGVIKWI

SEQ ID NO: 3071 - protein, 1252 aa, unidentified
  REGION 1..1252: note = Description of Unknown: Cas Enzyme sequence
MEKILGLDLGVASIGWSLIERDNASSSIIAMGTRVVPLTTDDADEFSKGNAITKNQKRTQRRTARKGLDRFQLRRKYLTDALTKIGMMPSLVLMHGEQHRVWELRSRGVSERLSKPELGRVLYHMLHKRGYRSGRSEANKDKKETEHVAGILSNAQRLHESNRTIGQYMHEELVTNPHFMVKNTIFPRNVYAEEFDAIIKQQQLHYPEVLTHDVVLNLRDRILFYQRKLKSQKGLVGRCELENHTVAKTVNGIERTFDSGPRVAPRSSPLAQLTAIWEAVNNLSIRDASNNAYTFTLEDKQNIVVELNAGDVSETELLKILKLKKSDGWRGNKSIAKGIRGNDTRRQLGKILGFDHPALRFDLQFLSLNVDAHTFDHGSGEIRETKPGAQVDPAFENEPLYRLWHIVYSMPDDDECKNALRNFKINGEPWPIEGQQAQDMAELDLKHPGFANKSSRSMRKILPYLMQGYGYSDACELAGYNHSAWQTVHENAQRTLLPKLALLRKGSLRQPVVEKILNQMIHIVNDIIDPERGWVTTEDRENGLFTVHIELARELRQSQEERNKTYKSNSKRDRENKSIAERIGSEYASKGIRPTRRNIVKWRMFQEISNEESKLNAQCIYCGQPFSLTAAMSGAEVDVEHIIPRTLLFDDSQGNKTLAHRTCNAKKENRTAWDYMESLGDAKLQAYIERVNNLHKNDIISSYKRDRLLMPSSKIPTDFINRQLGETRYISRKAKEILSDITRDVVATSGAITGYLREKWGWGNVTMSLNLARFRAAGLTETREEVHHDGTVHQHEYIKDWSKRNDHRHHAIDALVVACTTRSLIQQINTLAAKETSISLFGKSEFESERRALLEGYLVGQRPFNTSQVRDAVSRILVSFKAGKKVATKGTRRVHRDGKTSVAQTGIIVPRGPLHEESVYGSITGIEKRRSVKEMFAEPHRIYKPYIRDLVQARIAQFDGDYKTALKSLKTDPIYLDKEKSAVLEYGTMTSNEVVIKYPITSVKAKDVPYIVDHGVREIVRSRLEAFGNDEKKAFAELDENPVWFNEEKNIKIRSVRMYTGLSSAESVRRTDDGRPLDFVKPGNNHHIALYKDSEGKVHIHACTFWHAVERKRRGLPVVITDTRTVWNEVLNSESQDEAFQCKLPPDGLTLELSFQQNEMFLLGIDPAERSRTLEDGRSDALSEYLYRVQKLSGGDGELYLVFRHHVETELVDSGEAINARRFVRIQSTKALYAANPLKVSISRVGTIDIAK

SEQ ID NO: 3072 - protein, 1239 aa, unidentified
  REGION 1..1239: note = Description of Unknown: Cas Enzyme sequence
MEKKILGLDLGSTSIGWALIKESDDNRRQVIRMGCRIIPLDSDEKNSFEQGKSFTKNQERRQFRTMRRNNFRYKLRRTYLLQELKEHGMWDENLLHIAREQLWELRAKAVTEKISLTELGRVLYHLNQRRGFKSGSKHDLGDEDATKTQKEMLSKFQQLKDEGKTIGQKFYDEIKANPHYRVKEQTYPREAYMEEYNAIMSCQQKFYPEVLTDNFVHKLRDQIIFYQRPLKSQKKLVSICEFEGKWVKNKNGEPIFIGPRVAPKSSPLFQYERIWEALNNIEIGKEKLSLDVKKTLFSQLYEGKNLNFSDIKKLLGTDKYVNFPKIQGNTTYPKLKEILSGTAFQQLLQFEVEKHIIDYEFIHLETGEVQQKKIVAETIIQEPLYQLWHTIYAISDIEECKKALIKKFNLPEEIAQKLAAIDFGKDGYGNKSAKAIRKLLPYLMEGKQYDKAVSEAGYRNHTHIQPITEIKDKLDLLPKNSLRQPIVEKILNQMIHVVNQIIDPAEGLVTPEERKNGQFEIRIELARELKASKAERKKISENIEKNEKSNKIIAEKLEKEYNLTPNRKTITKWKLFYGRKIAKGSKGKKDNIAFNHEANELNGRCLYCGKSFSLTEALTGENIDVDHIIPRAVYFDDSLENKILVHSQCNRDKSNQTAYDYMKSKGEEALKLYEERVEELYKKEFITKRKYQYLLMSSKDIPNDFLNRDLRETAYISRKAKEILRSITAKQIQVTSGAVTGKLRHLWGWNDILSDDESNESIETNIADETQSNSEDSTENQTTQTKKKRDDHRHHAIDALVIACTKQGFIQRINTLSSQEIQQQIREELKNTQVKLDAYENRLSLLEKYLISQKPFETHEVKKHVERILISSKPGKKVATWSKNIYPSGKIQKVLTPRGKLHEETYYGEIKVPVRKTIDDFFSAYKKNPDILENIISPKLRELIKERLAEYHNDAKKVKKSLKQQPIYVDKENKRKLENVLCYETKFVYKFPVKNILKDTKKLKNVVDVKVKEILANVSKDANKDKESVLYFNPDKHITIRSVRVEALFVPTPLYLNKKNTPYVISSNNHHIAIYKDEQGKLHEHVCTFWHAVQRKLYGFPVIITDPAQQEELLSKAKERLKDQGKDLPETFIQNLPEPSWTFLFSMQSGEHFILELEHEQAKQWIQEKAYDKLSPYVYRVQKLSSLFYVFAHHTKTTADFDKKSRRVQSLTALKLIKPIKIHLNVLGDIDYYEPIKFE

SEQ ID NO: 3073 - protein, 505 aa, unidentified
  REGION 1..505: note = Description of Unknown: Cas Enzyme sequence
CKLQVLRHIFYNFANVLTKITLIMAKILGLDLGTNSIGWALVDNTSKQIVKVGSRIIPMDAQAMSDFESGNLQSSAAARTGFRGIRRLNERTELRRQRLLRVLNVLNFLPTHFKKQIDFDKHPGQFINHGEPLLPYRKDSNDKNEFIFMDSFKEMLEGFRNIHPDLLAEGRKIPYDWTIYYLRKKALFQPIKREELAWILLNFNTKRGYYQLRGEEDETSTSKNEEYKVLTVINVEKLDAVKNKKGLFWYDITYDNGAKQRKTGIIDPRNIGDKVEVIVTTTLDKEGNIAFDKEGNSKIKLRDPQEGDWTLMKKRTEADLNNRNITVGEYIYDSILADPTIKVRGKLVKTIERKYYKEELIKIINKQCEFIPELNDSNIYEKCVRELYHNNEAHIQSLSQSSFTSFFVDDIIFYQRPLKSKKSEIANCPYEHYQFVNKDTGEIVKQPIKVIPKSHPIYQEFRLWQFISNLRVIQKEKTENGKLKTDVDVTDNFINTTEGRCKLYE

SEQ ID NO: 3074 - protein, 1005 aa, unidentified
  REGION 1..1005: note = Description of Unknown: Cas Enzyme sequence
MRKDINNNQFVKLICKENASLYRWNYVEDGKNYPCNETRYLINRDNMLQSDEQHNRKEIELWHILYSVNDPILLRKALNTYANKNGLDVETFVEDHIHIKPFDADYGAYSEKALKRLLPLMRIGKYWHEEDIDAKTRSKIDIIINGEADDTIYDVAAKNHISLTSIDSFQGLPLFLAEMIVYGKRKEVNVWKSPDDITYYLKYDFKQHSLHNPVVETVLGETLRVVRDIWAKYGKIDEIHVEMGRDLKQPKDKRIKDMQRNSNNEHTNLRIRRLLQEFVNPDCEIDNVRPYSPSQMELFKIYETDVLNSNEPDDDILSIIKDLGDTSKHVPHQEIIKYRLWLEQRYTSPYTGDMIPLSKLFTPAYEIEHVIPQSRYFDDSLSNKVICESEVNKLKDNRLGYEFIVAEHGHIIGKHRVFDKVQYEEYVREHYANDRLKMKKLLMEDIPDSFIQKQLNDSRYIARKTIEILSSVVRITDESGEIADNDKAATAINVIATNGSITDYLKKDWGVKQVWSHIIAPRFERLNEITSTEQFGKWIEKNGERYFQTEVPIDLSSGFNKKRIDHRHHAMDAIVIACATRNHVNYLNNSAAIDKKTDLRMDLRSKLCFKDKTDGNGNYVWRLNKPWDTFTQDVESQLDSIIVSFKQNLRVINKMTNHYSHYVNGKKEIVPQNTTDSWAVRKSLHKATVSGAVRLQTQKKVSLKDALNTDWHLIADKDVRKAIKNLIEQYHKFDAKIILKYFKDRKNKLDKKDISKVMVYYTPEVPELSASRVMVDDTFDEKKINAVTDSGIRNILLNHLKANDNNPKLAFSPEGITRMNQNLKELNGGKDHKPIIKVRKYETLGMKFSIGERGNKNKKYVEADKGTNLFFAIYADKDGNRSFESIPFYEAMECMKNKLPVAKDINDKGERLQFVLSPGDLVVVTDENGTIPDMENTRIYKVVSLNKGQAFFIPQYTATPIINTAELGSNNKSENSWDGVAIKKNCFKLIVDRLGNIEKIIKGNV

SEQ ID NO: 3075 - protein, 1490 aa, unidentified
  REGION 1..1490: note = Description of Unknown: Cas Enzyme sequence
MAKILGLDLGTNSIGWALVDNTSKQIIKAGSRIIPMDAKAMSDFESGTLQSSAAARTGFRGIRRLNERAELRRQRLLRVLNVLNFLPAHFQKQIDFDKHPGQFINHGEPLLPYRKDSNNKNEFIFMDSFKEMLEEFREIHPEMLAEGRKIPYDWTIYYLRKKALIQPIKREELAWILLNFNTKRGYYQLRGEEEDASASKNEEYKVLTVVNVEKLDAVKNRKGLYWYDITYDNGAKQRKTGIVDPRNIGDQVEVIVTTTLDKEGNIAFDKEGNPKIKLRDPQEGDWTLMKKRTEADLNNRNITVGEYIYDSILADPTIKVRGKLVKTIERKYYKEELIKILNKQCKFIPELSDSNIYEKCVRELYHNNEAHIQSLSQSSFTSFFVDDIIFYQRPLKSKKSEIANCPYEHYQFVNKNTGEIVKQPIKVIPKSHPIYQEFRLWQFISNLRVIQKEKNENGKLKTDVDVTDEFINTAEKRCKLYEQLNVRKDINNNQFVKLICKENASLYRWNYVEDAKTYPCNETRYLINRDNVLQSDEQCNRKEIELWHILYSVSDPILLRKALNTFATKNGLDVESFVENHIHIKPFNADYGAYSEKALKRLLPLMRIGKYWHEENINAKTRSKIDIIIAGEADDAIYDVAAKNHISLTSIDSFQGLPLFLTEMIVYGKRKEVGIWKSPDDITYYLKYDFKQHSLRNPVVETVLGETLRVVRDIWAKYGKIDEIHVEMGRNLKQSKDKRIKDMQRNSNNEHTNLRIRRLLQEFVNPDCEIDNVRPYSPSQMELFKIYETDVLNSNEPDDDILSIIKDLGDTTKHVSHQDIIKYRLWLEQRYTSPYTGDMIPLSKLFTPAYEIEHVIPQSRYFDDSLSNKVICESEVNKLKDNRLGYEFIVAEHGHIIGKHRVFDKVQYEEYVREHYANDRLKMKKLLMEDIPDSFIQKQLNDSRYIARKTIEILSSVVRITDESGEIADNDKAATAINVIATNGSITDHLKKDWGVNQVWNHIIAPRFERLNKITSTEQFGKWIEKNGERYFQTEVPIDLSPGFNKKRIDHRHHAMDAIVIACATRNHVNYLNNSAAIDNQKDLRMDLRSKLCFKDKTDGNGNYVWRLNKPWDSFTQDVESQLSSIIVSFKQNLRVINKMTNHYSHYVNGKKKIVSQNSTDSWAVRKSLHKATVSGAVRLQTQKKVSLKDALNTDWHLITDKEVRKAIKDIIAQYHKFDAKIILKYFKDRKNELNGKDISKVIVYYTPEVPELSASRIAIDDTFDEKKINAVTDSGIRNILLNHFKANDSDPKLAFSADGISRMNQNLKKLNGGKDHKPIIKVRKSETLGMKFSIGERGNKNKKYVEADKGTNLFFAIYADKDGNRSFESIPFNESLECMKNNLPVAKDINDKSEKLQFVLSPGDLVVVTDENGTVPNMENAKIYKMMSSSDKDCFFIPQSVAMPIVKTAELGSNNKSEKSWDGVAIKKNCFKLILDRLGNVEKIIKGNV

SEQ ID NO: 3076 - protein, 1542 aa, unidentified
  REGION 1..1542: note = Description of Unknown: Cas Enzyme sequence
MKDDGQEPKWSQRNNPYCDLLKNSVQIYNFFIIHTIVSEKNCRFGENLKKNRTMRRILGLDLGTNSIGWAVVTTNQDEEGHEHIIGIEGDGSRIIPMDAAVMGDFDKGNTVSQTAERTRLRGIRRLQERFLLRRERLHRVLRVLGFLPKHYEEQLTRYGKYTTPDACNLAWTKDKDGKPTFLFESPFQEMLADFRKMQPELVDNGHKIPHDWTLYYLRKKALTQKITKEELAWILLNFNQKRGYNQLRGEEEETPQTPKSRQYFERSTITDITDTGDAYKGLKILRITLSNGDTGKIFRKDIPDWIGQEKTMIATVKLKDGHDAIDDNGETDRTYKIPTEQEWENEWALVKMKTQQDLDTQEKTVGEYIYDTLLTQPRQKIRGKLVRTIDRPYYKKELYRILETQRNFHPELQDATLYKACIEELYATNDDYRNSIAKRDMVYLLVDDVLFYQRPLKSKKSLISNCPYEYHLYTKDGEEQKEYLKCIAKSHPLFQEFRLWQFLSSLRIYKKEATADIDVTDRFLANDAARAELFAWLNDRKSIDQKSLLKYPGFGLKKDPDRYRWNYVEDKSYPCNETRAMFLKAIDKAGLDATLLTTDIEEALWHILYSIADPKELAKALKRFAEKHGLQEEFVDAFKNLPPFKAEYGAYSAKAIKKLLSVMRLGKYWSPENIPASVRAQIDAITSGECSEKLKVQMEGASLLNGNIEQFSGLPVWLACYVVYGRHSEGKEIQQWESPEDIDNFLNHFKQHSMRNPIVEQVVMETLRVVRDIWKQYGKIDEIHIELGRNLKEPADKRKKMTNRILENERTNMRIRLLLMEFAHPEYEIEGVRPYSPSQQELLRIYEDEVLQSEEVDDEILEILKKFQQADSAKQPKSSEIKRYKLWLEQKYRSPYTGKPISLARLFTSDYEIEHVIPQSRYFDDTLSNKVICEAEVNKLKSNALGFEFIKQHHGEKVQLSHGGTVTIFTKAAYEEYVKEHYARNRKKCRNLLLEDIPESFSSRQLNDSRYISRVVKTLLSNLVREDGEEEAISKNVVPCTGSVTDRLKKDWGINDVWNQIILPRFERMNTFGIGSFTSVTANGNIIPDIPLQYRPGFNKKRIDHRHHAMDAIVIACANRNIVNYLSNVSASENGKTTRRDLQTLLCEKHKRDGSNYEWLIRKPWDTFTHDVYEALSTTIVSFKQNTRVISRCTNHYERIVNGKKVHVPQTKGELIAVRKPMHKDTVFGEVNLVRTKFVSLNDAIKTPSRIVDKYLRESIKKLLAEGCNGKKIKEYFAAHNTEWEAHTQKAKIEVRYFTQETNERFYAVRVPIDTSFTEAVIKKSVTDTGAQKILLRHLANCGGDSNVAFSPDGIENMNRNICELNDGKFHQPIYRVRKYESANKFSIGSTGNKRTKFVESAKGTNLFFAIYEQDGVRSYSSIPLRTAVERAKNHLTIAPENEQGISAKYVLSPNDLVYLPTQEDIANGEIASPLDIDRIYKFVSSSKGQAFFISNSIASPIVNKTEFGPLNKAERALSGEMIRETFIPLKVDRLGNIAIKE

SEQ ID NO: 3077 - protein, 1398 aa, unidentified
  REGION 1..1398: note = Description of Unknown: Cas Enzyme sequence
MKKILGLDLGTTSIGWALVNEKENDNEKSEIIRLGVRVNPLTVDEKSNFEKGKSITTNADRRMKRSMHRNLQRYKLRRKNLIECLLEHHIITDETPLFEKGNNTTFQTYRARAKAVTEEISLEDFARVLLMINKKRGYKSSRKVKDGEEGELIDGMEIAKRLYEENITPGQLLLDLYNKGKRNRPTFYRSDLQAEFDKIWAMQSTFYPEILTDDFKSSIRGFNKMQTSGAFYGVHQIYTAKNSGKEGYAQALLWRTEALKHQMDIEEVAYALADINGAINNSSKRLAMISDRSKELYFDHLTIGQYLMKRLDENPNNSLTNISFYRQDYMDEFETIWEKQAQYHPELTQELKKEIRDIIIFYQRDLKSCKNLVSYCELEHTEREITIDGKKKTILTGCKVCPKSSPLFQDFKIWQILNNLQVSVVGRQRKKIKKDKNQLSLFDDVETGALNRFLTQEEKEILYNELSIKEKLSKKDVLKLLFDNHNSLDLNYKEVEGNRTMAALFKAYQDIISLTGNGEYDFSKMPTDEVMNITSEIFKGLGYKTDFLTFNPLLKGKSLEQQPVYRLWHLLYSYTGDKSATGNEALLNRIQELCGFEKEYAVILSNISFALDYSSLSAKAIRKILPHMTKGFEYSEACKMTGYNHSERSLTKEELAQKEYKSHLDEIKRNSLRNPVVEKILNQMINVVNEIIKTYGKPDEIRVEMARELKKNQEERELLDAAIRKNTAESEKLRKELEEEFGIQHVTRNDILRYKLYNELKLNGFKTLYSNTYIPREDLFSKRFDIEHIIPQSRLFDDSFSNKTLEVRDINIEKGNKTAYDYVSEKYDEQGVTDYESRVEELFNNKVISRTKRNNLLMKEADIPSDFLNRDLRDSQYIARKAREILEELVPFVVTTTGAVTSRLREDWQLVNIMQELNWEKYDALGLTEQYTDKNGNIVKRIKDWTKRNDHRHHAMDALTIAFTKRSIVQYLSNMNARSDKSGSIYGIEQKELHRDEKDHKLVFNAPMPLDIFRAEAKKQLECILVSIKAKNKVVTKNINKSKTKNGHQQKVQLTPRGALHNETVYGKIQNYEAEYKKVDGKFTEDVILRVSSQKHREALLKRLAEYGNDPKKAFTGKNSLEKNPIWLNADHSYAVPLKVKLYKIVDVFTIKKAVDKDLKLDKVIDNKVRAILQARLDEFNGDAAKAFSNLDENPIWLNKEKGIAIKRVKIKAKVSSDTSVPLHVKKDLIGNILKDSDGKALPTDYVNTANNHHVAIFVDNDGNWHEHVVSFYEATASALLGLPIVDKNYKSEEGWKFLFSMKQNEYFVFPNEKTGFVPSEIDLTDPKNYSLISPNLYRVQKFSSLFYIFRHHLETNVEEPNELRDMTWKSIRSVKNLNGAIKVRVNHIGSIVAVGEY

SEQ ID NO: 3078 - protein, 1454 aa, unidentified
  REGION 1..1454: note = Description of Unknown: Cas Enzyme sequence
MKTILGLDLGTNSIGWALINQDFENSTGKILGMGSRIIPMSQDILGEFGKGNSISQTAERTSLRGVRRLRERFLLRRERLHRVLNLMNFLPEHYSSQIDFEKRLGKFKNHSEPKIAYDEGKFLFLESFEEMISEFKKTNPELLIDKNGKPCKIPHDWTIYYLRKKAITAQIKKNELAWIILNFNQKRGYYQLRGEEEEEKQNKEVEFYTLKVADVIADEPQKGKPEIWYSVILENGWIYRRASKNPIFDWKDKVKDFIVTTEVAEDGSVVKDKEGKEKRSFRAPSEDDWTLLKKKTEKEIENSKKSVGEFIFEELLINPKQKIKGKLVRTIERKFYKDELIQILNKQKEFYSELNNEDLLSDAIRELYRNNDSQQAILTQKDFTHLFVEDIIFYQRPLRSQKSSISNCSLEYRPIKDENGKLITSANGKQALKPLKCIHRSNPYFQEFRIWKWMSDLSIFRNEDELNVTNYFLNTSESFERLFDFLNSRKEIEEKPLLKFLLEEKGLKSKALSVEIEKYRWNFVKDKKYPCNETRTLIQNRLSKIGITSDDFLSSELEQNLWHILYSVNDKIEFEKALKTFAKKHSLPENDFFEVFKRFPPFKSEYGSYSEKAIKKLLPLMRIGKYWKRNNIDKNTIERISKIITGEYDESIKDRVREKARNLGNETDFQGLPDWLAKYIVYDRHSEASNTEKWNDAADIDQFLKEFRQHSLRNPIVEQVLTETLRVVKDIWNKYGNGAKDFFNEIHIELGREMKNTAEDRKNITNQVTENENTNLRIKALLAELFEDKHIQNVRPYSPNQQEALKIFEEYALNNEEKYDAENDLFIYDPVPEDISKISKTAQPSKTELVRYKLWLEQRYRSPYTGRVIPLSKLFSSDFEIEHIIPQSRYFDDSFSNKVICESAVNKLKDNQTGLEFIKNHHGETVDLGKGQLVRILEVSEYQDFVKQHYEKSRSKRNKLLMEEIPEKMIERQMNDTRYISKYVTQLLSNIVRENIKDEGINSKNIIPANGKITDTLKQDWGFNDIWNDLILPRFVRLNEITKTDAFTVWNDNHQKLLPTVPIEFSKGFSRKRIDHRHHAMDALVIACTTRGHVNFMNNEHALRKGKSADEKQKIREDLRNILCYKKFNGDSANDYKWIFKKPWEDLTQSAKSELEKIIVSFKKNNRVINKASNRYFKYIEVEGLKTKEKVDQKGMNWAIRKSLHKDTVSGLVNLPRVKVPKGKILTATRKSLDTSFNLKTIESITDTGIQKILKNYLNYKGGFAELAFTPEGIEDMNKNIKDFNDGKYHQPIKKVRIFEMGSKFPLGQTGNKKDKYVEAAKGTNLFFAIYQNEEGKRSFETIPLNEVIERQKQGLSPVPEKNKNHNGLLFLLSPNDIVSIKNIFNKIEYYRFVSCTSGEGHFVPHNYSKEIIKNEMGTNNKSERPIISEGFDKSQTIKDKCFLLTVSRLGDIE

SEQ ID NO: 3079 - protein, 1387 aa, unidentified
  REGION 1..1387: note = Description of Unknown: Cas Enzyme sequence
MKRILGVDLGTTSIGWAYVHEAETKQEQSCIIKLGVRVNPLTTDEKDDFSKGKPVSVNADRTLKRTARRNLQRYKLRRQNLIELLLQAGLIQPGTPLAETDEGSTHQTYALRARAATERIEKEELARVLLMINKKRGYKSSRKAKNEDEGQLIDGMEIAKRLYHENLTPGQLAYRLLQEGKKSLPDFYRSDLMAEFDKVWRLQATFYPEIFTNEFRKDIEGKGQRATSAAFWTRYGFNTAENKGNWHERKLRAYQWRAAATGTRLTEAEAAYVIAEINNNISNSSGYLGEISDRSKELYFNNQTVGQYLYHQLQQNPHANTKNKVFYRQYYLNEFETIWQTQAVYHSELTPELKNEVRDVVIFYQRKLKSQKDLVNFCEFESKIVEYEKDGKKVKYQMGAKAIPKSSPLFQEFKIWQNLGNLQVQHKKLRQPEFLSTEAKELLFAELNIKGNLPKEEILKLLELNPKEWELNFTTVEGNRTNLAFYAAFFKAMENEGHDETDWLKLPAAEIKNSITDFFNSQGIDARILDFDGLQLNTPAEQQPAYLFWHLLYAYEGDDSPTGNEKLYQLLQSKFGFKRDFAQILARVGLQADYASLSAKAIKKIFPYIRENKYSEACMLAGYNHSHSQTAEENANRPLKEQLDLLPRNSLRNPVVEKILNQMVNVVNAIIADPELGRPDEIRIELARDLKKNAKERAAATLQINKTKAEHDAIRALLIKEFGLKNPTRNDIIRYKLYEELKFNGYKDIYTNDYISREELFTHKYDIEHIIPQSRLFDDSFSNKTVVLRSINLRKGNATAIDFIKDTYGEAALSEYKTRLDAYIKFYPERKAKYNKLQLHGAAIGEGFIERDIRDTQYIAKKAKAMLQQIVRNVVTTTGSITDRLRDDWGLVNIMQELSLEKYRMRGLTEMQETKDGNLKERIIDWSKRHDHRHHAMDALTIAFTRHSYIQYLNHLNARSHEDEFTETVLRIQAKETKVGTDGKRRFNLPVPHFREQARQHLEATLVSIKAKNKVVTKNKNKIKTATGEKVQIALTPRGQMHKETVYGKVRRQVTAEEKVSTKFTAEVIAQVTNPAYRAALLNRLNQNGNDPLKAFGGKNALTKNPLYIDESKKIPIPEKVKLSWLEDDYTIRKDITPDNFKDKKSIEKVLDGAARNIMLQRLEEFNNNAKDAFSNLDKNPIWLNREKGISIKRVTISGVKNAEALHFKKDHLGKLILQNGKPVPADFISTGNNHHAAIFRDEDGNLQDEVVSLHKVITERVNVGLPIIDRTYNQHLGWRFLFSIKQNEYFVFPSADFDPSEIDLFDPANYALISKHLYRVQKFSKLTYGNSAVREYVFRHHLETSVDDKKELKDLTYKSVKSLPYLENIVKVRINHLGKIVKVGEY

SEQ ID NO: 3080 - protein, 1080 aa, unidentified
  REGION 1..1080: note = Description of Unknown: Cas Enzyme sequence
MFSYRLGLDIGANSLGWSVLELNEGGEPCAVRDAGVRIFSDGRGDKSKATLKADRRAARSARRRRDRYKQRRDFLLDELTKAKLFPEQDEEDEHGNNIRDRLQKRDSLELRAKAITEPLKTYEIGRALFHLNQRRGFKSNRKDAESREGVVKKSVRELENKLAESGVKTFGQFLWQRRKVNEPTRARRHGTTQQDLYNFYPTREMLEHEFDAIWDAQAEYHPEFLTEEIRKRIRTVIFTQRPLRRQKVGKCTYMSGEDRMFKAMPSFQRYRIYQEVNNLEWRTSRNRNSLIHYPDARDNIVDMLERPTTKNGIVTFGKMKKVLIKMELAEGDFQFNFETPKHKGFDGNHTSNLMQDERRVGPQWHQWSLEKQDEFIHVILDDDLDDQAVQERLMGEYHLSKAAAMACTEAPLTEGTAALSKKAAHLLLAKMKDDMRNQTDAVQAVAREETAFDNPSKCSGEGTLLPRLPYYGEVFQDGRHIIPGSREEDDKDDDLKYFGGVTNPTVHIALNQIRHVVNELLTRYGHPASIAIELGRELPAGKEGRAEIEKEQKENQKFNERLDNCLREHNQACNRDNRLRLRLWEELDDDPNGRCCPFSGQKIGIADLFNGNAEIEHLIPFSKSLDDSRANKVICTRQANRDKGQRTPYEAFGDNPDGYNWEEIFRRSKKLPKNKHWRFQKDALEIWKRDHADFLARHLNDTRYIGRLTKEYLKNICPFNKIDVLTGRLTALLRIHWGLNRVLSGHNQSQEPKKNRDDHRHHAVDAIVIGMTSRSMLQKVATAANRAEKLHLERLFERGANGKSPIDPWPSFRDDVKEMVNKIIVSHKPNLKTLGKNTTDGQLHNETAYGIISGPDDTGCYRVVVRCPINELKRREHVEAIRDKTLRHEFLQAFEAQGTDGIVRLAKGKGIRRIRCTERMNVIPIKDRSGKEYKAYKGDSNWGMEIYEYPNSPTKAKAGKWDGEVISRYEANQKEFQPGQTKKPHPAARLVMRLQINDCVEMKKDGRRQIMRLQKLSKGKLTFAPHNEANVDARNDNKNDSFKYFNTAASTLKKSNARKVHISPAGRVSYEKRRKPHRKH

SEQ ID NO: 3081 - protein, 1404 aa, unidentified
  REGION 1..1404: note = Description of Unknown: Cas Enzyme sequence
MKKTLGIDLGSNSAGWAIRNLDLRDNQIEDFGVITFEKGVASEKGNEFPKVQKRTESRGKRRNYQAEKYRKFGILQFLIEKDMCPLSVEDFNNWKTYRKGKKREYPQSEEFLNWIRFDFDGDGKPDFHLFGKDKNESYYVFRAFAGNKQYKDVFANSPQILGRVFYQLVQRRGFKGRDEEEAKTMLTGSDKNGTKGRNDIEEYLDKHKTLGAALYHYQKDFGGRIRQRYNLRKDSEAELKWICDLHDISNDDYSKLWKAIIWQRPLRTQKGLIGNCIYEKGKKRVVVSHPLYEEYRTWVFINNLNIIPPVGENKHEYIQTKIYPLFYKSKPDFELIDIDKQLKKDGAKRTSKHHEKTKVLSVKLLKQFQDVFGENWKDILKWDVNGDRSPQPAKKSQVQYTFEDIWHILMTFDGQENLKKFALEKLNLDEEKAIKFSKIKLQQGFATLSLSAIKKILPYLQKGFLYSHAVYMANLYKMLGENVISETLTNHFSEEIFKILKQDSTNRKNAAIVNSLISEMLNDEHRYYISDNRNLDDGEKKAVLKSCIDNYGQASWDQLEEEIKTNIIEYVSTKYLEFLKKSFFDKTNLFVQPERIDEKIFNFLKETYHVSDDMKKYLWHPSEQENYAEAENYLEYSIGKKKYYVKEKSKNSFLSRNPEAEFEGREIKLLGNPEPLSKGFKNPMALKSLHRLKNLVNYLLQTGKIDEETRVVIEIARELNDKNKRKAIELWQKEREKENDAYRKELAAYQEEFPNVKLIDENTLVRKIRLWHEQNKICMYTGKPISFSDLIVGSKYDFEHTIPASISFDNELKNLTISDSGYNRLQKGKKFPTQLFNYDSEQVINGITYKAIINTIEFIFGERTVEYKEEKGKTNKIVKWKKITELEKQFDEWKKKASYASTKEYKDFCIVKYHTIKMDLDYLKAKLATFTITEYKAGWRNNQLRDTQIITKYALPYFKTLFKRVSVEKGGVTDIFKKVYKVQSKDSKKDRSVHSHHAQDAAILTLIPNAFHRERIIKAYQNEIDNRTGKTYHEIPMEWDSFSQNYILELKDKVLINNLTDSRTITQTSKTIRKRGKIVYDIDQAGNRKKRVAKGDTIRGQLHGETFYGAIKQPLRDEDNKILFDENKKMILKDEIYLAVRKSLVYKKDANSPGFKGLEEVEKAIVDKDLFKIIKKQVEETDFKTALTEGVYMLDKKGNKVNKIRTIRCFENGLKYTTAIKVHNHSFVSDKEYKKSTLATNGENTYCLFYKSDAGKAMRILSIVDLAEIKLKNVQNLFTEPEFSNFETGKGKNKIHLPLYSVLKSGDKVLFYKDSIHELKDLEKPELSNRMFRMYQFEKDGRIKFRHHLAAGIDTELKKDNPEYSSVNFNEKQIYLRLRQGQWNFAIEGKDFEMYIDGTIKWNF

SEQ ID NO: 3082 - protein, 1027 aa, unidentified
  REGION 1..1027: note = Description of Unknown: Cas Enzyme sequence
MKKVLGIDLGSNSTGWAIRNLDLRDNQIEDFGVITFEKGVASEKGNEFPKVQKRTESRGKRRNYQAQKYRKFGILQFLIEKDMCPLSVEDFNNWKTYRKGKKREYPQSEEFLNWIRFDFDGDGKPDFHLFGKDKNESYYVFRAFAGNKQYKDVFANNPQILGRVFYQLVQRRGFKGRDEEEAKTMLTGSDKNGTKGRNDIEEYLDKHKTLGAALYHYQKDFGGRIRQRYNLRKDSEAELKWICDLHDFSKDDYSKLWKAIIWQRPLRTQKGLIGNCIYEKGKKRAAVSHPLYEEYRTWVFINNLNIIPPLDENKQEYIQAKIYPIFYKSKPDFELSEIDKQLKKDGAKRTSKHHEKTKVLSVKLLKQFQDVFGVNWKDILKWDINGERSSQPVKKSHTEYTFEDVWHVLMTFDGQENLKKFALEKLNLDEEKATKFSKIKLQHGFATLSLSAIKKILPYLQKGFLYSHAVYMANLYKMLGENEISETLINHFSEKISKILNLDLANRKNAAIVNSLISEMLNDENRYYITDERDLDSTENKLFLKSIIDNYGQESWDKLEKESKTDIVTYVSQKYLEFLKKSFFDKKNLFVQPERIDEKIFNFLKDTYHVSDDMKKYLWHPSEQENYAEAENYLEYSVGKKKYYVKEKNRSSFLTRNPDADFEGREIKLLGNPEPLSKGFKNPMALKSLHKLKKLVNYLLQTGKIDEETKVVIEIARELNDKNKRKAIEIWQKEREKENDAYRKELAIYREQFPNVKLIDEDTLVRKIRLWHEQNKICLYTGKPISFSDLIIGDKYDFEHTIPASISFDNELKNLTIADSGYNRLQKGKKFPTQLVNYDIEQVINGEFYNPIIRNIEFLFGERKVEYKELKGKTEKIFTWKKIEDLQNQYDYWKKRASYANTKTSKDDYIIKYHTIKMDLDYLKAKLATFTVTEYKAGWRNNQLRDTQIITKYALPYFKTLFKRVSVEKGGVTDIFKKVYKVQSKDSKKDRSVHSHHAQDAAILTLIPNAFHRERIIKAYQNLSKRN

SEQ ID NO: 3083 - protein, 1452 aa, unidentified
  REGION 1..1452: note = Description of Unknown: Cas Enzyme sequence
MTKNILGLDLGTNSIGWALIKQDFENKQGEILGMGSRIIPMSQDILGEFGKGNSVSQTAERTGYRGVRRLRERYLLRRERLHRVLNIIKFLPEHFANEIDFEKRFGKFKSDNEPKIAYNTDGFVFKNSFEEMLADFKMHQSQILKNEKGEDKLVPYDWTIYYLRKKALSQKIKKEELAWILLNFNQKRGYYQLRGEEEEENPNKLVEFYSLRIVEVTADEPQRGKTDIWYSLTLENGWVYRRASKTPLFDWKDKTRDFIVTTDLNDDGSIKKDKDGNEKRSFRAPAETDWTLVKKKTEQEIDNSHKTVGTYIYDTLLQNPKQKIKGKLVRTIERKFYKAELKQILEKQTAFHPELQNLDLYNDCVRELYKNNDAHQLTLSKKDFVHLFLEDIIFYQRPLRSQKSSISNCTLEFKEYVGKDGVEHTQYLKAIPKSNPYYQEFRIWQWMYNLNIYRKDDNENVTKEFLNSYEDLENLFVFLDGRKEIEQKALLKFLLEQKDFKGKGLTAEIEKYRWNFVEGKAYPCNETKTMISTRLSKVDNIADDFFTREIEQQIWHIIYSVNDKIEYEKALKSFARKHNLDEISFFEAFKKFPPFKSEYGSFSEKAIKKLLPLIRVGKYWSYDNIDEHSKARIDKIITGEYDENIKDKVREKAINLTTESHFRGLQLWLAQYIVYGRHSEASMIGKWNSADDLELFLKEFKQHSLRNPIVEQVITETLRVVKDIWVQYGKGAKDFFSEIHIELGREMKNTAEDRKKITNQVTENENTNLRIKALLAEMMNDANVENVRPFSPMQQEILKIYEDGVLNSDIEIDDDILKISKTAQPSSSDLKRYKLWLEQGYKSPYTGQIIPLNKLFTPEYEIEHIIPQSRYFDDSFSNKIICESAVNKLKDNYIGLAFIKQFHGTIVDCGFGKTVKIFEADEYEEFVKKHYAKNRSKKAKLLLEEIPEKMIERQMNDTRYISKFISGVLSNIVRVEDGTDEGVNSKNIVPGNGKITTTLKQDWGLNDVWNDLILPRFERMNQLTNSTDFTAWNENHQKFLPTVPIELSKGFSKKRIDHRHHAMDALVIACATKEHVNLLNNQSAKSDAKRYDLKKKLMNFEKAVYTDAKTGKRIERDVPTQFLKPWENFTADARNSLENIIVSFKQNLRVINKATNYYESYKDEDGNIRLGSDGKPKKDFISQKGTNWAIRKPMHKETVSGKVNLPWVKLPKGKILTATRKSLDTSFDMKTIGSITDTGIQKILRNYLAAKGSSDLAFSPEGIEDLNRNIKQYNDGKDHQPITKVRVFEMGSKFQVGYSGNKKDKYVEAAKGTNLFFTVYEDEKGKRSYESVPLNIVIERQKQGLDVVDLKGDKDFYLSPNDLVYLPSGDELENSNNIDFENLSKQKKQNIYKVVSFSGNQLFFIRQDVATSVVNKAEFSTLNKMERAIDGLMIKETCLKLKTDRLGNISKA

SEQ ID NO: 3084 - protein, 1344 aa, unidentified
  REGION 1..1344: note = Description of Unknown: Cas Enzyme sequence
MNKILGLDLGTNSIGWAIRDATEPGNQIIDKGILTFEKGVGEEKGVEFPLVKKRTESRSKRRHYQAEKYRKWTLLQTLIEHNMCPLTIEELDQWRKYTKGQSRKYPQSPDFINWLRFDFDGDGKPDFERLGFSKHENHYLFRMLAVSDNSAHKNIFTDNPHLLGRIFYHLVQRRGFRGRDDEEARTILQGSKDGKVAGAEAISPLIHQYQTLGAALYHLQKDKGERVRKRYNLRADYAHELQLICQVQNIPDTIYKRLEKAIVWQRPLRSQKGLVGICTFEQNKPRCPVSHPFYEEYRIWININNLKIRLPDGIDKQTYIREKIYPIFYRKDRDFKLTVILKELRKVGGSLGSKFKDDTKIPSATLLNAFKEILGEDWKNLYGWDAALQNQPKSIPYSFDDIWHVLFTFDNREKLQLFSKEKLKLDEENAEKFSKIKLQQGYATLSISAIRKILPYLKEGYLYSHAIYLANLHRVLGKNTLLPSDAQAFSVALRGIIDQHRSEQSWIAAVNGLISDQLNGDARFGMDPVYQLDRDDMNDIERKLEEELGEYSWKKKSKEEKNAAINFVAEKYLSFLRRPVQYSKEPVYSKLPRLHDRILNYLRETYDVQPKNEKYLWHPSEQESYPAAKYMNGVPVLGDPMPISRGFKNPMALKTLHQLKKLLNHLLKIGKIDEDTRIVVEIARELNDANRRKAIERWQRDRERENDEYRKKIEENPELKGLFLDVKNKDIIDKYRLWVEQNKRCLYTGNIINVYDLFTGKFDFEHTIPASVSFDNELKNLTIADGKYNKQIKKKLFPTQLPNYDREATIDGVIYSAIKPRLESIEKKVEELEALHEEWTNKTRFASTKEIKDACIQRRHIISFDLDYWRKKLNSFTVTEYKAGWKNSQLRDTQIITKYALPYLKTVFRKVEVEKGSIVSDFRKIYNIQPKAEKKERTRHSHHAIDAAVLTLIPSAAIRDRILGKFNELKDQNVNLIYHEPVTNWKDFTAAHILSIEEDVLNNFQPKQRTLMQTYKNVRKRGTKQFVKEKTPEGKWQYKLDAKGQRIRLVAKGDNIRGQLHKESFFGAIMLDGEKWLVERYPVSSFTNIKDCRHIVDNTVRQIVQEALEKRLGEGMPFDKAKLDPIPFPGGKEVIRKVRCKVAAGAGYLTPKKALEVNQHDFLSKNDYKRSVYAQNEENTLCLFYEGVVNNKEERAFRVVGLFDLSQLKLKKIEDIRSEKYYQAVEAGRGKNKAEIPLSHIITVGIKIIPFKNSKEELKELSKRDLLRRVYRVYKFNEPAPSTVYVYMQNHLEARPNDELGNGEKDLNLEIYQPRIFLNATKFTCVIEGRDFSIDLDGTIRWLF

SEQ ID NO: 3085 - protein, 1576 aa, unidentified
  REGION 1..1576: note = Description of Unknown: Cas Enzyme sequence
MPENQVISFDLGSNSIGAVIRNLTEENQFEKATLITFETGVGKDKENKYTISLAANRTSKRSVRRLYQSRKYKLWEVLEALIKDQNSLYCPIKEDSLKLWKYYNKEEAQKGNSGRQYPVSDVLFANWIKLDFNNDGIPDYLSPYQLRNELVNTKLDFSDEINRFKLGRALYHIAQHRGFKSSKIVNNKDDEKRDKPDFDAEANIGAEGRKEDHFRKELEEIGFNYDPEKESIGTLFARVETEGIHHPERKTEGIRIRKNLHQYVTRKMLIKEVKQIFEFQQLNFNDIFGDKNEKISIAHSPVFWQRPLRSQKGLVGHCTLESWGIFDKTKGREVFVGKKRCSVSRPEFEEFRAWSFINNIAYREKDNQYNEWNFLPAQIRQGLYHEVFFKQKDFEFVDIVKWIKKKNKHDSWEFNYSYKTTVSACMVSARLKRIFGEDWDKPVIQTDRSGKTYATPFYDNIWHVLFESDDQDFIEEYGKLKLKLDDEKVRQLCSLWFTMPVGYAQLSLKAINNILPFLREGFIYTDAVLLGKVPEILGDQIWLQNKKAITESLKSSVIEKNREEKRILNIANNLIAQYKARPKGNDRFADHDTSYIVGSRDAKLPIGSIERDEIQIAKAAEEGFGKETWKKFPEQEKRQALVQITEAYQQFFKSHQRDFYKLPRLGDAMKKFLIDNFPDLLYCPNTFKRLEIGEEKCNCGKCKRINKLYHPSMIAIFPRAKDEYYKYGGKEINKVMLGSPKTGSFKNPMAMRALHELRKLVNYYIVTGQIDEETRVVVEVSRELNDTNKSWAIEKYQEIRRKENEEFAAAILALLNDPDAKGSLANADSDSDIDKFRLWYEMVESPEGFEKNGKFNAVESDRTAKEKKSNRKKIGKYEDSDGDELYEFSENRFENIKKEIWIKLKKAKESIVEKYRLWKEQQCFCIYTGKLIRITDLFKETVIDIEHTIPRSISFDNSLANKTVCFADYNRNVKKNKIPTELVNYNDISSRIESWKQKVKDLEIRVEFWKGKSKRASTPEYKNKAIREKHLWQFELDYWRNKVERFTMKEVKPGFKNSQLKDTQIISKYALHYLKSYFNLVEVQKGEVTAQFRKIFDIQDTGTEKDRSKHSHHVKDAMVLSVIPVASIRDRMLELWYKINEEELLLESDTEKEKTAIQEKIKELKDELNDYKIRLKPTRFNNTIQQLDETILNNNIARNRSIIPASKKVRFKGKDYVAKGDAIRGQLHKDSFLGAIRLVKKDKNGEWIKNGKGNFEFEPIKYVIREDLVYKPNSQSPGFKDVKDLEDQIVDKDLFYKIIKPQIEKNEGDFKEALSKGIWMLDKQGNKVNKIRRVRIVLAVKEPQEIKHQTYISNKPSKILLDRKHKNLYYAENGANILCVLYQKTVQDKKGNEKKNREFEIISLMDIARLVQAGEVKNIDDIEIYRSDKKTGKVAIDETGNKEKPYAILKRGMKVIFYEENIDELYRKDGDKHDDYKKRVSYRTYILVKFSGGQITFKHHLESRNDDKLKKAYPKNEYGVGGTSGFTKKVSDALIQNKLNNYEPWPKLLYTANWLNMAIEGKHFEVMPDGEIKWKY

SEQ ID NO: 3086 - protein, 1343 aa, unidentified
  REGION 1..1343: note = Description of Unknown: Cas Enzyme sequence
MNKILGLDLGTHSIGWAIRNTTEPANQIVDKGVLTFEKGVGEEKGVEFPLVKKRTESRGKRRHYQAEKYRKWTLLQTLIEHNMCPLQIEELDQWRKYTKGQGRKYPQSPEFINWLRFDFDGDGKPDFERFGFSKHENHYLFRMLAVSEDPAHKNIFVNNPHLLGRVFYHLVQRRGFRGRDDEEARTILQGSKDGKVAGAEAISPLIRQYKTLGAALYHLQKDKGERIRKRYNLRTDYAHELQQISQVQNVPDSVYKRLEKAIVWQRPLRSQKGLVGICTFEQNKPRCPISHPFYEEYRIWININNLKIQLPEGIDKHTYIQEKIYPLFYRKDRDFKLAVILKELRKMGGSIASKFKDDTKIPSATLLNAFKELLGEDWKDHYGWELALQNQPKTIPYSFEDIWHVLFTFDDREKLMLFAKEKLGLDEEKAEKFSKIKLLQGYATLSISAIRKILPYLKAGYLYSHAIYLANLHKVLGGNALSSSDAHAFSTALKDIIDQHRSEQSWISVVNGLISDQLNSATRFGMDPTYQLDSDDLNDIKGKLEEELGEYSWKKKSEEEKNAAINFIADKYLTFLRRPVQYSKEPVYSKLPRLHDRILNYLRETYDVQVKNEKHLWHPSEQESYPAAKYKNGIPILGDPMPISRGFKNPMALKTLHQLKKLLNHLLKIGKIDEDTRVVVEIARELNDANKRKAIERWQRDKEKQNDEYRKRIEEDPELKGLLLDVKNKDIIDKYRLWVEQNKTCLYTGNIISLYDLFVGKFDFEHTIPASISFDNELKNLTIADGLYNKQIKKKLFPTQLPNYDKEVTLDGIVYSAIKPRLEPIEKKVEELEALQDEWTNKTRFASTKEIKDACIQRRHIISFDLDYWRKKLNSFTLTEYKAGWKNSQLRDTQVITKYALPYLKTVFRKVEVQKGTVVSDFRKIYNIQPKAEKKERTRHSHHAIDAAVLTLIPPAAIRDRILGKFNELKDQHANLIYHEPVTNWKGFTTAHILSIEEDVLNNFQPKQRTLTQTYKNIRKRGVKQFVKEKVDGRWQYKLDAKGQRIPLIAKGDNMRGQLHKESFFGAVKLGGEKWLVERYPVSSFTNIKDCRHIVDDKVREIVQAVLEKRMIEGIPFDKAKLDPIPFPGEKEVIRKVRCKVAAGAGYLTPKKALEINRHNFVSKHDYKQSVYAQNEENTLCLFYEGVINGKPERSFRVVGLFELAQLKLKKIDHIKSEKYYQVVEAGRGKNKTEIPLSHVITVGIKVIPFKNSKEELKDLPRKDLLKRVYRVYKFNEPAPSTVYIYMQNHLEARPNDELGNGEKDLNLEIYQPRVFLNAAKFTCVIEGRDFSIDLDGTIHWLF

SEQ ID NO: 3087 - protein, 1519 aa, unidentified
  REGION 1..1519: note = Description of Unknown: Cas Enzyme sequence
MKTILGLDLGTNSIGWALVKAKHDEKLGEITAMGARIIPMTQDVIDEFGKGITKSGTSERTRYRSVRRLLQRDLLRRERLHRTLNVLGFLPEHYANEIDFIKHPGQFKAESEPLLAYKKNEYGKHQFIFMNSFNEMLEDFKKARPELFYIKKNGKETKIPLDWTIYYLRKKALTEKISKEELAWLLLNFNQKRGYYQLRGEDEETKENKSEEFHSLKVVDVVDSGDRKGSDVWYNVVLENGWIYRRSSRIPLFDWVGTVRDFIVSADLNEDGTIKVDKDGKEKRSFRAPKDDDWTLIKKKTEFEILNSRKTVGCFIYDSLLNNPIQKIRGKLVRTVERHFYKQELEGILKKQLEFHPELQNRNLYTACIEELYPNNEAHKRNIQEKGLDHLFINDIIFYQRPLKSKVSQISDCPFESRSFLKEGKHEISALKCIAKSHPLFQEFRLLQFIKNLKIYQKTFQEDIDVTDRFLNTDSAYTLLFNWLNDKFEINQESLIKYLLSTSNLKGAALKNEIARYRWNYIEDKTYPGNETRGSFLQKIAKIEGIDASFLTARNTEGLWHILYSVTDKLQLNTALKRFGSKHKLPVEFAVNFSKIKPYDKDYGSFSAKALKKLLPLMRFGEAWEKEAIDRKTLDRIERIINAEYDEHIKQRVREKAIHINCISDCQGLPLWLASYIVYDRHSEASDLAKWESPNDLNVFLKEFRQHSLRNPIVEQIILETLRVVRDIWMEFGEGKKDFFDEIHIELGRDMKNPAEKRKRLTEQVSANENTNLRIKALLTELKEDGVKDVRPYSPSQQELLKIYEEGVYQSEVRKERLDDIEKIRKSSKPSRAEIIRYKLWLEQGYISPYTRRVIPLSELFSIKYQVEHIFPQARYFDDSLSNKVICEAEVNHLKGNKTSYEFIKNPELRIVQLNGGGTVEILSIQDYESHIQQYFSRNKTKLKNLLSEEVPDGFIHRQMNDSRYISKVVKTLLSKIVREDNEGELEQEVTSKNVIPVTGAITNQMKQDWGLNNVWNELVTPRFERMNQLTGTNDYGQWENKEGKRVFQTAVPDSMAKGFSKKRIDHRHHALDALVIACVTRNHINYLNNLNAKSEDDKSVKQNLRGTLCIKRKMNGDGNYKWEFIKPWERFTQETKDHLLKTVISFKQNSRVINKTNNRFQRWLPDENGAMKKVIEIQTQGQNWAIRKPLHKETVYGKVILRREKPNPVSLVSVLDQLNIIVDVRIKQLVKEMSESLQGDLVRMKKALKVTPLTIGETVIDKVQVYEFINGTASRTLLNSSFNQKKIESITDTGIQKILTDHLNQARYQNQKDDSGKFIAAEELAFSDAGLEDLNSNLSNHKPIYKVRIYEEGNRFAVGQTGNKKDKYVEAAKGTNLFFAIYADPNGKRSYISVPLNEVIESQKQGLPIAPETDLNGNKLLFTLSPNDLVYVPTIEEQSNPGMVNFKALTVEQVNRIYKLVSFSGNQAFFVLSSVAKTIADKMEFSVLNKMEKDLNGQMIKATCLKINVNRLGNVKPK

SEQ ID NO: 3088 - protein, 1371 aa, unidentified
  REGION 1..1371: note = Description of Unknown: Cas Enzyme sequence
MTKTILGLDLGTTSIGWALVKEGENADIIKTGVRVIPLSTDEIQNFDKGKSITTNADRTLKRAARRNLQRYKLRRSHLRKILIEHGLISDETILAEVGNTSTFETYRLRAHSVNQKVELAEFARILLMLNKKRGYKSSRKAKGEDEGSAIDGMKIALDLYEKNLTPGQLVHERFTKGINSIPDFYRSDLQAEFDAIWNFQKKLHPSILNDNLYEQILGKSKTITSAILRKNGLEGVELKGKLFEKKKERYAIRSKAVSEACSLEEISEILPEINNNINQSSGYLGAISDRSKELFFNKITVGQFLYQQIETNPNTVLKNQVFYRQDYLDEFNCIWEKQAEFYPEFLTPELKQKVRDAIIFYQRRLKSQKALLGVCEFEGRKMEIEIDGKKKRRMVGPKVCPKSSPIFQEFKIWSQLNNITYAPVGDRKSQGISLELDQMQTLFNELNWKEKLSSNDVIKILGIKGYELNFEQIEGNRTNAAFIQALNDFFVKEGNDELNLLKMNSKEIFETLKAFFSIAPYDKIDASLFNFDTAKTGQEIENQSYFQFWHLLYSFEGDNSTSGIDKLKIALETKFGFPYEINTPIANMRLSDDYSSLSVRAIRKILPYLKEGNRYDIACMLAGYNHSHSETKEDLDSKVLLDKLKILPKNELRNPVVEKILNQMINVVNSIFDTYGKPDEIRVEMARELKKSAKERESATKAIRQATDEHIKLKREIQTEFGLPSVSRNDLIRYKLYLELKENGYKTLYSNQPIDRSKLFSPEYDIEHIIPQSKLFDDSFSNKTIELRSVNLKKGNDTAYDFIHKEYGHEGLAQYKARVQALFGNQFGKKSKFRKLLMADSDIPKDFIERELRDTQYIAKKAKDILSTVVRNVGTTTGSITEKLRKDWQLVDLLEELTLPKYEQLGMVEIVENRHGDKRKKIKDWTKRNDHRHHAMDAITVAFTKREYVKYFNNLNAKSDKDGEIYKMLKQETYFDKDQKRRFNPPMPLNQFRARAKEQLENTLISFKAKNKVSTINKNITKNKTGKKMVLHETPRGQLHLETIYGSSEIYTTKVEKVGGNFDSEKIQKVANQKHRTLLLKRLSEHGNDPKKAFTGTNSLAKKPIYLNELETYTMPESVKLVNVETQYTIRKPITPEIKVDKVIDKGVQRILQARLKEFNNDAKKAFSNLEENPIYLNKNKGIVLKRVTVLGINNAVSLHNKKDHLGNQILDTQGNPIPVDFVNTGNNHHVAIYRDLNDNLREEVVSLFEAITRKNQGLPIIKKQHELGWEFLFTLKQNECFVFPNEETGFDPSEIDLLDPANVSKISPNLFRVQKITSGDYWFRHHLETLIEVKSELKGTTFKRLGLSGITKTIKVRLNHLGEIITNGEC

SEQ ID NO: 3089 - protein, 1357 aa, unidentified
  REGION 1..1357: note = Description of Unknown: Cas Enzyme sequence
MKTVFGYDLGTTSIGVAVVKQAESQEEKSSIVKAAVRVIPLSVDEKDSFEKGKAITTNADRTLKRSMRRNLQRYKLRRDNLIEILKREGWISDDSIISENGARSTFSTIKSRAAAADKEISLEELSKVLLMINKKRGYKSNRKADSKEEGQLIDGMEIAMVLYDEGITPAEMSLRLLDKGKKVLPDYYRSDLEHEFQIIWETQEKYYPDILTDDFKKQISNQGGLSISKIFLAKYGLFTADNKGKDKKRTALEWRVRAQKEEVEKEILAYVIADVRGHISNSSGYLGAISDRSKELFFKKITVGQYIYQLIQADPQASTKNKVFYRQDYLDEFERIWECQKKFHPELTDILKSEIRDTVIFYQRNLKSQKGLISFCEFESQKIDLTIDGKKQTKIRGSKVAPRSSMLFQEFKIWSCLNNLVLSEPVAGREYYLSLEQKEDLYKELSIKSSLKDKEVLKLLGYKPGRYELNYKELDGNKTLCTLYSKYLDIVNASGHGEYVLSKLNYSQARGIIEDVFKVLGFNCEILDFNSNLGKEEFEQQAIFKLWHLLYSYEGDKSVTGNDSLIKKISHICNMPDEYARILASTRFVEDYASLSHKAILNILPYLKEGNDYSQACLLAGYNHSDSKTKEENNNRELKDRLELLPKGALHNPVVEKILNQMVNVTNTLCDTYGKPDEIHIEFARELKQNAKQREEATKHIQERTKENERIAKIISEKCGPSNVTPNNILKFRLYEELKENGYKALYSDQYISFEDLFSPNVNIEHIIPQALLFDDSFSNKTLEKTDVNIKKGKRTAADFVLEEYSEQGYERYKLRVDDLFNRGVISKSKHQKLLMKQTDIPEDFVNRDLTNSQYIAKKAKEMLEEIARTVVVTNGSITARLREDWQLVDVMKELNLAKYQKAGLTYTIERDSGQKVQKIQDWTKRNDHRHHAMDAITIAFTRPSHIQILNSLNACTDNTSSAYAIKLKETELKGSKWTFKPPIAIEVFRTEVKDALENILVSIKAKNKVVTRNANKIKTAKGIITKTELTPRGALHKEQVYGLRKKYEVEYKPVNAKMTEDVIRTVANKKQREALLEQLKQYGGDPKKAFTGKNATKEKVKCVRFKTVFSIRKTIGPDINIEKILDKKVRRILQERLEQFGGDPRKAFANLENDPIWLNKEKNIRIKSVAIEENFDLTAIRDKRDKDGNYILDVNGDRIASDFVNLRNNHHIAIFEDESGNYQEVVVPFFEALNRINMGAPVVDRDYMKDCGWKFLFTMKVNEMFVFPNKETGFDPSEIDFMNPGNYKLISPNLFRVQKLSSCYYCFRQHLETTISDVSELRDITWKRITSINTLKGVVKVRINHIGQIVSVGEDG

SEQ ID NO: 3090 - protein, 1163 aa, unidentified
  REGION 1..1163: note = Description of Unknown: Cas Enzyme sequence
MERSLGLDIGANSIGWAVIEQNGTGGAILGVGVYTFPEGVENFGEGDREISRNATRRAARQRRRQLFRRKLRKRALLKLMATHGLCPALSEDELRQWHKSGQFPERTEVQQWIKLNPYHLRLRATQERVTLYELGRIFYHLAQRRGFPTSSRRAQQDERSTIEKGDVKAGKPGIEQTRALLDHAPTLGSALATLYPPEGQPYRNNTSRIRNRYTDRQMYVAEFEFLWEKQRQFYPYILTDDLKAQLGGRRKDGYSIDGVLFLQRPLRSQKHLLGRCTFEPSKPRCLRSHPLFERFRALQFINSILCNDLPLDADDRSRVLRLMLTKKNLKFTDIRKAIGKLSAEYIFNYADDDSIVGSPTNAALASKNIFGKAWFDKSDHEQHQIWHVLQSFDDRDKLIHHATTKLGMSDTAAKHFASVQLTDGYASLSLKAIRAILPFLEQGYPYHLAVALAGTRRALGPRWDQLDEEQRTALCDTIEGLVGSGVRGGYLDKLKEMLRTKFKLSDKELSKLYHHSQFRAANQLLNRIPTDAVYTSQLLALRNPAVTNVLFATRRLVNELLSRFGHFDRIVIELARDLKRTKSQRAQIRKEQQRREIINRTISAILEKEGIRPTAENILKYRLWLECNKTCPYSNRSISFHQLYNGEVQVEHIFPYDRSLDDSYLNKTLCFADINRKKGNRTPYEFFTNDFGMDRWEEVKQRLRQTFTNQRSWQKDSPLDYFPERRKKYERFIAEKLPSDFVGRQLNDTRHASIRAVEMLQLVCPIVSASAGTATAKLRNLWGLDRVLGDLESDTKSRNDHRHHALDAIVLACTRPAHIQQLATANARKYSKEPQLEPPWSSFRFDVEDAMQRCIVVHHRTNRVITRLNVTTTVGGTVLRYRSLAARGPLHRETFYGKHLDPSDGQVYYHVRKPLAQITKRAQVEKIVDRAIRELVEARIKELGSYGSNDDVPKGAFFGTNPDGSPQPLLFLPNRRGEPVPILNVRLRESLANARPVHPNQNRYVDPSNNHHAIIYRLPDGTLEISVVQFWDAVLRCRLRQPLYQVPPNCELVMTLHINDIVLLGCPDKVLEEVFQTLTPDQRCKSLWPYLHKVQKLSQSSPKSWELCFRHIADARPSEEAKKDYILIRNWGTGKQGWFTYNPIKLRVTPSGLIYRWGELPHH

SEQ ID NO: 3091 - protein, 1244 aa, unidentified
  REGION 1..1244: note = Description of Unknown: Cas Enzyme sequence
MSKKILGLDLGTTSIGFALIEEKENKKEIITMGSRIIPLSVDDKNQFSQGNAISKNQDRTTKRTQRKGYDRYQQRRANLCKELNKLEMFPDEKLWKLSSLELYSLRDKAVKGKIELKELGRIFLHLNQKRGYKSIGKEENTDKKDTEYVAQVKGRYQTIKDLGLTIGQYFYKNLKQDYDNNLADGKSFITYRIKEQIFPREAYTEEFEVIWNEQAKHYPTILTNDFKNKVKDGIIFYQRPLKSQKGLVSVCDFEGFTVKKDIRGKEKILFVGPKVAPKTSPLFQVSKIWETINTLTLKSKKGEDLVLSIEQKKEIFEHLDNNEKLSQADLFKILKINKDDYYGNKQIGRGLQGNLTKVAIAKILGETHPLLICNFQIESTDKEVYLVDRKTGEVIGSNNFQIVSPNIEKEPLFELWHTMYSIKNEEECKNALIKKFGIEEEKAIALAKIDLNKQAYGNKSNKAMRKILPYLMQGFVYSEASSFAGFNHSNSFTKDEKVAQELKSKLELLPKNSLRQPIVEKILNQLINVVNAITEKHGKIDEIRIELARELKQSKDERNDAFKFNTQREKENQNIVLRLQEYGIKATRNNIIKWRLFHEINNDESKLNATCIYCGKPFGIKDALQGNEVDVEHIIPKSLLFDDSQSNKTLSHRKCNTDKGGKTAYEYMESKGTAEFEAYIDRVNDLFKKKIIGKGKRDKLLMPPSKIPKDFIERQLRETQYIARKAKEILEEICSNVWSSSGQVTEHLRRIWGWDDVLMNLQFEKYKALGQTDWVEWETEKGNQKHKKEVIKGWSKRDDHRHHAIDALTIACTKQGFIQRMNTLSAENTRKQMYTEVDASNKDFKEKQNLLDRYLSLQKPFTTAEVEKEADKILVSFKAGKKVATLDTRKIKKDGKKVVVQKDIIIPRGSLSEESVYGKIKTIQPNTPLKALFENSDLIINEIIKTLVKERIVKNDYDIKKAFASTKKDPIYLDEAKEKVLETASMYKEEYVIKYSLGSIDTKKAEKIVDEGLKKIIKARLEEFGGNAKNAFAKPLYLDANQKIEVKTVRCFTGLSAVEPIITDDKTNNLQFEKYVKPGNNHHIALYRDSEGKLQEHVASFWHAVERKKYNLPVIISNPTEVWDIINTNIEEYPQAILEKLPFDGWKLELTLQQNEMYVLGMSEEDYTDTITNNKKDVLSKYLYRVQKIAESNYMFRHHLETELIDTNEAKDSKRFINVRSLGALEKHNPKKVRIDVLGNIVTN

SEQ ID NO: 3092 - protein, 1386 aa, unidentified
  REGION 1..1386: note = Description of Unknown: Cas Enzyme sequence
MKTIFGLDLGTTSIGWAAVQESENHDEQSVILDMGVRLVPLSQEDTDSFTKKDKETAQGKRTLKRSTRRNLQRYKLRRDNLISVLKSAGIINDKTILAENGSYTTFQTLELRAKAVNEQISLEEFARVLLAINKKRGYKSSRKYKTEDEGAAIDSIDIAKRLYNEQLTPGQLSLQLLNENKKKLPDYYRSDLQEEFDRIWETQAKYHPTLLTTELKAELKDKTPRVTWAILENKWVWTKQGQSHKYTLKDLAKRQGTKQEIRRETISWRVAALDKAVEPDQLAYIFQDINAEISRSSGYLGRISDRSKQLSFGNITVGQFLINQLKANRHTSLKNQVFYRQDYMDEFDRVWETQAKFYPQLTAELKHEIRDIVIFYQRRLKSQKHLINYCQLIESEIADKTTGEIRKVGPRVAPRSSPMFQQFKIWQSINDIIVTLPDDQQRPLTLDEKTSLANELSIKEKLTNKEIIAILFGSKAKGYALNVDKSIQGDTTGHNIYLGFSDILEDVGYDAIDFSIAADEIKQMVRQIFQSLGICTDILTFNPLAERPEREPYYQFWQLLYSFEDDAQTGVTKLIQKLEDRYGFDGQQARILTRVTFVDDYGNISIKAIKQILPYMMEGLGYSDACAKAGLNHSKSSITKADNEARQLLQQLPQIAKNSLRNPTVEKILNQMVNVINALIARYGHPDEIRVELARELKKNKDERIKMTESLNQAEAENNNIRKILMSKGLKTVGRNDIIRWKLYQELATNGYKTLYSDKKIDEADVIDGKNIDIEHIIPQSLLFDDSISNKTLEYRDVNINKGNMTAIDFVKSAYGEAGLTRYINTVDELFKDKPGKQGKYKKLMMHRDEIPTGFIDRDLRQTQYISRKALEILHDVCRQVIATTGSITDRLREDWQLIDVMKEISIDKYRALGMVEEIVKGDKRIVKIKDWTKRNDHRHHALDALTVAFTNRSIIQYLNTMNATDCDSDEGRAAAAFKNKYVVKGRISAPMPLNILRAEAKKHIENILISVKAKNKVATKNHRAGDTLTPRGPLHNETFYGKRTVRGYEPRKIDASFDSEVINTVADKQERKALARRLAEFGGDPAKAFTKKNAPAKNPIWLDEAQSVALPDKVNVVVERTVYTIRKDISKDLNMGKVLDPVIRKKLSDRLAEFDGDATKAFSNLDENPIWFDRKSGIAIKRVTIDAGIASPVAIHDKCNHLGERILSDDNIPVPSDYVATGSNHHVALFAAPALDKNGKIKLDSDGNPLETVEEHIVSFFEAVERIDQGLDIIDYNYNSHLGWKFLMTIKANEYFIFPDIENGFNPREIDLTDPKNRELISPHLYRTQAISSKYYCFRHHLDTSAEYPRELQNYTWIRITMISRMKDVIKVRLNQLGQIIHVGE

SEQ ID NO: 3093 - protein, 1533 aa, unidentified
  REGION 1..1533: note = Description of Unknown: Cas Enzyme sequence
MKRILGLDLGTNSIGWAVVERDDNKGHIIKSGSRIIPMDAATLGDFASGNTKSQTAERTSKRTARRMRERFLLRRERLHRLLHLLGFLPKHYDDRIGWDLENDTIHYGTFLDGEEPKIAWRINDDKKYEFIFQSSFKEMLEDMKKYHPGIISDDKKIPYDWTLYYLRQKALSQPISKEELAWIILNFNQKRGYNQQRDEILETSDDKKEEYMCLTVSSITPDEDAKGKDIWYNIRFENSDIIYRRKSKYPLNWVGKKRNIIVSTKLDKEGNPKLKKDGSIDYSVKSPNDDDWALLKIKTEQDLKTSHQTVGQYIYAALLANPSEKIRGGLVRTIERDFYKDELKKILQKQSEFHAELKNRSLYEQCIKELYRNNETHRNNIAKNDFTYLILEDVLFYQRPLKSKKSLIDDCPYESHQGIDKGTGEICNYSLKCIAKSNPYFQEYRIWKFLSDLHIIANTKDINGHIHTDVDITNELLPDNNSWSHLFAWLNDKAHITQTDLLAYFGIKKKEQSKFRWNYVADKHYPMNATRHAILNRMKEGETLNRELEQAIWHLLYSTTSKAEIDKSLSPSNKSNGIYKKMIEAGISEESIEKIKNIKLPDEGYGAYSEKAIKKLLPLMRCGNFWDESKIHPTTLERINEFLKGNGMEEFSEKVKQLISTMSDIHSYQRLPEWLACYVVYGKHSEANEIVKWKTPEDINIYLNNFKQHSLRNPIVESVILETLRVVRDIWKRYGDIDEIHIEMGRDLKNPSDKRAQMTQRVLQNENTNIRIKTLLAEFMAEEYKIENVRPHSPSQQDLLRIYEEDVLAHNEPDEEIQDIINNLSNPTKQPSRSQVLRYKCWLDQKYCSPYTGQPIPLSRLFSSDYEIEHIIPQSRYFDDSFSNKVICESEVNKLKDNQLGYEFIKRHHGQTVQLTSGRMVRILEVEQYEQLVKDNFAQNKRRKLLMDDIPAEFIQRQLNDSRYISKVVKGLLSNIVRTTDEEGNLEREAISKNVITCNGSVTTRLKRDWGLGEVWNAIVLPRFQRLNEITGRDCFTALNSHGQEIPAMPLELQKGFSIKRIDHRHHALDAIVIACTTRDHVNLLNNESALPENQANKHALSHKLRQCEEIIINGKKRTIYKEFLMPWNAFKSDTFNSLQEIVVSFKQNLRVLTQATNLYTKYKDGEKKQQAQHSSDHFAIRKSLHKDTVFGHVNLQRITTVKLKDALKDINRIVDKRLKKKIKELISKHYNEKQLLAYFKDYAYEWKGYDFNKVKVFYNTDEKEMMVATRFCNDLVSVFSGKTKKQDIEKTIEQITDTGIQCILTNYLNANLEQIEYAFSADGLEKMNENIAAYNNGKRHKPIFKVRLFQPKGNKFQVGQTGNNSKKYVVADAGTNLFFAVYQTTDGTRKYKTIPLEEVVARMKMKLHPVNDTDEDGNKLLFCISPNDMVYLPTPDEVSDGHLNQENIDANRVYRFVDSSGTTANFVPSKIANVIYHLKKDQAELFCNGDTIQDELGKGSPQSKNQKAITGEMVKDLCIPLIVNRIGEIKFK
